United States Patent Application Publication US 2014/0325702 A1 - sequence listing, part 48

SEQ ID NO: 138279 - protein, 37 aa, Heterodera glycines
EQPEKQQRQQETQPNSALSQEVEEKTTTTITMARASE

SEQ ID NO: 138280 - protein, 97 aa, Heterodera glycines
MGLKRRSTNEGETIALLTLGLKNVLQTLPDTVHHYDDDHWHGTDYGTVKMGEDDGREQHQEEANQYGNGYASGHPCQHLTVNRHQEKNEVSKRVHWH

SEQ ID NO: 138281 - protein, 47 aa, Heterodera glycines
MDHVLKVRGLTLNYDVINNQGMRYENFKEEVVRLKNAQLSKRRCNLY

SEQ ID NO: 138282 - protein, 35 aa, Heterodera glycines
NSSNPEDIESLKQALKGALYEQEEEGQSDHFKAAI

SEQ ID NO: 138283 - protein, 176 aa, Heterodera glycines
MAQRKCKIVNSDEKALPNPQNPLPNKVIGFSGIQIIFIDQNVLIFLRRFDCFFASCATKLAIRTENIRISEFLLLRIWPMFKDTTYLLCFYPIAFRLIRQLASSILNEFPSLRIVAFQGAIFPAFPPDDSANALDGQAVAKWLFTPHPSNLMKALYVTIENSSVDQLLATFEQIKA

SEQ ID NO: 138284 - protein, 99 aa, Heterodera glycines
MKEWHNENSSQVLENLMEILQERIEGFGDPDLFKNAAILKNWAFLKSDSAITVGNNLFVFSSSGRPATFANGFPTFQSFFLIFDPFFTDSVRYYLHVMF

SEQ ID NO: 138285 - protein, 69 aa, Heterodera glycines
QERLTKQMLSAILQAVHPTGVGVVIEASHMCMVMRGVQKINATTTTSCMMGVFRDDPKTREEFLTLIKK

SEQ ID NO: 138286 - protein, 408 aa, Heterodera glycines
MPTVLDYHGLDMLLEREFAPCVGPMSAQQNDDDAAAIVQPKRKGMKRPYDEFIGDESAVGMVKSPSFAEQMQHTAPPNLNDFCMEHYGFDEQYIRAQPDRVYDIFATILSIPCPPEEEHNWGMVRQYRMTTQNREGDTLYFRCSRCESLMRYTNDEYRPKLTMKDGDIQGDCFPAHHPQCYPVKKEWVILQQLDRQARLYMMQFDMAQWEAMRQQQQQQPAEDNDGTAAAEFDAYSGSIDHDGGEVSAGGNVPPAIAMLSNGVSAVGVGEEEYGDIGDDDTVLPPSATAMLSNGGVIGREYDDDDFVTTVPHSTSMAFVPNGAATAAAMPRGYGMDEVMATTTAAQQNHHPVLLGDRQMGFGGGTAGGKTAASNASRFRKYRIIRKRGAAPNMATAFDWRKTDLDNKR

SEQ ID NO: 138287 - protein, 147 aa, Heterodera glycines
MAEQNSFNSQKGENVVLQGQIGSDFDPIFFTPEENQNLNNVLTRMRTFESAICRQFRKLEREFAELKIVAHQSDDTDRMVKIERSIIDLEDREEMDNFQMEEKVIKMAEKAETLEIRQNAFERLTKVKFNKVVEKMKVEMAKNNRKH

SEQ ID NO: 138288 - protein, 32 aa, Heterodera glycines
TPTSYETNCFGCPRLGRRGSSPTRWTRKAGSS

SEQ ID NO: 138289 - protein, 101 aa, Heterodera glycines
MPLRVLPQIIHPPPNVPAFRVQPVQQPIPLRDVPLFVNPPPNVPEIRVGPNHDGQQPMPLRVLPQIIHRPPNVPAFRVQPVQQPIPLRDVPLFVNPPPNVP

SEQ ID NO: 138290 - protein, 121 aa, Heterodera glycines
KTRLKPIFKGEGVRRNEICVIRDGDHLDGLKSVSWFFCVRNFCVGCEVTYDRPERHRMECKEKCKKCCRMGFGFPCADVCDKIHCEECNRNFYNNECFEAHKKAACNEYNKCEKCGEVYQT

SEQ ID NO: 138291 - protein, 188 aa, Heterodera glycines
TQSTSIPITGTQPTAFQSPGLNPPSFQSPGLNPPAFQSLGLKSPAFQSLGLKSPAFQTLGLKSAAFQSLGLNPQHFNRQDSIHQHSNHWDSTHLHSITGTQSTIVPIAGTQPTSIPITGTQPTGFQSPGLNPPSFQSPGLNPPAFQSVGLNPPAFKSLGLNPTAIQSLGLNSQAFQSLGLKSPAFQSL

SEQ ID NO: 138292 - protein, 176 aa, Heterodera glycines
YWERKLVHRDLAARNLVGDKIRVFPVVKVADFVLARKLMEEDIYEAHAGAKFPLKWTAPESAVQGTFTVKSDVWSYGVLLYEIFTRGATPYPGMNNKEVVEQVVIGYRNNKEVVEQVVIGYRMSCPRSTGQFGMIPKGLQGWTRTTRTKSRKPKFFLVSHFNQNYFKKSIAHYSIK

SEQ ID NO: 138293 - protein, 75 aa, Heterodera glycines
MLSRVAAVEVKCLRMEQLKIKFPSPEAEELKMIASKTSSSLISYSFNMMECDEDEYQMSVRLKMCLESTPQLAMC

SEQ ID NO: 138294 - protein, 37 aa, Heterodera glycines
FSNALQFSSRNSLAFSVASSMVSRTALSRALFSLFLP

SEQ ID NO: 138295 - protein, 459 aa, Heterodera glycines
GQKNVLTTTVLVLSLFTFFCCGLRYVYIETDIVKLWVSEGGRLNEELNFLSTLQQESRQRRQNATKRHSDEDEPTTAAYEQRHFLPEDMDERNLKFTPFQVLIQTADHSTPSRNVLTKKELLRHVQLMLEITQLSVHKFGLNWTLDDICFKPGALDISPDSMAYVLKPTLERLIPCIWISPIDCFFEGAKPLGPSPPIDIQNIPLGPLLQLMVDDIPDQVSWTNLDPEHVVSQVTATFDLGTMRNFFMRSGIGKGYLERLCIDPLDPACPPTAPNHYGGTVLISNKREYREKVRESERVRLVYKGMERKKGRVRHGERDGKRERIRYREILSRQRERESKNRELVEVENDADSGAGADKSGQSSNATATNTSSVENDADSGAGADKSGQSSNATATNTSSTCSVHKTAFMRWLSHNLETFGGQFPAHLLPRFPNYGQVMRHGCRGVASSVMKWPARMVI

SEQ ID NO: 138296 - protein, 210 aa, Heterodera glycines
MPSARSIDTEITQPSLVDIIATPLARQGPIKPFRHREPETGRKTNSFAVDEDILTVEEKEKELMSKVQPLDAPKAGFLGTPPPPLVDLFEFSDIIVRGPQLETKDIGTQVSFPEPSSAFGGQQPARNFNGFSAPVNVVAATQVPFSEPQSTFGGFGGQQQQPPSNSNGLSAPVGVVAETVSSSQIRLSWTDPNGSAFNQMYTIKYGIRYN

SEQ ID NO: 138297 - protein, 16 aa, Heterodera glycines
EAIPEGFGLPINLGAS

SEQ ID NO: 138298 - protein, 85 aa, Heterodera glycines
AYAGNNIREHRNMIHSSTVNFPQKSQDPQMKPLFLSYADVLGLPSTVSSSASSASTSFSASVKPNFRPKSAAKDRNAARIRALLE

SEQ ID NO: 138299 - protein, 18 aa, Heterodera glycines
TIVIRRGTKVIRRGTTVI

SEQ ID NO: 138300 - protein, 28 aa, Heterodera glycines
INKSLLCMNYIIYIYSCCKFGNLVICIV

SEQ ID NO: 138301 - protein, 47 aa, Heterodera glycines
MKIIFVKIFTAGTLLAMLTVAVIVTKFYFIEEWEERRDGGGRHRNRQ

SEQ ID NO: 138302 - protein, 209 aa, Heterodera glycines
RHFRWIIPWLGTNLWLLANSSVSASFGCLLSQLSFPFYHWFSDDLLTALIVAQRKQIFECEYEDRNLYKDPNASAIYILSLAVSDRYRRRGIGTLLLNHLITDYSVPLASKLIFLHVLSDNHSAIVFYRKNGFRHHMTLPKYYLIDGQYRDGQTFVLFTSQGVFGEFVSSVGDWCAMAMSFLTSPFWRCFFNKNQTLNGRTNANCRHVK

SEQ ID NO: 138303 - protein, 103 aa, Heterodera glycines
  unsure (1)..(103): unsure at all Xaa locations
IKFWCTLEHFLKKIFMKQKNRFFQVSVWGTQTFMGSKNPTQNXSTGYREAIPEXIGLPINXGAXRSXECPENKKSIFFQCPFWVLKQLWGAKIQRRIKVQAIG

SEQ ID NO: 138304 - protein, 146 aa, Heterodera glycines
MFLKQYNLDQIDYTKRIFKALLVNVLFVSTETIEIQFGLSNCVQQTSFWTISIHFIREILMRFVVEMSWRNDKLTSEMAELEMFGIIVKIFVRRIEDSFGYCYVDSSFKTMYSYYFGQIFFGFAVKQQIKWEETIDPSDFGNLFHT

SEQ ID NO: 138305 - protein, 27 aa, Heterodera glycines
MKLRARKCANIKRRLTRGKCSTMLVMK

SEQ ID NO: 138306 - protein, 54 aa, Heterodera glycines
MIVSYNFNHFNFKYLALFSRAEFAELIMQHTIRKKSSFWVRTQNPAWEASHAGL

SEQ ID NO: 138307 - protein, 30 aa, Heterodera glycines
MSRSVPNYAGILPERVLKRTKFYLQVNKAL

SEQ ID NO: 138308 - protein, 78 aa, Heterodera glycines
KIFFWVFGAVPLNRCAQIYGETESFRNSFTIACTLILRWIFAPHNCLSTPNGHLKKSIYFCFRGSPPEPMRPRFMGRP

SEQ ID NO: 138309 - protein, 88 aa, Heterodera glycines
MGEGETPQTVLNRRHRPRGESNGNLPLRIERRSNDLLTAKLGQRLHQLYLDYDFISTLDQGIFDNLDQLKKLPLDGNRRLQLTKGVSH

SEQ ID NO: 138310 - protein, 38 aa, Heterodera glycines
MAVYLTHRDQKANNRSKFFEPHLMSNPPPMAEQVKLLN

SEQ ID NO: 138311 - protein, 60 aa, Heterodera glycines
MRGLERKSWDRNSAGKWELCEGRKGKFCLGEYRKMVILEGKKGKILVENSAVKREKVREC

SEQ ID NO: 138312 - protein, 355 aa, Heterodera glycines
MNFKTAGGLGNKINEAFSHHYKIKKQRGRREAKAEDTKDSKIDVAKRAAERAGRDVERHFNQINNISNSIQTQLNTLRETNPQILEEPDIKIWFDKMVEMGTEIQTSRNELKAFQEEVDKAKNITLEHVEKNDLKKAKKSADVAKGIARQAKTKYTSTLEGYNDKSEKGFSGIVNRLNEALGEHIKRKDIENIQVSEAEKGPQKRERLANEDVQFQYDSIDQKFIVYLSAAVSHIDLSKHLAYVLGFKNTRLFHAEEANYMPDLTGGVRQLYIYAPNLIENTIIGNQMAPLLRIVNVVDDPGSISEVIYSTEYFHRLQSKRISEITIEIHTPFGEFVKFHWGSCILTLHFKKSIF

SEQ ID NO: 138313 - protein, 327 aa, Heterodera glycines
STICFYTKNNSHFIFFYFFEPDNIPPPVIMVQHVSFRYNPESPYIYKNLDFGIDLDTRVPYIYKNLDFGIDLDTRVALVGPNGALVGPNGAGKSTLLKLFSRDVEPTDGMIRRHLHCKIGKYHQHLVEELPLELSAHLVEELPLELSALEYMQREFPDVREKEEMRKIIGRYGLTGREQVCPMKQLSDGQRVCPMKQLSDGQRCRVAFAWLAWQQPHLLLLDEPTNHLDMESIDALAEAINNFAGGMILVSHDFRLVQQVTEEIWVCDKQTITKWDGDIFSYKEHLRKIWVCDKQTITKWDGDIFSYKEHLRKKIESNDRKGTMTER

SEQ ID NO: 138314 - protein, 177 aa, Heterodera glycines
MASRKNVEQAANMKNDEGEETTTNVADTVKAKTEVAVTHSTFTSDEESSSGRKRRHSFDGTATSLLGAMIHARGEKRENWLNALEQKYAKMEKELGIDDNASDVVDFEEDSMETILKNPTHACKYFIKRVERSEEKVRAWEEKEANAASTSASTSMQAPTDEWNLEKEQSSDDSQAE

SEQ ID NO: 138315 - protein, 76 aa, Heterodera glycines
MRNELGANRVILKPQEFYKLALDHKVEISAIIPLTDDVIRVSYKQKKNFIDEHATSNIVLSLWTTSKHLTKMADKV

SEQ ID NO: 138316 - protein, 299 aa, Heterodera glycines
MTSNSYSMKRRWNFRSDQRRLQLGEGPSSRDVESEAAHWQSQNAPLFEQTAYHVHKLERFSLSRHVTEFVLNASVEEPEEALRSAFEMLIRQAVDNTQKQSGRPVAKIGISLHGRGLYEPIVLPLRPLEQNTCDVLMAELDKLGQSDGDDAGDEEGAGMDKRTLLLSEAIQVTVTCFAPPAGARPRHFPHQFWGYNEKHRIRICNWDDNYCLFYALIGSRAYHDPVLFKEWTQARQQPQQNMAQLTLLQDFCEGQEAFRLLLTNRALMRSSAERLLNGAGIREAMNAYGIDQLQPIQDF

SEQ ID NO: 138317 - protein, 103 aa, Heterodera glycines
MGDNEPDTLAKILEKKLDQQVVVKLNIKEAKGEFEGQDFDWIILTIAANDDMEEDEDGGDKKKMKTLESEGAAKKVSDAYDEEIQFMGHSTSSKQGASIEKND

SEQ ID NO: 138318 - protein, 59 aa, Heterodera glycines
MINEIWDKCCLATISSSDFKKALVEANGGEANADDDSQLKHVTVEEVISRINAMVTFVD

SEQ ID NO: 138319 - protein, 262 aa, Heterodera glycines
TVPYLSYQITGWLLGQALYWLSVALYWLSVFHAIASFALLISFYQLKIPLITFKREKEVARKLMFDGCWITEDDGEDRGLTDTCFWYLDRIYLDRIVISSKSFPMKYWDKFVRRKTKQKYREQVDEETLNALLGTERSPGDTSFDYRYNCWLWTGVILTNRQFLYRVCYLLCSASGVLFSPFFYAFLLIDVVLSFPMLKAILQSVTHNLQQLILTIMMTLMTLVVVYLYTVVAFNFFRKFYVQVINYGELPPPPPPPPLFLI

SEQ ID NO: 138320 - protein, 90 aa, Heterodera glycines
MEKEGNGKRGEWKKRGMEKEGNGKRGEWKKRGMEKEGNGKRGEWKKRGMEKEGNGKRGEWKKRGMEKEGNGKRGEWKKRGMEKEGNGKRS

SEQ ID NO: 138321 - protein, 56 aa, Heterodera glycines
MCLEDVQTAASGQMPHSDLAITRTGQNGGQTSGMFDQQIDLRTYGLNNLKIYEEIK

SEQ ID NO: 138322 - protein, 22 aa, Heterodera glycines
RTHDIFGIGVTMNGDGEMLDET

SEQ ID NO: 138323 - protein, 48 aa, Heterodera glycines
MLLKVTPWLLIRVRRCCAEPCVAWAPMHWRRRRVRCADDGTADEQCDR

SEQ ID NO: 138324 - protein, 140 aa, Heterodera glycines
VITKTSFSRFRNCCARLGDGCQQLCSYDQNLGTIQLAVLTGRCPCPVSRVGEMMVCASGNEVCASGNEDATACCQAFGVFESGFDHCRPYCNPSGGLPNDGMLYCNPSGGLPNDGMLAEKYRCLQKLTQIQKCFYLTQRP

SEQ ID NO: 138325 - protein, 281 aa, Heterodera glycines
MALVLILLGFIWHAPASVGADLPSCIRAKCSHCRVPFIAEMCPGACAVCGPIGNKLFITTAQQSAQVPDARAFGQAQVKVPFAQQLPFPSSVGGAPQQRVGEAVPAAQQRQHQRQVNSRGVNNNNNNGRQKAFRNQYGTDFGAGAAEQNHYHHQQQLPFQNGQQGGGGQFVPADHQNQGGQFVPAGGQFGPLPYQNQQQQQGGQFVAQSGQFGQFVPPGDQGGQQFVPQNQQGGGQQFVPADQRQGGQFAAPQQQQTTSFGGFYNQQQQPDEFFPQAGFGP

SEQ ID NO: 138326 - protein, 32 aa, Heterodera glycines
MRKMLRSVFLVLFVLLIGWLISSAARNLITAF

SEQ ID NO: 138327 - protein, 52 aa, Heterodera glycines
MNPNGFFFVLAVLFLVKVDFLHGVYNEPMARQVLQKHASQFQQHCKNPAEEV

SEQ ID NO: 138328 - protein, 73 aa, Heterodera glycines
MTVALIGNRTSIFMMLFLGIERLLLCSSIDVVAGGGNNFIITILNNGVMGGTIIVYTLLWLKIKFASSPNAKN

SEQ ID NO: 138329 - protein, 26 aa, Heterodera glycines
MGQDQGSRIFAGDLRVYQKNRDLFAN

SEQ ID NO: 138330 - protein, 35 aa, Heterodera glycines
MFACVIVDIRSKHTCAEFIIRDDIHKFFGFQLEEN

SEQ ID NO: 138331 - protein, 1927 aa, Heterodera glycines
MTLQNDGCSCGFFVCLYAEAWLINNQSLILPNLDINLEKRRILWHINGLYNRDNVVYHPCSLFVGSENENLGSLHDSRDSSMSIDSNINQTPVKRRGRPAKNRSGSGRPKKTENNQILMPVFSHNSSLATDLNYSDCSDYVSVSSNCSSNRGGRPKKRSGGPGRRPKKTVHTNLKENINPAQENHTSNTQPVISNELLSLLNSDSIDVPDSQPVAPGRVCIQSINKDLIKETWSSPTDMFSDDLIYCFQRYLASKIANKIVAVVNPQYTDLQSFHVGPIAFPYNVIDNCFNYSANYDILLMTIFFNGHFALIIFDRSDRDNLICLFIDSLPHYDRLFDPQYPGYDVRRIEIIKNGICELTPGLTHDDVVIRALSSSEFTPQHDGINCGVFVLLYSEAYLNNCSLKFPNLNINFERRRILWHLAQLINNDNVEYIGRNANPHPQSLPLYNVESNIEQSCPRDGDGAFICVEPDIDRTPDVILRPPSTVSSITATRRSIRLQRSVSTEKSSDNNVNTLPKIERNDITQRCYVKHQGNPCADVRAKHTTEYYDSGNIGDKICEYCNALLLNSEAEKRNGKFSSSFCCNHGSVVLPSYKEHPPTLQRFLSGQDSESKEFLSHQNVYNSLLAFASISVGYYESSLDGDKCYLLNGEFTRKIGLLPGQFAPSFAQLYILDPMAAFMQRTKNIEYGGDRVNEKTIRKLDFIIRKYHPLAKELLNFHAQYQKTLDEHGPESVLNFRLTLVEAREAPLNIKDPFLHPRQANLPDEGNSLFSIWAESDQPPLLKGIWITTDEGKLQKFRPHHPQTDSLCYPLIFPNGDDGFHPKIPYNITNKKCEDEAMELDVESDENTSDSDEKASDDNLSVASSVDSVEKCGKRQFLSVRSYIRYRIALRNDKKLHHIWSAGGGLSQKFILDYSARIDTNVANYLRKPELNLRSTLPENALRWLSRNAGLNSTEELGSVVMFRRSAPGTRAYFQHKFYDATTIMSRFKRPGFASFFLTFTTNPRWPEISRNFLHQGQRTVDRPDLICRVYEDKLRHLHFLLDSKNILGKMIGQECREFQKKYGGPHAHRVYHTDLLAIPENIDGLIWAHIPAEPNKNDRSDWAIFIRKVRELLPKYQFHDCGRHCLNRKGKCKKGFPKPFSKFTILHDDRPAIYLRPSPEDGGQTLTVKRKKTQITYDNSRVSAYNPYILVHFETHHNLEYAYGQSTNLKYLYKYPFKGPSFSYVKTNEVNGKIGIDEPAYYAKMLYRSSPEAYCRIMSLKYAKLSHTVIALSIHLPGQQKIYYKKNEKESVAQQVQSGILPETPLTAYWKMCETDPDVRKILFEHMPEQFSFNRSGKYWKKRIFSTNPKRQKNHARKPIIGRIYPVSPRNPELFALYLLTKHFPGNPEQLKMLNPTHICKTFLETARLRGLIDDSDVWVRTMEEGAASLTPAQMRQLLANILIFGSTENCLIDGALLWEKFVSHMFDTRCTDAERPARIDHALALLEKLLVKLGKQCKDYGLPTPTISIINDPQRGLIEFFFPQHLNDDDVDDIVDTTAFERGKLNAEQQKFFEMIKTAFLNPSSSRLFYLCGDGGTGKTFLLNYILYQLRKIGAKIIPTASTGMASTRFYVGGTTVHSAFKFGINVEAGILPSIPFDSFFGRRIIESDIIIIDEMTMLERTVFENIDLVCRQLCTQKQHLPFGGKCVIISGDWKQSLPVVIGSYGSAAQVAACIQSSPLYPIFSKYKLTQSMRVNPNEIEFLKWLDDVGRGVNGDTVAIPKDMVVDSREELIGWVFDQGFNMPSSEMLKRLLLATTNRIVDINNSQISQSMYGNFLEYFSVDKATDENPLSVNAADFDVAQLNQLNPMGMPTHLLRLKIGSIIVLLVNLNTSKGLCNGTRLLIKKLTDNLIECETIGTGSSGNGIIIGIPRNRHTYKDKRPDG

SEQ ID NO: 138332 - protein, 81 aa, Heterodera glycines
MDSSTSSGMSESANTPRAPSSNLAEEPTQHSDGKLLFLGIFQEQQNVEFVECCHFHSESTQNHPTDDLLLPCLPPLFHPQH

SEQ ID NO: 138333 - protein, 24 aa, Heterodera glycines
ITGVSIIAVLFLVFLMPSQNLVRF

SEQ ID NO: 138334 - protein, 80 aa, Heterodera glycines; identical to SEQ ID NO: 130323

SEQ ID NO: 138335 - protein, 233 aa, Heterodera glycines
VNNSLVALQRLDIFCTEPFRIPFAGKVDMCCFDKTGTLTKDELVMEGVAGLPTTKADSPNSNGSTSNDAMASDSRSTENDTTPSDTTVTVVQNVAECGPNTINALASCHSLVRFENELVGDPLEKAILKWLDWNVTKQDAVMPNRRMPKMAPLKIFRRFHFTSQMKRMTVVAGYQPVAGSNDTFHIVSVKGAPEVLKPMVGEGMLREVEEFSNPPSDYDSHYQQLALAGARIV

SEQ ID NO: 138336 - protein, 29 aa, Heterodera glycines
GITDSPMPDFLARHLADIGKSSERTDIHK

SEQ ID NO: 138337 - protein, 48 aa, Heterodera glycines
MVDKPYEFVDRNSLPGDQCACIRKNTRHKRPKASGLRKCPNREIRNAR

SEQ ID NO: 138338 - protein, 68 aa, Heterodera glycines
MGKLQREIKEIFENQQNEYENKIYELEEIEELAKEEMEQIESKIEQNKTKLSSRTEQQRRKKNKKTED

SEQ ID NO: 138339 - protein, 79 aa, Heterodera glycines
ANGVNGFVNLQFSVKVYGHLPKGNSCQTIIGIYARTSVLFYSLTTISNDVPIGLVRALLQFALIVSTGCIFWMLVFVEA

SEQ ID NO: 138340 - protein, 118 aa, Heterodera glycines
STDVGNGNGAHLNGHLTAPKNEQQQNGNDECETAQQKTDDGTEITAESNNGNESANKPADGNGMENPAPPQGTPQKDANDAEGDHDDQHGFGADQKQGANNDDGGGSIAKMAIVCGRA

SEQ ID NO: 138341 - protein, 181 aa, Heterodera glycines
MMQFARKHSSSSLAEQRMAMDRDHQSPANGLPDRWSAFTRTRRTRRRTTTTNVEEDDEDADDDDDIADDVDVSTEEQQTDVEQYKETVDSDEKIAPLIECEQLKNFLSGPPTTKCQINSDAILSVSSTTTKTPATAQNGGTIELVVVSKQKQPPQHNQPKPNKQSGGAESRANSAENGTRK

SEQ ID NO: 138342 - protein, 41 aa, Heterodera glycines
MPLWEFGRLLKLVLWWWLNRVFPKKDISESPAGNAYRQKRN

SEQ ID NO: 138343 - protein, 71 aa, Heterodera glycines
MADGNEWKREPLFHFARIVCLDLMKASLIASHCANVIYAGKQKDIDIDHRNIKLRLQEITTHMADWIAKML

SEQ ID NO: 138344 - protein, 92 aa, Heterodera glycines; identical to SEQ ID NO: 124679

SEQ ID NO: 138345 - protein, 135 aa, Heterodera glycines
VFGAVPPNRCAQIYGETESFGNSFPIACTLILRWIFAPHKCLSTPNGHLKKSIFFVFGAVPPNRCAQIYGETESFGNSFPIACTLILRWIFAPHNCLSTPNGHLKKSIFLFSGQSPRTDAPIFMGRPNPSGVASL

SEQ ID NO: 138346 - protein, 21 aa, Heterodera glycines
MLVIEMLSIFKRICIISYSMV

SEQ ID NO: 138347 - protein, 19 aa, Heterodera glycines
GLLGSWVRVPPGELPFMFY

SEQ ID NO: 138348 - protein, 113 aa, Heterodera glycines
MGQIKKLMCLCTSTNSWLSNDPGLFGSGPGKCPKKGGQATSTLVAISQDEEKDKKEEEREEKVEWKEGPIEEVEENVEELREEKVEAEREEKEKGRESVRGRKPGKLIESGRF

SEQ ID NO: 138349 - protein, 51 aa, Heterodera glycines
NRHFPYCFVANTDRAGTILEHWIAVLPTEIEYFDSLGDYPNEDLSSYLNLF

SEQ ID NO: 138350 - protein, 238 aa, Heterodera glycines
MDCENAENYDKVFEQETKGNKILKLHMSILLNLIDVLPDFYTFSKEKANEFATIKKLSEEKKVASFYENIFDAQNTEAARAKEMELALIRAIQHILLNDQREKTAVQSQRQKDEPHIMYLFMVLSVLDLFDDEVPARRTARMLCMALPSAKETTPKGKRQRNAIRGTTISQLVEKCLDNDIQNIERQTFADQREMSAQWHGQFFAHYLPNFPANDPLLKRIRQTIIMDGNLSHIDHEV

SEQ ID NO: 138351 - protein, 60 aa, Heterodera glycines
MTFFRTKVFKNVQFLFSADLRFFCPKCVSTKYNRCFVGGIERYQECQSITLSIRSSVPSP

SEQ ID NO: 138352 - protein, 83 aa, Heterodera glycines
MAIDQQRVDCATRLDQIPLETFVRPLPCNHIFHNHCIENSVFLRLFGSMFSYMCIYEEKIFYRLRSGHKTCPICRRGKTLMNL

SEQ ID NO: 138353 - protein, 193 aa, Heterodera glycines
RIMNEVLSDIGHTCAYIDDIIVYTDTFEEHMKFIPNYAAKAAPLTLLLRGKENETNFKWETEQQKAFLALKTELTKSPSLRPPNYKKEFHLFTDASQIAWGGALMQKDNEGTLYAVAYCSKILSQTEARYPPTHGELAAIVHAIGVFHSIFYECDITIYNDHKPLTFLLSKGKTNPKLNRWLLIFQDINPTIN

SEQ ID NO: 138354 - protein, 28 aa, Heterodera glycines
FANALERALLDMRDLVDWAGRLKGRAKL

SEQ ID NO: 138355 - protein, 56 aa, Heterodera glycines
MASKHFVEAVAKMPAKTTMSIGTIVDGLMEAAIVGHKRYTGEVMNAIFMMNCYTSN

SEQ ID NO: 138356 - protein, 109 aa, Heterodera glycines
MSAWICPGFLLFFVLILITDHCPMTQAVTQPPYGQLAVSGKNLVQKSTKKAVALHGLSMYWSQWVPKFWVKQTVNVMFNFSFILNKLSLKNDKNYLRNRNYEFCIRILQ

SEQ ID NO: 138357 - protein, 75 aa, Heterodera glycines
MSAWICPGFLLFFVLILITDHCPMTQAVTQPPYGQLAVSGKNLVQKSTKKAVALHGLSMYWSQWVPKFWVKQTVN

SEQ ID NO: 138358 - protein, 81 aa, Heterodera glycines
KKSIFLFSGQSPRTDAPRFMGETESFGSSFPIACTLILRWIFAPHKCLSTPNGHLKKSIFLFHKYFFSESALKRTKFYFTT

SEQ ID NO: 138359 - protein, 146 aa, Heterodera glycines
NGVSKNRNYAQKASQTILALPIPSTIAFIHPIMSAKIIRVPKIACDLSLAKNGVSKNRNYAQKASQTILALPIPSTIAFIHPIMSAKIIRVPKIACDLSLAKNGVSKNRNYAQKAPQTILALPIPSTIAFIHPIMSAKIIRVPKIA

SEQ ID NO: 138360 - protein, 203 aa, Heterodera glycines
MKCASDHPTGGVDENYHCTHNDSQRGWVSTCTSLELNAALDEGYRVTKLFRVLEYQSSDDQLFKSYIAEFMALKIQASGFDTSIKGNPELEEAFVRECYEKFGITIDPTKMEPNKGKRSIAKLCLNNLWGRFSLRNFGLSQTLITDDPVVLAEYLDNRSLEVTAIDELDAEHILISYEKKKEWVEEHACSNIGIIIYENKIHN

SEQ ID NO: 138361 - protein, 25 aa, Heterodera glycines
MLSLVGVAISTLPMDAIQLAMEGTN

SEQ ID NO: 138362 - protein, 207 aa, Heterodera glycines
MVEGVEYWRCPHVRNAAERLRQLAREAHPLQTRDAIDEARAALSAEARVTAPSSSAMGKVFRRAKRKAAELQGDQGLDSVNPLEMIVPNYLEPIILLNENIEIAGQQRKLIAFATQASLRMLGTYRSEISIDGTFKTAPKGFGQLFTVHTVIDSCAIPCVFACLPTKHMQGYLRVFDALRIRIGNWFPQKVMTDFEVAITAMGVMGG

SEQ ID NO: 138363 - protein, 141 aa, Heterodera glycines
MLIKFFLNDHYCFSPWCDFWGFATWGPDIWGPDIWGSRHLGTRHLGIPTFGDPTFGDPDWGPDIWGSRHLGTRHLGIPTFGDPTFGDPDIWGPDIWGPDFWGPDIWGSRHLGIPTFGDPTFGDPTFGDPDIWGPDFWGSDS

SEQ ID NO: 138364 - protein, 65 aa, Heterodera glycines
MTTSEGKATAITSPGPPGLDEGDSPPQAPTEQQQKGGPQQKEKDEKELHSLLNKEKARACECVFN

SEQ ID NO: 138365 - protein, 23 aa, Heterodera glycines
MRQADLNPWHKKPIFNQLCNCFT

SEQ ID NO: 138366 - protein, 125 aa, Heterodera glycines
LAHTVRDHLVSRWIRTQQHYYEKDPKRVYYLSLEFYMGRTLSNTMLNLGMQATVDEALYQANDRILYYELSLFGIPFQLGLNIEELQEIEEDAGLGNGGLGRLAACFLDSMATLGIPAYAYGLRY

SEQ ID NO: 138367 - protein, 78 aa, Heterodera glycines
MIGPPPPPPPPPPPQQHGTGGGAAGGGPPPQQQQVLPPPPKKNVLDGDGKRRQNANKNDGKNAKDEAAARTKHVIGRN

SEQ ID NO: 138368 - protein, 52 aa, Heterodera glycines
DSLWLLKRAPLGVVAGQQMDEAGQEMNTAHCWQWTAGHSVLRVQFEDRDIGY

SEQ ID NO: 138369 - protein, 313 aa, Heterodera glycines
SHGVGLRAKSMDIWENWLYLSDPLSNGIFRMNKFTGNFYESVAPDHRLPGTVRIFASESDIKTRNQWCNERTSHLCAKNNGGCDQICHVISDDMGTPAHKVQCSCNDTYQLVKQPGEDIATQCVNEAARVSCEGPYNFQCASDGHCIALDKTCDARADCADGSDEAPSYCFVRFCPETYYLCANRRCVQEQLRCNGVNDCGDRSDEIDCSSTPKNSSGSFACMNGHCINSSRVCDGHNDCHDQEVSDENAKTCPGLPIDCRGVRKKCPNTNICIQPADLCDGYDDCGDRADEQQLFCVSQQINLFISKPKNCL

SEQ ID NO: 138370 - protein, 69 aa, Heterodera glycines
MEKKEKFTPTTREETIVFLNHWDFMTTKLHLIFSNLFGTHLNIIIKKELLLLKILFCGSLEKSYKKIVK

SEQ ID NO: 138371 - protein, 272 aa, Heterodera glycines
MRSHINEFKILFINILVLYFFHSLTWFVYFLRYRLLLFFYTSTCDLLSPVWMVPVFMGPYQVYSVAYPSLHFAVTFERIRALFLWLASLLYLACIVGLALADPQISGHPQGVVYLTSDYNANLIFWAMLFTMLLVVATALCDWRIYLLNKRLNRVGNGPSTEYNLSLKYQINENTLSMMLIFPMDLLYALIYPIYNVIVLVLRAYRQMLSTANYVSYYHMANTLLFLHSLVTLVVYIRFIKYVSRVRKPSIVKSQPNEEANIHFKQLQAQWK

SEQ ID NO: 138372 - protein, 54 aa, Heterodera glycines
MVETYTDLESKPKFHTCNINAIALHLQIKAEERFNTSFETVAAFDDFAQKVITK

SEQ ID NO: 138373 - protein, 244 aa, Heterodera glycines
KCFHARKRFRELTEPVKALLALLKYPFIMLLLLLLTLLTVTMVLLLTVTMVLLNTLQLFFGFKALPAYVQYMESIATLGIFGALGEIAIILYIMLSSLVGLYSVPLIRRLQYIMLSSLVGLYSVPLIRRLQPRRGHTSMTAIITNCVIILVLSSALPVLVRTLGITSFDLLGNYGRIITSFDLLGNYGRIHWISNFSLVWGYNLLFAAASIFCLANKFTQPVRRELLRRFFLCFLFLFYILGSL

SEQ ID NO: 138374 - protein, 109 aa, Heterodera glycines
KMPSPSVSLLSIVAIFCLLCKCCVSAPHPCCPGSQKVASLLVNYVGIPCCPGSQKVASLLVNYVGIFRHFSSKSSLCSDVDSVAGGLKGRLIGGTNGGHATPLADIESP

SEQ ID NO: 138375 - protein, 78 aa, Heterodera glycines
PITSPDNISQLCTPSNPSPPQGILSLPEFANSYQLDIISALRGNEHDFLAKAAIADAIRAVQSDEDKMELIDFIASEE

SEQ ID NO: 138376 - protein, 93 aa, Heterodera glycines
KDIYLIICDEILEIDEVKRHKKPMQYKLRDAKGEKFNGFFYPEELAPVRRDAETTYRIERVFRKRKMPDGTMEVLVKFVGYPEREWIHETQLV

SEQ ID NO: 138377 - protein, 93 aa, Heterodera glycines
MVVKFDVQTDSQKFRLNPGFLSKIFQNQDIGPKKSDFGVENQDFLQNCFNGEIGIISSLPQNQNILINKNKWKPWFKGASLDSLILALTKSDD

SEQ ID NO: 138378 - protein, 182 aa, Heterodera glycines
MFPYFVTPLLLITLIIPTFVVVNSKSFGNISDKYTIHPPGPYHIVVVFYVADGHQKEFPFATDENGRIKLSFNEKVLKKRANIDKEDKNLHSYIAFFERKEIRDDGSTVKIAVHLRNSANEERLLHPFEMFKYNEAHETELVRTFGNYALFMKDRKYNECRLHEVFQIMFDRLPLLTHFKNF

SEQ ID NO: 138379 - protein, 804 aa, Heterodera glycines
MQQTFRNENFPRISQSQNRQNCYNCGRFGHFARQCNYPRQVRTENANIGTPATGANKTSVEVPKDTSQPQYNKPLPFSRNYLRQNFLVEQQENPPPTSQNFLIGGISMSNDELEKLFERDKSVEAENSRAKLLNVSVGKIVVIKVSVCDLSATAMLDGGAQVSLVSFAFFSKIMTEKNLDKIQLCPTRKSTQVVDINGKTVEYVGVVSLPIVRKNTEVWIRFHVTKASFGYEFLFGTNALARLNFKLYDGQNQEMISFTEVDSEEKNSVHVIYRTTLLPQATTLVELASPMNFKGENVAVFPNSEKEIKIEPTLTVSEKGKLIVPITNFSSLPITLEKDTHVGNIELVENFGETEDFFLSPLIAYCRQQNEPSLAQMSEQNANKGINAVTKKDAFPLPNIDYILMAIGGKKFFSTLDFMSGYWQIRMSEDSVQKTAFTTEFGLHEFTVLPFGLCNAVATYQRFMTRLFNEMVNDFVFIYVDDILVASETWDAHLKHLEQVFERVEQAELKLKIDKCRFAAEELPFLGHILTTNGIKMDADKIRPILELPLPSSKKQLQSFLGFMTYYRKFIYGFGSLAAPLFHLIKENTPFVMGKKEQKIVNFLKRKVLEDVVLYFPDFKVAAENALRRFIILTDASKFGISAVLCQQDELKNVRPIYFASRQCNKYKSKYCPTELEALAIRFGTRKFSQFITGIPCRVITDHKALIPMFRSKKETGNARVDRWLMEVNARYQLSVEYQPGKQNVVADLLSRVGKQSDTEKMENLLDDCPSEVVVIKKLSIKEIKTNADIEKLDRKEWVEQTKS

SEQ ID NO: 138380 - protein, 105 aa, Heterodera glycines
MAISGIAAQKQLLRLAIESEARILFFPFICACRMTIFFSAEYAIHSATPKRTENALFGKTHSLEVPRRRTKSGKAKQKWWRQLAKSLPTICCGITISISPIKRGK

SEQ ID NO: 138381 - protein, 16 aa, Heterodera glycines
EAIPEGFGLPINLGAS

SEQ ID NO: 138382 - protein, 37 aa, Heterodera glycines
MTWTACHQRHATSARAFVACNHWIRPHRLLAAPRKML

SEQ ID NO: 138383 - protein, 118 aa, Heterodera glycines
DGIVKDGLTDAYDSVHMGNCAEKTAKECQIGREEQDNYAIQSYKRAAQAWQARKDQNGTVTAGNASTLNDGAAAVLMASEEKADALGVKPMAKVIAYGDAATHPMDFPIAPALVIPKA

SEQ ID NO: 138384 - protein, 95 aa, Heterodera glycines; identical to SEQ ID NO: 124528

SEQ ID NO: 138385 - protein, 53 aa, Heterodera glycines
MRYARHHIENAEDVGDELLHGPKELAEVDDTECGIAFCRLLLKFDLKKPKLTT

SEQ ID NO: 138386 - protein, 103 aa, Heterodera glycines
NSKEQLNLQTMTMQLEILCEIMGITNITLIWGAISSWNQKIFHLLLLSLFKCSVLLCQQRKQFHVFSPVRLAFPAIGRAIRPNCREKRQSFHRREHNFLVILG

SEQ ID NO: 138387 - protein, 302 aa, Heterodera glycines
MTPTSEECHVCPSEAAGSDNSRSSASPPGLQQQKPKSRAASPPVDTANPPLNSPPSSQPLHSRLAFNGTTSAKINDTARHWKQWNSSEEMALAFGENKKAQMAARAMFDLLAANTVAECHPEQIVLDSRYLASSSLTELVNSIIHCSFTVAPILCTLHGPTHHQQDNQQQHSQHESQDEHCAGESRQAGPSVVSDSLVSNQQTVQDRASNCADEVLHFMGCELLALRPPELFLFSRQIAFGLHQLLRANAANLHASEHWEMFFILLESVGAAAYRDEIDGAEMVECQIMIKMERIMSQNSNT

SEQ ID NO: 138388 - protein, 149 aa, Heterodera glycines
NQQTVQDRASNCADEVLHFMGCELLALRPPELFLFSRQIAFGLHQLLRANAANLHASEHWEMFFILLESVGAAAYRDEIDGAEMVEVCFRRYVGYPFQLPPPPLPKNCSSVFKRGTIVLAFNLSRHDPAAFLKVRCLRTMVEASLDGGK

SEQ ID NO: 138389 - protein, 75 aa, Heterodera glycines
NDEWEQIEELVGVLKCAEEATKRFTEEPISFVLPQARSLHDELYEMKIVNRTVETIRTTLYYAFERRFFELANKK

SEQ ID NO: 138390 - protein, 188 aa, Heterodera glycines
MGVVHFKIVCASVLMGPDWWLKTAFEQVQQRTCAGLSLFVFKIYADGIWNIRLRDLYTNLVFPIVNTLTFLIAFPYVLSNFLLFFVDASREEQIIVIRFAYPFLLGSICFCALITWQWQKLKLLAQKIRNDKYLIGTQLVNFYRENTSAIVGNSTVKKSVTPMESIVNQQQQKSQVANGEQPGRNDEL

SEQ ID NO: 138391 - protein, 445 aa, Heterodera glycines
ICRVCRLSGNDVLYHPCLCTGSIKYVHQDCLLQWLKTGSIKYVHQDCLLQWLKYSKKDVCELCNHKFSFRPLYRPDMPERLPIFDLLRGSLAVGSVSTPSAFCYYGNFRPILGIVPLMAARIHRLVFLALPLFSPPAFQLFSTENVAIDIARGSLVVTIFLCTFISLVWLREQIMVQFCGFQFLMSFQIGGPAHLLHLNEDQPIVEHQQHQSEKNTHSHNLISTESDQPPDNAGQSAEADAEEHGDGKNENAYNGLTPTEQMSSFGPSTSAATSDSTDANDQTEAENQLDQLPQNRQPPSPILPVQAALVANQNQRQQAHNGGDAAAAEIDPQQQRFVDELTWQKLLGLDGSFAFIEHVFWTISLNIVFNIVFLYFPAQIGSGILSTIGLSGKNIVFLYFPAQIGSGILSTIGLSGKIAFFELPISILTGLVAIFIHGLVIHRIS

SEQ ID NO: 138392 - protein, 27 aa, Heterodera glycines
GELQKAPILDEEACRQNVDSGTCQNYV

SEQ ID NO: 138393 - protein, 55 aa, Heterodera glycines
SASKQWWSLQCKRWQIHSFVQFPNIITILFPAPFLVIPTPFLQVQSRGVLLDGPL

SEQ ID NO: 138394 - protein, 170 aa, Heterodera glycines
EIDETLVVKRYGVGRILEKQEVWLFGGVERDSNWERVFMVPVESRGAARLLPLIQQYILPGTTIVSDEWRPYRGIPNLPQNYVHWTVNHSQNFVNPANRLAYTQNVESMWKKLKRNFKQQFGNKTETYDTYFPEFIWRQRFGDRENANFLLIECMYYCDYVDRINVRDFR

SEQ ID NO: 138395 - protein, 50 aa, Heterodera glycines
MPLCVQRLRSWGQIWEPRESDDAQIGQNSVPTETDNLPSGCHNDRNRRKL

SEQ ID NO: 138396 - protein, 17 aa, Heterodera glycines
HKHLFDLFYHIHNLIKI

SEQ ID NO: 138397 - protein, 166 aa, Heterodera glycines
MALAQKFSMNFGKLAENLQSQIDYALHDRSGFKSDLDTDSSLYSPNNHKKIEHEGHLYVFAKLSADGFIKFLRCENKNNKDMKCRGRLHTNLNDVVLKQVNEHVCGANPARVEAQRVVTGIKCRAIETAEPPSTLRSIALQNVGTPVLSEVPTKNATKQVVLISLR

SEQ ID NO: 138398 - protein, 274 aa, Heterodera glycines
SKNEFFEPHKIGRRQKRVNVREIFQDAFQRIRQHGTQIACVFYVFVALMALFGVICTIARLALFNPADYLAWLLMLWLFYVFGHYINAFIKECTGCLRNNNNQIHSIELAENGPAAAGPSVEEVIAITCSWCKRSYHNKRHCFSLARFDDRCDRGVLRELILPPGWLLRLAAPRRRSANPSTGSRMLAYADAAAQKRSRRRSKYRAFVVKPPPASRCSSAQAHGVANGYSRWATAAQLQPLPIQPLLVFVNPKSGGNKGAKALNTLCWLLNPRQ

SEQ ID NO: 138399 - protein, 138 aa, Heterodera glycines
MDHELAMHGWQECVARMNNICPGQIVEFTRLKVREQGRNGNVKGSFPFTLLYNGESRHRVLGQAPAAVTNAVCSPNFNTPIIVEANDQHQHSSNGTIIGGGDRGGNDLNNPNNNNDSVINDALSAQLTNRSDQVNTSV

SEQ ID NO: 138400 - protein, 44 aa, Heterodera glycines
MIFFYRSYYRIIGSFFIGRIALFSIRNILIHLFISTLFQMVLRL

SEQ ID NO: 138401 - protein, 94 aa, Heterodera glycines
MEILNEFNLMKKELRKESVYKNLSHSQLECEIAKKLGISRKKIYKWKNEFDPHSYQCLFSPAGTGLSFFQKPGPGLKKPGIPVSVPLSSNFSVI

SEQ ID NO: 138402 - protein, 134 aa, Heterodera glycines; identical to SEQ ID NO: 128331

SEQ ID NO: 138403 - protein, 25 aa, Heterodera glycines
TCTCGVVVKLSTFHNFSPGFNFPHL

SEQ ID NO: 138404 - protein, 53 aa, Heterodera glycines
MGFLFYMFVAAVAFGGGAYCGMIYTAKRARASAGGGSKKDKKQKASKSSSGEQ

SEQ ID NO: 138405 - protein, 24 aa, Heterodera glycines
MGMCVQAHHDMRMFDGHKVISICS

SEQ ID NO: 138406 - protein, 53 aa, Heterodera glycines
MANCLYNDRSAWQCGERIGKDELCVGIYRHFYLHFHLVAHEQNGQKIAKREWE

SEQ ID NO: 138407 - protein, 50 aa, Heterodera glycines
YKNKSDFGIPDQRGVTGFLSGKIFSQKTFKNMSLGLFYDADHEYVIRFYF

SEQ ID NO: 138408 - protein, 127 aa, Heterodera glycines
MQTRYASSVRFHLIGFTSSLTLSSKCFATFPHGTCSLSDSWPYLVLDEVYHLIWAAIPNNPTPRHVKMDRHRQLDRSCTFSGAPVKGNLNKRANPSSRSIRYTSQPRGAAIQRWTLPSSLAVTTGIL

SEQ ID NO: 138409 - protein, 121 aa, Heterodera glycines; identical to SEQ ID NO: 128908

SEQ ID NO: 138410 - protein, 87 aa, Heterodera glycines
  unsure (1)..(87): unsure at all Xaa locations
IIFIQKIFFWVFGAVPLNRCAQIYGETESFRNSFTIACTLILRWIFAPHNCLSTPNGHLKKSIYFCFRXSPPEPMRPDLWGDRILRE

SEQ ID NO: 138411 - protein, 31 aa, Heterodera glycines
MEIFDEYIIVDEKSLSINIGSKFNEVTQFAA

SEQ ID NO: 138412 - protein, 302 aa, Heterodera glycines
MNSWVSYTSLDRCSKAKEHQKRQRTTLKNWRTTSSTWPNSTTLKVKSKFTITDLPSTPEALLAGIFQHCIDEAIVESRERNIEPTHLGCMISSPLLEGGDIPIPIRQMTNNTLDTILNQFKKVAQSKQQKNVSLWGEPFTVTITTLDRNGLPSKRRVKGGARRPVKTAVHHRINDQCLIKIRNNDNHFCLFYALQATMVAKTCNWPRWKFSRYLNNQYGQQGQLYHDAVELMQQVNAPMDLVGYDADTFVPHVVDYWNNAQRQHRFAVFIFGSLGQYKPIYKYIDTTYDTPLMLYFNEDHFD

SEQ ID NO: 138413 - protein, 18 aa, Heterodera glycines
YREATPEGFGLPINLGAS

SEQ ID NO: 138414 - protein, 146 aa, Heterodera glycines
IAKLRIEISSFTFSSSSAWRIISFVSTLFVKSFTLTFLAEWGDRSQLTGDRSQLTTIVLGAREDVVGVILGGIIGHMICTGVILGGIIGHMICTGIAVLGGRLLAQRISVRTGSAFLYYLDSVFLFRESFFLRSWVSLTLFWKITS

SEQ ID NO: 138415 - protein, 76 aa, Heterodera glycines
MLAEAISIKMEHAAATQTCGFENSVEHCEQNKSIVYAVIDEMDDEDVDEAMAPPPPQSSSSHKGTCSVATQTKMSY

SEQ ID NO: 138416 - protein, 90 aa, Heterodera glycines
MSITVPLSTSDKPFGTEVDNNFRFFDGELSGSGDDDDDNDDDDEIVRFNDARAVCTTATSTLPWRRIRSAMTSCTFSCCFNKSNDSRRTA

SEQ ID NO: 138417 - protein, 108 aa, Heterodera glycines
MKKSVTVAVPEQKEINQPNAEVEPPKSDTTKKRKVEDRELWKLAKGKFMLATYLCADDWDRLFHNQQKVARLEDGRFAVSFELCEECAWANCRATDLIAPMKKKPNNA

SEQ ID NO: 138418 - protein, 537 aa, Heterodera glycines
MVLPNGKTAGQVRERDGKRMEYIRRYCNRVDVYWECRISEMLARSKAMRKCFANYVDDGPLVIRDAFMGGRTGPMKLLRRAGPGEKISYYDFTSLYPYVNFTTRYPIGHPKVHVLNQQVDWSSAVDNPYPLALLKVWVVPPRRIDVPVLPVKVDDRLCFPLCISCAKEYPTGGVNNDYLCEHTDQQRGWVSTCTSIELNAALDEGYRVTKVFRVLEYEQSDDQLFRPYIAEFMAQKIQASGFDSMIKGNAAMEEQFVRECEEMFGINVDPTKMVVNKGKRSLAKLCLNNLWGRFSLRNYGLSQTLITDNPVILAEYLDNKSIEVSSIDQLDGEHILITYLHKKDWVDEHACSNIVISLWTTSAARIVLLKAMQKVVRSERCELLYTDTDSLILVHPEECCPLKTGPHLGQFTDEYPDHDIVEYCSGGSKQYGLCLRRKEAGPDAESEYVLKVRGMTLNYDVVNNQGLRYERFKEEVINYATRGDYEPIIVTYPNFLRPNIREGGRVVSMPMQKCYRPFVGKGIVGPNFNVLNFGHTL

SEQ ID NO: 138419 - protein, 18 aa, Heterodera glycines
YREAIPEGFGLPINLGAS

SEQ ID NO: 138420 - protein, 181 aa, Heterodera glycines
MPTAKVVISQDGRKLVPFFTSAYPFSNHFSCRFVIDGLEFSSSEQMYMWAKASVFGDEEAASAILRTSNPKECKRIGSRIRLFNTTAWRRISIFVMTCANWHKYKQNEDLMRHLFNFGPDAEFVECTANDVYWGAGVALSDVEKIRDINRWPGKNILGRILSALMKKFLRKKSGEMNTKKK

SEQ ID NO: 138421 - protein, 20 aa, Heterodera glycines
MDGPWVMKQGNGQEKEKQGD

SEQ ID NO: 138422 - protein, 20 aa, Heterodera glycines
LSGEKSQKGRNLNGTRRLCD

SEQ ID NO: 138423 - protein, 298 aa, Heterodera glycines
MTTNGRGRSDQGQQQKQCQNTEALGDQPQKRDGTPEGGGKGAICGGGTGGNLLDILNLLSKRAEAAASKEKGQKEEGETRGGRETEEEKKTVKRKCNVKRESDEQQPQGRQWTEDGQRKEIVEGREEEDETAMDEGQTQTHLNHSVEHILKDGEEKEEEELAKKRAKTEEKTEGKTEEKTQERETEERETKGMEEREKEETEEMQVEDGYHCANREESADFRLDQMDRFALFLGTAFPPAALRHLMKENPFFRKFCSSLRADNALTFESVNKLMDTHFARMKDKIRRKLAHIQSSVLL

SEQ ID NO: 138424 - protein, 35 aa, Heterodera glycines
IVLKKGAQKTHFCVKIFSFGRHFSSLEITILGFRH

SEQ ID NO: 138425 - protein, 87 aa, Heterodera glycines
LGHGQRPCQFVHVMEFLPGGELFAYFRALRKFSSTVVKFYSAEIILALEYLHSKQIAYRDLKPENLMVSIHGHIKLTDFGFAKVIQN

SEQ ID NO: 138426 - protein, 92 aa, Heterodera glycines
MPLYVLCNSFYSVQQRCDVLCTPDGIMLVNLAENSFYKQDSVVMRMGDKMMRNVVQPLARLKLINEEFVLIRAIIYSHMGLQWQNFKKINKF

SEQ ID NO: 138427 - protein, 252 aa, Heterodera glycines
MSRGHRFKCHGGVKGADRHSWLQNAFAAENYTIPPSSQVMIRANIKTALQPKHSLVVDKPDLNLLSNDLGIVPSVSAPFVEDIPLTIINPSNDPKILFKGMHLAYLNEIVENDGIFYESDQEKIKSGNPDPNGLTDPSFKIDLSKSDINEREREALKNLLEEFKDIFSKSQYDLGSFSGGEHHFDTTTEAPISSPPRRMPYKYRDELKKHIEQLLNKGVMVESETPWVTPFVVVQKKDGGIRPCLDFRKLNE

SEQ ID NO: 138428 - protein, 80 aa, Heterodera glycines
MSSILGIVKFVPLCLVLTFVLEKIKKQSENSELGLETHRKTAAHMARFEASEKQWGGDTVNKNCHLECSMIHQEIYVSYH

SEQ ID NO: 138429 - protein, 72 aa, Heterodera glycines
MPLFRTANPHALNSKVVRGIAKQRGITPEQVFFRFTMDIGITPLSGTTNGSLLIIRNQFTNCFIKKRTHSVE

SEQ ID NO: 138430 - protein, 119 aa, Heterodera glycines
MGSLKMDTECILGFGPRGRGWLFAGAGVRVAGAYILKTFIELALNINNKIALNFIGIFPDRHFEKSLDLDLDSMLDLDLDFLDKNPGKSRSRKNPGSSRPGSRPGPGFFEIYFNNQKNV

SEQ ID NO: 138431 - protein, 207 aa, Heterodera glycines
MYLSKIIFLFFYNFNGVFGIYEIDSKEDLKDLNVKTENCKKVKIENFSVSVKNEPIFDDKHLVGKIGHFAENATDQKHEEFAIKKESDQQSIYCIDEDNGDENGKISSAETDELEMVKQFDVMKNELRLNKNYKQLSKSKFEAIVAQKLGKSRAQIYALKRKLKKKYGKIINTKMEENAETKLMIIRQFDEMKAEEKRNGKLKTENL

SEQ ID NO: 138432 - protein, 97 aa, Heterodera glycines
MVASSFSNNGKNILESPFKLTGECKLLYYCTNELGHFLNQTSNALIGNPLRIVPFDGLSSPQKVWFHGTWLSIRDQKQKLTETIATPKNNHSAQIRS

SEQ ID NO: 138433 - protein, 92 aa, Heterodera glycines
MIGRAVRNRPFIFEGIFKFILYPRKMSISFFEKFYTSQKRLRMRRRAVHNRHFISQRIFIFRGYPRKMDISFFDKFYTHTNALEHDREGGAQ

SEQ ID NO: 138434 - protein, 92 aa, Heterodera glycines; identical to SEQ ID NO: 125147

SEQ ID NO: 138435 - protein, 133 aa, Heterodera glycines
MDDLYEEYKKHDEMDSIVYRVWKNRIEKYCANKKRTIFNLTFVKCAAEIAHFRVINQNKNSKDAYVNLKVVPDKYLQDGFVGFLHYDKTLGQQIAEKFEKEIFSNKEQINERVENQIMQLAFSFAARVILCIM

SEQ ID NO: 138436 - protein, 296 aa, Heterodera glycines
MSSARCRMALGPALFRLRQHVTTAENLLDEPVINAETTENLEQERGHITRILSRMEVELDAWGAIMNGLQGPAREAEEALFTAFIRDDRHLTEWLEDAREMLAHIAAELADEPNQPIAAGGQQPAVAVNQPVPAVPFVNNAAFLGGANVQQPAAVANHANQPPLVPNNAQIVPNLPAVAAPAPLATARLPQLSLPVFSGEPMEWPAFWQSFESAVDRAALEPVDKLNYLHGCLRGKAARAVTAYRGGDNYAHAVAALRRLFGDPRKIAEALQSELINLRPVDDSVGSLQHFLETLE

SEQ ID NO: 138437 - protein, 29 aa, Heterodera glycines
MALAQQGAEKNNAEQDQFHDDLMPDCPKL

SEQ ID NO: 138438 - protein, 161 aa, Heterodera glycines
SQPFFPCIHSIFWTRNSVFRKLISRPWSTNLPFPQQTFITQQNLGLALHCSTLIKTNEFCLGLTCPVPTEYTREPKNKTFFVCPFWRIENVQSPRSPFTNTAPPQSQISRINQFHSRLVSQINNSLPTPRLRGRRTGRGSGEMSNKYPNPTPAPPSLFNVI

SEQ ID NO: 138439 - protein, 49 aa, Heterodera glycines
MMLTRAKRASGGRWTTQQIIECIFAIFIPPVAVLIHGGHEWVLHLIINI

SEQ ID NO: 138440 - protein, 50 aa, Heterodera glycines
MTLILMTEMTAVTKLANAKVSSTCTMSGSNFYGLAARRRKIKNSNSKSKK

SEQ ID NO: 138441 - protein, 51 aa, Heterodera glycines
YRGSYSRRIRSPLYLGASVRGDCPENLKIDFFKCPFGVLKQLSGSKNPTQN

SEQ ID NO: 138442 - protein, 113 aa, Heterodera glycines
MLECLNTASQIKIINDKNSIIHFNFVFGLKRATVWGFFTDNSNALASRFRCSFQMVQLNAPSVEWDVALVTFADRSLLRNSWNALSNAIHTALIRSKKQIKRLNFGSFTVLNE

SEQ ID NO: 138443 - protein, 287 aa, Heterodera glycines
MPTDNLCQWLKIRRIGRRSIANVPETEIRRRLLYGGMEQSAPEEQLEYDEMENGDEQNVNGMVQQNFENGVEAGDRGSFGNDALDAHGLRAFSTPLNEQNLSALQRDLRMQLPENLSVIQNQIRVMNFMQNQMPNPVAHNFPALNPIACRPNGQLYENAAVNFERQREQQIRLTQQPVVEDQQSHVRRIPPPHAYTQGHRRSQDEGFEFHQGQQHPNFKKNLPIRANQQNRPECNQQPVPHPGLVFDGMMAQAIRSLDGFSYTMTLNAIPNLDGNRGTDSVNAFFKP

SEQ ID NO: 138444 - protein, 50 aa, Heterodera glycines
MLLKLADYFQYYFLDFDVIKLRTFFNANHEQVFPFISKEFFGELLLRVCG

SEQ ID NO: 138445 - protein, 240 aa, Heterodera glycines
MGKCFSSLKRHHNLQADDSSVKEFQHFSKGFKQQAGTSSTIAQHNAAFRHKNGNHSEGVSTSFQAIQKLVAMFAYESRSDEELEFQKGDIMYLMENSKGDIMYLMENSNLDWWYNLDWWYVRNMKGKQGFVPSSFVAFVKTPQAEEWFAGRIPRTVAERLVVDNHFPPGTFLVREREVDQLEYALTIRDMDTHGPCVKHYRVRQTDDAQGYFISHKAVFKSLDALVKYYSGKFIFSCYFT

SEQ ID NO: 138446 - protein, 85 aa, Heterodera glycines
MYAYGIMLIAGYGALIFAGAGLILALAALVIPVVNRMWKLENESSRQRDVLNALKSQVDNNQSECDKLNFEVFKLNKKCAHLPSD

SEQ ID NO: 138447 - protein, 91 aa, Heterodera glycines
MRKTIVGTEWMIYKNRDIGIMLFASKIQLEAAKNCKVMVADATFEIAPRGFRQIWLIHGLTYGAIYMRCLCYTSKQNYKGCGENISNRKKK

SEQ ID NO: 138448 - protein, 190 aa, Heterodera glycines
MARFSIGGLNIFESESAIAFAMSERRNPKEQAPHGIELKMQEVPVNALGDENDETVRGEYSKCYHTFQQIGNGTFGSVKLATQKGTGLMAVSKFICKDKVLPESWIQCPKRANKMVPIEVHLLENLSHPNIVRVLGVFENDKYYQLVMEKCGCGMDLFEFIDHQPKMDEPLISYIFRQVTKSVVTPRLRL

SEQ ID NO: 138449 - protein, 119 aa, Heterodera glycines
MRGTYDEDGYGSLEDKECDKGQQFCYLANCKTDMVSYLSWDCAKDTDCAKISADWTMNRGGGNYSCECTFGAPGLNLGNEKLHIPMARTIVFTEMEIPNSGISSCNMQIGGAILWVLGD

SEQ ID NO: 138450 - protein, 108 aa, Heterodera glycines
MTRLLLDVEFHVHVGLDEQQVSRMWSKDETWVIGDESIHQQVKLSDLEVAERVADANRCEDQCVIGFPLPGDDLADRSPIADEIELLFSKLRSISTYQQRAFAGFAVR

SEQ ID NO: 138451 - protein, 130 aa, Heterodera glycines
MNGGGSNNSFLCVIFDCNAYNWGCVVAERGVSTLNETVSALIALCNAHNFSSLGNRLLLLAKGAKQQEKKLFTNERITAKELTNFGPAIEGIIHQILAKNVSAEESPFNLSSALSLSICGMLMRLHHAFT

SEQ ID NO: 138452 - protein, 154 aa, Heterodera glycines
MEDDAMVELAKGPEYFNKFCADKGLIINEKNQFVSDKYEVHLGLLYVMRMKWNHVMETRIEDNIFLVVLKEMRVEKFGAKLETAPLSANAKSLIHSQKLEIKLYLKIIYLMRLKWQCAEIENYRKECTKFRKYFNFLYEYLFRTYNEGIVRNFV

SEQ ID NO: 138453 - protein, 197 aa, Heterodera glycines
VPSRLPFLSTLSTLHFQKRLPEYANRFSKCLMTADHGPAVSGAHNTNVCARAGKDLISSLVSGLLTIGDRFGGALDGAAKSFSEAMDTGLSAMQFVNEQKRLGKLIPGIGHRVKSINNPDKRINNPDKRVEILKEIAKNKTFFKQETPLFDYALKVEQITTSKKPNLILNVDERKPNLILNVDERIATIFVDILRHS

SEQ ID NO: 138454 - protein, 218 aa, Heterodera glycines
NIVNIIIIVHQFGLCIMYYLFIASTFQTVFDKEKADNEPKGKDPRWFLFILLPIVALNSIMSMRILSVMCLVGDGLTITSLTLILFMLSQIVFTERAHSIPFALPSAEGFFKASGTIIVSCLAQSLVLPLEKRIKKPSQMLGPFGVLSGGIAISTIVYAIVGFLGYCAYGEEIQSTVLEHLECVNNAKELTVLTFIIRVALCLSIFASFMLPMFVLVG

SEQ ID NO: 138455 - protein, 18 aa, Heterodera glycines
YREAIPEGFGLPINLGAS

SEQ ID NO: 138456 - protein, 29 aa, Heterodera glycines
MQENIEGILKNNIKNKDKNAVHRKLILKN

SEQ ID NO: 138457 - protein, 57 aa, Heterodera glycines
CCTKCYNSMTGCLQKCIIEHKGDPACRKTCKPNVYKCAAKCGPHCPLNWTTTTPKSG

SEQ ID NO: 138458 - protein, 179 aa, Heterodera glycines
MQIFSSACSSQEEIWVGGANLERPLNTQLYFSPSAADSRRCSTLASPQSLLSSGMHSASSAVAWSPCSSRSLSPCASPANSLKGSWSYDIINLPVHLERHIKVLKSHLPLGVVLDANIDKAINGCVVKSICSKKALAKDGRIQPGDHIVKVNGESLRNVTNAQARAIMRRANLVGAQCG

SEQ ID NO: 138459 - protein, 173 aa, Heterodera glycines
MAKRNNGNLMNEFAGGKHRPPASPPISKSQQQIEEAAALISSSRKMGTDGQKTMAQSISIVGGRVEVTQRDSITDAGGTLPTTAVPICGGGAAADEEGTALVAKTVSGIFIKSVVPDSPAGRSGQLFMGDRVNDTDLSNTTHDYAVQVIKSAKNPVKFVVQSLQSLQAFVPSS

SEQ ID NO: 138460 - protein, 29 aa, Heterodera glycines
MLIKKGSNTKLIRSLLHGDLISPFWLGTR

SEQ ID NO: 138461 - protein, 82 aa, Heterodera glycines
MGAYHKDGIVVEHNGKGHEGNETLEEYDRKFVDSLRLNLEECRNFIITLLAIAEKQMDLLVMSNEEKQKLSIKKEEYMSFYN

SEQ ID NO: 138462 - protein, 57 aa, Heterodera glycines
MSCPPPVVAAVLLMMMVRLGSQPAPAAKRVADAAGADGDDHAVDIAHQQQNGCHHLL

SEQ ID NO: 138463 - protein, 51 aa, Heterodera glycines
KIHSLLKVAKKFWGTYCGTSLLDTCLIAPVIWFCNFKKSNKLRISNFIFEN

SEQ ID NO: 138464 - protein, 17 aa, Heterodera glycines
IESHPLPADSRDNKALI

SEQ ID NO: 138465 - protein, 37 aa, Heterodera glycines
MAVIEPGGTANANEAQQRKRRFFLMFTNNSINDSVIK

SEQ ID NO: 138466 - protein, 37 aa, Heterodera glycines
MCKLANDRSIQLEMDIRAGAINSSFHHPPSSTSSASR

SEQ ID NO: 138467 - protein, 106 aa, Heterodera glycines
MSNDHNLCKIFCELYTVCPPICHGNGTAQFAIQIGAVRRVYSSNIIHAKAFIGAEGGRSRLSPCRGEIRRPIFLANRMTNSVASTAASRKFKSSQFCTKKKSKDIK

SEQ ID NO: 138468 - protein, 131 aa, Heterodera glycines
YIRAELHLHGRLDSFLDAKWTKSTTPPLHIVQFMCSSNKWTQKIGKNGKDYGKWPKNGTGGTIWPSRKISLGLTRIDQMDEKQQKKNYHRHHQIHSPGWSTFDAMTPLLYASKDNAEQQQDELHINVQRDK

SEQ ID NO: 138469 - protein, 129 aa, Heterodera glycines
NAKGSPKMINFKFPFRQRCAWHNMTVDFHQLGWSDRIIAPKRFEAGFCGGHCDYPLENESNPSNHAILQSLIHNHGAEPSHNHGAEPSPSAVCCAPAEFDSLTLLYFDERDNVVLKNYPRMVVMSCGCL

SEQ ID NO: 138470 - protein, 128 aa, Heterodera glycines
MDKVRKTAEYFSYGMAKGNVNDAANDAQMPTESAGDGNDFDTFRRLNRRRKMRNRKSKSAQKKYPGFDANDPMLGFGTPFSPWQRMSPSVNRRTKMLQSPNAGTSLNDILGLREHGYWFGTEMGPKIN

SEQ ID NO: 138471 - protein, 71 aa, Heterodera glycines
KILWNEWSCYGVEYSAQRLSKIRMDTVDQNRARDNLPPRATGDQWQCTAQFGKTGVSMSNALFMPPLVKIV

SEQ ID NO: 138472 - protein, 29 aa, Heterodera glycines
LDFLIFYFLRLVSSTIICQFGRMCVKRKK

SEQ ID NO: 138473 - protein, 147 aa, Heterodera glycines
MNSFPSPLPKFSTIGIGTFLLLLVINFHLIASNEFGPEDSVDRKKTAENNESFALLRRPNYFAKKLIVSMDAFSDTDSEDETKQRTAHFELSDSEEEFKEWQERQRERKLEKENAEMEKAAKRESAEKGTVKDKKGKLSEKKSDWKL

SEQ ID NO: 138474 - protein, 170 aa, Heterodera glycines
MPMIGSNANVDFEAVLIEKRFLRFWDSMNGDRRLPMSAKNGGSAAAALPPPAIVSVSGGLLDEFIDEGWTLSRACPSQSVHQKFDLLANSIGKRRLLLLAIANLTDRDNSVPKFDLLTASKCGQNPQSVGGTRFLDTDHLFAVANLSNCEGRGNVLVAPNTNLWVLIDPH

SEQ ID NO: 138475 - protein, 160 aa, Heterodera glycines
MLCFSSTNASRCQATLLFVYNNVHVPQPQETPLWILFYGSMGTCIGFWMLGHRVIRTVGQELTEINPFCGFCIELGSAITVVIASKLGIPISMTLCIPLRSSTLRQVPIKYKNLFLTAMFKKRPNTARGKVLLVNVVDSANRKKKRTLRERDEVKEQKGR

SEQ ID NO: 138476 - protein, 774 aa, Heterodera glycines
MAQTKEKRRKRNSTEMQKINVSRSNSDIKAFSMNEDDELTREILALFDYEDKWDKAQNRTIDTQRGDHSNGSNVNWAKATKLETEQLQFSMDPSAANSTNEWTTKSGEKTGEIQMEKGPAKEQQQLAEYDQLASNGPTKVETIVTKTTPEQAEMTMATENASETTAYSQRNHSIAKADLEREVNGTEMAQRKWEKVANDGERKGNSSEGEEKVPKMEENGHEKEMPTDETENKANRTEKVGSVLPVSPFSSAPTVPSLQIAMPSVGILEEALGIGTASPSTITYSENKLNKSTEPSIEFTNITMPLVGTEMAPSNFKSIKNENETEILAKNQSENAKSNLTTNTSQSTTELKILYPLESELSLPLLSPMPPTELPMINYEANGTDTFVEEMSNRTEEGKEANGTSAGEGIKGGALEELKRKVEGKMRIDDAECEQKEEGKGFISISASMPNRNSDLFIARKNAISVSVSSNFEEIRKSPVKMGTTEAITVQMEKMPILTTTEKTKKEKIDREKETDGKETMGQKTKTIEEETNTEEIVGKKGGNTVEEKKETEEETTEKERMAKETKTGEKEARETMAKETKIGETVARETEARKTTETRETETRKTVAKEETETRKAMAKGIETRETETRKTMAKGTETCWAEHFSSKYFSLIPLRNISAVDHCKHLAQDDLVHELKQKGTYNPELMAWASDRKSEKRQSKAPKSSDQAVKRNVEALERLLTDAPQTQLRIGTFGGEKRRKTAEAKGDEKGGQNGAKGREKAAEKAKAKAEND

SEQ ID NO: 138477 - protein, 215 aa, Heterodera glycines
MQEMVQLLGHALRVHVALKTKNSHTFVYLLCTVCNIKLTPKETGQRYNMMAIFTNLLRQVPTGRLNFGDVSSKTAVWTSSKDGFGLHFEMNSSAWRHLPHTYERNPSHVIAQKVTTAIKRRAVETMEAPSVIRAISLQSISSPALSEVPSKKATNFVNLFNQNLLKDLSADARILAKVQIYYVDMPNNDDHNYINRHPRRIEYLKGISRNYQMNP

SEQ ID NO: 138478 - protein, 45 aa, Heterodera glycines
MNLCKSPVQALVKIKNFYFLLSNVFCFFQKYEKFFKHDAGKMQTN

SEQ ID NO: 138479 - protein, 170 aa, Heterodera glycines
MDKISGSENFVFFGCGIPTPEMLCKVLKNFAEVIFEFLYPVKISSIFYPNFGISWKYFFLETNLNLRKVFVQCVIIHLISIISIPFYQSQKRRWNNAATDAATAQNPLDKESARITVLFLLAVCMDMRVQFAQMIRKMFVPFRRRGTQTMTVQTVQANFNSRMRHNANAN

SEQ ID NO: 138480 - protein, 21 aa, Heterodera glycines
MPFWSCKKANNSDSPEPVIPR

SEQ ID NO: 138481 - protein, 135 aa, Heterodera glycines
MCLYMLFLCPYTHHSTWPLDSDPDPLTPRSESGKLTIVKHVPIGIKDIIPHIVLSVVGLSKQMNCTIINSLSPLSKVRDAFRITNFLICIAFMILCAFPMYRLARERLTLYMVISKVWFFIGRVDLIRVGHDHSG

SEQ ID NO: 138482 - protein, 335 aa, Heterodera glycines
MHGLLEDDKIWDKTLAEAALSRWPDQMRWLFVSILVYGQPSNAIELWNKYKDQIYNPQGITTPAQRQAAELEALADIDWRLHSCFNLSCVHFSLPDPPTSIAKNTDAAIEEFFFGDDDLNLPPGQPNPRPQPNTPPPLNSDQQKVFDAVLLAIQSNPRDSTVPRRFFIYGDGGTGKTFLFGQIIRRLRKAPYTYKVLATASTGCAAILLPYGKTAHSTFRLGREVSLDKLPSIPLESFFARRIREAQLIIIDEITMLHNTVIEVIDRVCKEMAIRQHKDLLFGGKTVIFSGDFKQSLPVVPHEGLTAQVTACFQMSPLFGQFTTMKLTINQRLGQ

SEQ ID NO: 138483 - protein, 104 aa, Heterodera glycines
MRRKIQMPNWSKLSRFIHSATLACSRVGFGLFGRISWPNDGTKGAEKKDKWAKWLSVETKARTVSDCVRQCYEYRFWSVCGGKTMDQSENQSGMRVGNGKGRVE

SEQ ID NO: 138484 - protein, 76 aa, Heterodera glycines
MPKNVQFPTQVCPCADQKCVAEWKIAIGTAHRAHQKDLNGNGTDKCRSLLPMLARQKELLKTDLANGEIFLSIPIV

SEQ ID NO: 138485 - protein, 62 aa, Heterodera glycines
MAITNLRTEGGDHNQFLWNCFISCQFQSDDDDFIMPFGFTNQLTGERLAFKSANILGRLGYN

SEQ ID NO: 138486 - protein, 101 aa, Heterodera glycines
MALTSEMSSANSNATKATPKGATNARTNPSTAHFAGMPNIGQLPPGKYNWREFEKLQKEIGNKIEHLIKNDQFDMGMCRYDLKDRAKRRAEMEKKMQMEIS

SEQ ID NO: 138487 - protein, 1269 aa, Heterodera glycines
KNGDITLMDVCFLRNFWLYVEKLKTKKSVEFEEMNAFCEQLEMHVTELKHPEQFKNFAKQFNMFLSDCHFVYLDNLLTEREMRKNSNFRQIFEIENRKTDEESEMTQRFRELTAKNEFDQIKHAKRIMIAFLMDQSSVDQLELNNPILLAIGIESDDFFRMLYEGINKNGFNGNVMFIKLSILFAKIIAHFANCQKKDSINKYKIYWKQFDKIMGKNDEWRKESNKQKILAQLDELLAKMDSEFGTSKVTERLKLILNDLGRCLIELYLENEAFRNNFREQPENWEGVNKLFESAVSSSCDDSLLNKTMELFESRISKPQKDDFINNANRSFVKELKDQNIEFENTKEQDAIIVMKQYMELLTTESADNLRKDSPFMQNLKMHATHWYYRKCINSFLELADTLIEQHGQQNAKFKDRIDKYKLKGQNLSGQNSEKSNGRKRELCMTYKLAYELATDQTLIKMNSDWKTEIEKFVQKEKEDLSKYTGINAKNVTKIVKWKPTECETEKGVKRALAEQRQRMRKTHFEYLDRLLSEEFFRAKFNKISGAKERIRKLLTDGTDKGEEANAEKIRAMFRTPECVREAFLNAPLSQFYEEALLDEKCQFHQMANWLKADVVVIAQKIELALEQNAKRLQPLGKFWEKNKYSFMELFDRILDSEISEIELRVMEFVELIDEYMDKVMKKCMEMSLNGEEDKAMKLLCLNSDDKTSDRQKTEQKADAEFYGKWINNLHFDTLTKLMAENGQMKSNLKKVYESSEEAIKTLMNRFGIERANEILIICGTREEIKEQSVEEILMEITEKERENGIKKNNKNRRKKENKKKQKEKPTNGRIENGGAKTETKKNESELSKSDSNEMENKILSDEETQKNDDGQKDKTLVKMKVKKDDKVTTKEDEKITTKDEDKVTTKEEDKVTTKEIGDGQNLEDIQSVRGGKMMEQIHAADQNESRTNDQTLGSDKGTTNGNKIIGNRGEKADEKRKTKEEELSSEVKDNLKRNLNELKSERKANYESEEEEEEEEENCNGKMPKFDGKVPNRNEQEMANWETKSEENSEEEDKLDQNELLHLKIGHFSDDNLLSLKYGELFWAVSKESWENDEENDALTVKTLCWTLHLGVYANEISNRIGLFGTLEELKIIGKNEKLEIEKQWEKLKMVELSKIISLCERNKLMAKLHLLLKKIVASMDGFCAENGTNLWTEIEETKSQLHSRKLAKTMAKSETERQLKRKMDKVILALIQTENDGREDGMPKHRAEFEEQLKAVKHFDGQRKLGN

SEQ ID NO: 138488 - protein, 272 aa, Heterodera glycines
NLKKLPSLIVTIPPYNSLVPKMQSEDFDDGFKLPPTELSKAFKLPPTELSKAPDEVFDVISKIGEGSYGSVHKALHSYGSVHKALHRESGHTLAVKMVPVVPVDTDLQEIIKEITIMQQCDCRHVVKYYGSYFKDSDLWIVMEYCGIVMEYCGAGSVSDIMRLRRKTLNECEIGAILKDTLLGLNYLHGLKKIHRDVKAGNILLNMDGNAKNILLNMDGNAKLADFGVALADFGVAGQITDTIAKRNTVIGTPFWMAPELIQEMGYDMKADI

SEQ ID NO: 138489 - protein, 69 aa, Heterodera glycines
FEYPKRTLEKIDFFVFGAVPPNRCAQIYGETESFGNSFPIACTLILRWIFAPHKCLSTPNGHLKNRFFC

SEQ ID NO: 138490 - protein, 56 aa, Heterodera glycines
MIILFNIYNYFNNILNYSDDDEKKLRNGRRSKWLNGTSVAMEKCLPKRFGKNSSTK

SEQ ID NO: 138491 - protein, 97 aa, Heterodera glycines
SGDIVRVLLENFLYHFDEELDDAKMSGGGSGAGRRQSRSDSFVVSLWSTLQRTLALGPQADGDSDGSDCFPPHSLSTLILTLLLSLVYYPSFEGRTN

SEQ ID NO: 138492 - protein, 97 aa, Heterodera glycines
MGTYAFDNYGFLWINGKEKGTNIEYFYRVGDTVGIGVHLFTRQLFFTKNGLRLDSSGLFVDPSFADGSLYPFVSLFGSGYKIEANFGPNFKFDLATL

SEQ ID NO: 138493 - protein, 100 aa, Heterodera glycines
VFSLLRAFLRWLVHPTIFSLPYPSLFILFYLSFIFSSVLFLVPFHIQVLLALYFEHISEERGRRNIAKIVICYLLAIQSKAKTFSQVDLICDFCDAYFVW

SEQ ID NO: 138494 - protein, 547 aa, Heterodera glycines
MTTKSEDDSFDKIAVEQMNESMKKFTGIKPDNVQTTHNVHRSQTEDRDFERNFGFPKELTLYRPNQKEYTFWGHQCLLLKHSVQFWTNLLNDPFDIKSQEMMPISAEECQEISKTKKCRFGILVGDSDGTMITENKLIYEHSWWSWGKKSVETVNCIVNNITIIGYPGSQRIDSIVGDLQHCQYDDGRCSLHDSIVVWDVDRYHTSEPWAARHGHCVFKSFSKKNGTIYRIGWISDPPDLALTFGEDPTFITSCLRRLVVSQQGFAIEEREFVKFNRQLDRTRRNVNFDEPLDGEVRTSQLDAQLTARSMFADKEMRKVLQAYFKLICDSIFGSVLGTDLSHLNPNFLIRQLSDNQQIEAEWISQNILEIWPCSPVYEYGFAQTKDKCYKKIPVKVTLVRKDKPILAYLDPKTLIISAEARKVDCQTDRYKHIVLEGRLYEIDQEVISGSDSEFDTKAVMPRKQKQQSADEIAVFAPSLSVPPICISPLHIHRFISAPPLLGHPSSHLPSHPPPLSLHRTSFAPSPPGPNAWTMPLKNDGRKTFHIV

SEQ ID NO: 138495 - protein, 294 aa, Heterodera glycines
ALASLAHLAFAPRITQRGGSALYKKRCQQPFSDDHSSGATKSKRFRPVEDQPSHSEWTQAIRPIRPVEDLQQHQSSSNPRLHRQQQFPVKAVYDFWKLESIPPIPPFINDRAPFCRRVRVEKRELLGFFNQQFYFSNFNEAYEFVIHERTYRCVEQYYCAQKALYLKRFNAADAIMLGTNKYGKRISAFEMKKFANMNGEDEVTVREWTELKIGIMEEALKAKFSVPDLKDVLLSTGSAIICELSPDQFWGVGCRPGLIYDKWPTADIQQWNGSNTLGRLLMQLRDDLKEATPK

SEQ ID NO: 138496 - protein, 48 aa, Heterodera glycines; identical to SEQ ID NO: 130859

SEQ ID NO: 138497 - protein, 127 aa, Heterodera glycines
MVFFSHYMQACHSPTRIARKRKASTEQSADLDFVLDKRQTGSTTAKKETDFVDYVLGKKRKQRRRQQKFFTSSEEEEKEVWCWNNISGRCDLNFKFTILRRMSSIPKLVDKCDLLSHLYCFAYKFLA

SEQ ID NO: 138498 - protein, 101 aa, Heterodera glycines
MASELDHSPSPSIIGSNNNSAKRSSRSAESSAESTRNRRFLANLQATLGGTGKSQNSSPRRGNKPRNFGRNVLPKTVDSLEEALRLINLSEGRRLRFADGR

SEQ ID NO: 138499 - protein, 106 aa, Heterodera glycines
MTSTETSADRLAVINSSFADGPQNEEQRYDGFQVEKQRFNTGPCATCRDRKRVDKLKLTNWTNRKVLILHPKNNNTNNNSKLFNKFKCSATNRQILVFVRKRSSKS

SEQ ID NO: 138500 - protein, 106 aa, Heterodera glycines
MERGHKDPAFAHRRFKLPRSRPTHGEIKQVDIQKEQNEDPEMSILIQFLKSGEFPNEMLRQEKDRLSILAKDLCIESNILYFRQKDTKPRIYIPASLRALIFDSFP

SEQ ID NO: 138501 - protein, 143 aa, Heterodera glycines
MITIIKHKQFSKSPFYKLFFIRAVADILSLVPNSLGILLPAFFGQQLLSIYSTVPNWAIVLLTFFTKTLVFQVSNIVTVFILLNRFTAIAFPLRHKMLWKKHFRHLMVFLLIVPMLITFPIMRMRTIIVFYDSNSFLLDDKDP

SEQ ID NO: 138502 - protein, 94 aa, Heterodera glycines
PKNSYLFFLIFLPQTWYQQLPSLVWPYQTILRYLKRKQKKFLTKKWLSLFSHFFTANLVPTVAFSCLALSNNLTIFETQTKKILDQKMAISFFS

SEQ ID NO: 138503 - protein, 45 aa, Heterodera glycines
MTFYSKHVAISIKTFMNLKVYISRNDFFVGVRYLKNMRFAHKKFL

SEQ ID NO: 138504 - protein, 89 aa, Heterodera glycines
MAFRGPKMSEIEIQCHPRHEPGMAFRGPKMSEIGIPCHPWHEPVMAFRGPKMSEIGIPCHPWHEPFHGFTPPKQVCSPNFMSAVFYLFS

SEQ ID NO: 138505 - protein, 15 aa, Heterodera glycines
MKKIIKKNNAGVKML

SEQ ID NO: 138506 - protein, 40 aa, Heterodera glycines
KIFNSFLNRPKSLGLTFFSETDQKRTKLSRDTERKRNNLF

SEQ ID NO: 138507 - protein, 27 aa, Heterodera glycines
MIVFCCFMKKEKDIFFKFDETELARRV

SEQ ID NO: 138508 - protein, 51 aa, Heterodera glycines
ESMKYAPVTSCDVECSFSIYKSILADNRMSFTPEHLECIRFAIVFAKLIDC

SEQ ID NO: 138509 - protein, 136 aa, Heterodera glycines
MFIAPFTLILSGATGSGKTQWLMKLLRSYAELIDPPPAKVLYCYSEMNQSVIELMKRGIETHNGVPDQALIQSQPKPLLLVLDDLMLNTNRCQNSHAYCFGLITAMDCFGMQTHHCRWYPAGATPDNLHFPVCGAA

SEQ ID NO: 138510 - protein, 17 aa, Heterodera glycines
MYNNPKRSLKTAKINAH

SEQ ID NO: 138511 - protein, 126 aa, Heterodera glycines
MVNKHIQPEFASVVPAIGENGFSNLWWIYLEWQPDMVMNRVVGLVVLAGPFTTQTDIRGYDVRIIFDHHNLEHEMAMHGWQECVPRMSNICAGQIVEFTRLKVRAQGHNAKGSVSLHSALQSGVAL

SEQ ID NO: 138512 - protein, 28 aa, Heterodera glycines
MHCLCVASWDHVLVRVLTLLAQLGCGVL

SEQ ID NO: 138513 - protein, 21 aa, Heterodera glycines
KVKPKIFGLFKKELKILKILF

SEQ ID NO: 138514 - protein, 678 aa, Heterodera glycines
MKEEEYEKFEGWYNENFETEFELGEQLKVYCENDVEILMEAIMKFRQLFLDITDGMDVLKDSVTIAGVVMRIFRTKFLKDRHIPIMPEGGYERADNQSKIAVKYFEWLAHREGIRVRHAENGGEIKFGDLKVDCVIGGQKRIIEFQGCAYHGCKNCFLPWAVGPNGLCMEENYRRTEMRMEVLREMCKNFSVEEVWECEVKAELKKNKEMKRFFESVPDKGPINPRDAYAGGRTMPFCLYAKATEAVEISMFDIISLYPFVNYDTPYPVGVPKIVVSRNFNVNWTVPDDVPYDGLLKVKVIPPKELLYPLLPVHIDEMLLFPNCGICARKAKNEFVTTKDVKKCNHRPEQRAFLGTFTSIELRKALELGYRIVGFYRAYHFEQFDNQLFKGYVRMFLKIKVEASGWPAEVKSEEEKRAFTDMYKAKYDICLDHDKIVFNPGLPMKIKGLNSLWGKFSMRNTLSTSEIFNSMERWVALSQDNTLDVSTPIQICEGVERVVYRKKEEFIKEHKVSNIVLSLWTTSAARIKLYEYMEQVYREEGCKPLYCDTDSLAFAHRKGRCPLKEGKFLGEMTREYSDSEILEYVSAGPKQYALKLRRKKDGEIWEKTKIRGFTLNRSNKMRYEEFKEMVLGYQEGVKKVFRYPEKIGPTRDSRILSRDVKKEYGPVQRKGIVDENFN

SEQ ID NO: 138515 - protein, 152 aa, Heterodera glycines
MSFQNTPKEVRRARNTRHFFKATPDKGKCLEKIESHVNERAKFGIREHVTSFYFKCPPNEDAENNFRIIIDKLIQEAKEKEPAQGWKTERILLNLYCAALSDPVMIPLRPLHQVTSDVVLNEFMHRQQSFGDVNLMDERISVIVTTFAYPLK

SEQ ID NO: 138516 - protein, 96 aa, Heterodera glycines
MAKKAESSSSSGGANANIDKRDNDDSDEQHGLNEEQLLMMDNQNNKKHRFTDIRKQSWLRESIFALLIFENRILASRVKFLINRGGSQCLASGAKI

SEQ ID NO: 138517 - protein, 193 aa, Heterodera glycines
MSDDRKEAEKKMAKAIFISGDAWLAVYDLLPPSQVGLGIATISLRYDYYVDEHLKTRKWTLKFIRIRSKIGENGTEIEIVNSDGKALPIPQIEVPRKVIGFEYISISYIDHNVIAFVNRFRPIFDVCQINLAIRSAGARALENIKNNIWPMIKRNICGIHLCEDIFHRLRQFVPSIHNGCPYHFALSLSVLRI

SEQ ID NO: 138518 - protein, 69 aa, Heterodera glycines
MLFKIENYIKRPANEAAFRAVVQDVENRANQAEEEIEERHKEDRETINAQQQELELLYLCSRLVRQFRK

SEQ ID NO: 138519 - protein, 285 aa, Heterodera glycines
MDSNLRHSKHWDSLNPPTFNDIPISGTQLSDFPIAGTQPTSISLDSIHQHSNQRDSTHQHSNHWDSIHQHSIQRDSTHQHSIQRDSTHQHFNLWDSNLRHSKQWTQISGILNTGTQPTNFNGTQSTSISITGTQSTNIPIIGTQSTNIPFNGTQPTNISLGLNPPTFQSLGLNPPTFQSTGLNPPTFQSLGLNPPAFQSLALNSPTFQSLGLNPPTFHWDSIHQHSNHWDSTLQHSNHWDSIHQHSNQQDSTHQHSITGTQPSSISISGTQISGIPNNGLKSPAF

SEQ ID NO: 138520 - protein, 277 aa, Heterodera glycines
TITEFKRNKLETEARKNWDRFYKRNSDFFKDRNWTKREIEQMCAKVTFAPLTLLDAGCGCGNTLFPLAKFFPNWTFCGVDFSSNALSLLQQRAVQIGTNIHTELVDLSHTELVDLSGIPVNFSSLPKADLITLIFVLSSISLEHHSKVVQNLRKLLKPSGSVIFRDYGDSDHAMHRFNTAMHRFNTKSKIVDRFFARQDGTRAYFFCPDETKKLFESCGFETIKSEYTHCPDETKKLFESCGFETIKSEYTHRITENLKEQIRIERIFVEGRFKAPA

SEQ ID NO: 138521 - protein, 181 aa, Heterodera glycines
MSRPKVFFDITIGGKAAGRIVMELYSDIGKPLHYKGSKFHRVIPNFMLQGGDFTRGNGTGGESIYGEKFVDENFKEKHTQPGILSMANAGPNTNGSQFFVTTVKTEVIRLTWTEEIGPCPVLASEETINNFGLCVESMHSTEFAIIKQLSKSQWQLIGVAVIAENDTARGFEKFSQILDNF

SEQ ID NO: 138522 - protein, 296 aa, Heterodera glycines
CCFCCRAVPRASLPPPLRRVPPLRPSPSTVLSLTLLQLAVFFCFKSLFIIAIFTRSPRLLCVQLMFQYCTCVFLILNASFTLAADFGGYDERRIYAKRNPLLGYDERRIYAKRNPLLIRFVAFFSLAFIPVQIYLRLMTVPVYKFLRDLRKFRQAIYNAIYNGKWRYRKRVYFTYCSLMMEQQQKNLARNSARQSPIRGMISNAIIEMIREMEVIRASLKVDSSDEGQHTLLTVTDENGSSSAAERGGGGGAAIVAAPLPLPQRKRKKKQQQTVKKQKRSNKKREKKHTEEEEEKE

SEQ ID NO: 138523 - protein, 159 aa, Heterodera glycines
ARMSSLIKNESHAWPFLVRGAICLVYSDNERDSSLLNSWLIASGHNFLEGFSVFSRTKLSNNRSVMPLDVRGCTRATLAKSACLPSPKGVGKPVKICRDWDRTLQLLSVNEEFLVGASHQLALNTSLPFVHTARRCPGLSHFEKFGDGCSGRSVCRLEP

SEQ ID NO: 138524 - protein, 74 aa, Heterodera glycines
MKSHKIFGLMKISGIEDIFTRSKNGLTNMEVEVKQQEGFYLKAIVTDVLENSLDVVYDRGCRKPETVEFRFQTQ

SEQ ID NO: 138525 - protein, 32 aa, Heterodera glycines
MDNKIDQNHNQNDIVGQNKETVKRNKSNNNFD

SEQ ID NO: 138526 - protein, 61 aa, Heterodera glycines
MTFQSLKLNPPAFQSLGLNPPTFQSTGLNSFHRICRGKRFVELTMSDMTIAITVVTGETYT

SEQ ID NO: 138527 - protein, 38 aa, Heterodera glycines
IFKCLDFFFGLPKLHRTWFFLFSFKSPQIFFYSLTRPY

SEQ ID NO: 138528 - protein, 45 aa, Heterodera glycines
MVHKTGHDDLGWLKTADDYYTGTKAAIVPVGVQFILNTVIEELER

SEQ ID NO: 138529 - protein, 72 aa, Heterodera glycines
MSNSGVEARRKRKEWRRDLGRSVGLKQTNAAPTADGEGTSTQATESGPSTSASDLRPRSSPRPLSATPIRRH

SEQ ID NO: 138530 - protein, 488 aa, Heterodera glycines
MQFLRQHKISPEENCKDNRNFLVSLQNGGCESEKEQKQICSLEFLLTLEKLPELNGNEGREQIRTFFKKFSLATEEWPEKRRISALECKVSGKAERAFSAAAVNRPAKFDAIRSEMESLLDEWDCTAIQAFNELWDGPKRRPGENLEEFAERVYQLVLCAYPGLPLDLYNDYAAKHFIRALENAKISIALEMARRPGLSYDSLVALAVRAEIAQKAAKLIAEDENAHIARSFKPNKAEKTTTDWEKFYVRPTNKSVCYNCRKIGHIARNCKVKFTWKKCGFEQNNSNMNFQKENQRIRTDNLPRAKIFPKVSAPKRAKDGRNERNLSQKPIESADASTIFAGLFASFLVVANAFSNVKAKTHSRRISSTASSSSKLPALWNPLNVAFEKLRKRENSKENGINSKVKTPKGNGQLRTIVFSKAGEELADSTGPTTKLLKADTERKLSAVDGTITNKAASSHAIRPVQNCSFRFFRTFYRSNYDVGLCHC

SEQ ID NO: 138531 - protein, 121 aa, Heterodera glycines
VVTRPLDRIELFYNDITDPNKERSLYKQQFIEKCSEIGSSPLIVLVDMKTSLKTACRLPTQEQMEGYAEVLELFQKIEKRHFQNSDIIRMEEYQHMKRYSKQYRCQTSIGQTELGFAWRAR

SEQ ID NO: 138532 - protein, 162 aa, Heterodera glycines
MSKSKSGERMKRNYDKKAGKAKNFENGQPIFARNYLGGPKWMQGRILEKIGAAMFRVKTARGVWCRHFDQLKADLTSTADNCDQESESESETDAESDDEQQPQPIPIGCPRQEIRQKIAPEGGVPDQALRRSTRDRKKRCQFSEYVHSNNYLELQTNNVKKK

SEQ ID NO: 138533 - protein, 141 aa, Heterodera glycines
MSSMNDNVTVQGERNGPQTDIEAVNTDKVQPKPNTRSMIKKSRWDNNCAKPVQKDAEEAPAVKKRKVEDNELWKLMKGKYLLGFYLCAEDWNKLYFNKGKVLRAVDHQHFSVNFEMCEDCARKNIFATDLLAPPKIKKYNE

SEQ ID NO: 138534 - protein, 156 aa, Heterodera glycines
MKKYFFSRKVILFLKIAIPTNQMGQQQKLVEKAKSNDKDVKLKAVTEIHRMLKDGFKNDAAVMLVINEFISAGVLGPLVECLSIDNPSHPQLVSNAMAALAIIASRKAEPILELLNVMDYLNYGRTYLRGDEVNKNVASILKNFMHNVRILAQIMR

SEQ ID NO: 138535 - protein, 62 aa, Heterodera glycines
MFKPFKFMLFIALIIGDGAAAITGTVLIQIVIILWLQQKMIFALLFRRTLQQVVEHVRPGIR

SEQ ID NO: 138536 - protein, 150 aa, Heterodera glycines
AGPVLEAFGNALLQNNNSSRFGKFIKVNYRENGIVCGANVEIYLLEKSRIISQAVGERNYHVFYYLLEGASEQERKDHFLLEPKDYYYLNQNSASDSCCPISNDQCNEKHEFERLKHAMGAVGFSENSQQKIYGMISAVLLLGNIEYIKK

SEQ ID NO: 138537 - protein, 357 aa, Heterodera glycines
MLDKLNHFLRTNEYYEVPHKREAAFIIAHYAGKVKYQIAGFREKNKDLMRHDVMNTLKGSKSAFVRELVGEDPLAVFRWALVRATFRAAYAFRAAGKRNKRAGSVDRYGTSTVGNHGIIGTKINGDCANGSPKMLHRRSSDSRLNAFLRGELAPSIVPDFCDTSVFKTIVERARKAPKKPHNDRFSNLRTLQQLKGIMSKKKQLSNKPSSVSRQFGESLSRLMKTLDRASPYFIRCIKSNNDKIPNYFDDNIILRQLRYTGMLETSFANQYRTLLPNGHNSTKEDIQEFIRSIPVIDYNNLQYGNTKIFMRDTEKLLLDDHLHRVIMKNIVTLQRWFRAKLEQHRYQKFRQGIIKLQ

SEQ ID NO: 138538 - protein, 103 aa, Heterodera glycines
MLRRAASTESDQIQREEDRNAMVKITNSFSKVAPRAKSGFMKAKKHLKTLLTKTGRQGTTEGTFSEESLNMEGPSSSTRRSQSVNNSMDSHGYKLEQILLNNY

SEQ ID NO: 138539 - protein, 366 aa, Heterodera glycines
MVRVPDGVPDISTLPKGKNPYKNQLNALLCIVCLIYNEKLENETDYNLLKGKDHLQNISKNTSFPGDRMDSQKSPKVNGKNLMGTEIKDFLGKFDGIVAQLRTIVFQGTEEVMETDNIDFALTWDMQCGGLGPEHRNCVQLTTADLDPVLERAGFGLKVAEGRLKPQNAKFGLKVVGTPLKALLATFLLKTNAISSSAAGRKLAQSVIGAPVGFELITFIGSREDQIKSGRIPVEEDLEAILEKWTECCAVTRTKLAKCGFGAINVPIPRSIEDLPEGEGKPWTELLGKAGFVLEKVKATSVLRKHQFVTSPRIIIGDSSAKQFEDLWPTSQFIGATQGSVWRCNSGILTQWPCRQSQSGRDYNRA

SEQ ID NO: 138540 - protein, 164 aa, Heterodera glycines
MTPKVGPQMSVRKSRSANVGPQMSVRKCRSANVGPQMSVRKCRSANVGPQMSVRKCRSANVGPQMSVRKCRSANVGPQMSVRKCRSANVGPQMSVRKCRSANVGPQMSVRKSRSAKVGPQKSVRKCRSAKVGPQMSVRKSRSAKVGPQMSVRKSRSAKVGPQMS

SEQ ID NO: 138541 - protein, 90 aa, Heterodera glycines
MPTKIVPSHLVLLLELLPPPFCCAVRSRPCQSLARDGRCRSASSTGVVVPIARDCYSPCWACAAAANRWQNLNGVIVEDYAEWGGSEVVV

SEQ ID NO: 138542 - protein, 314 aa, Heterodera glycines
MKSRRAKAKGRKGTDRKVEKRNWWRNARNAHSKNIACCFEMVTSSVCSAPTALGKHRNPSGSGRSAPSLANAPAATNGPKRRGRKRIVQQQVEQEMNNKDDGQEGHQTEQKDRPKEEAQASDKPTKQGGANHHFELAMPLLPGWHSVRWHPFGLFRQRNFRVQRGGGRPFVHKCCGDNNGTASAAAPQPQCEQRPFDIHRGGGAEWGDTAGERRERCQKLRHAEANATDDEQPRYGSTVVIKKIHLVVCAVDECWRSVKRQDKCRGDKAPEGTATEETGGRSDGRGRSGREQQERHGRGGGGRADGRSTARKDI

SEQ ID NO: 138543 - protein, 139 aa, Heterodera glycines
MEDQDKQNQQERNDKNDSQEEPEQKHKNQDQGQQPQQHEQQQHQTSQDGNGHANGDLLSRTLSMPARVTGSDFVSADVNEVLEDARQIMTNSHQRKDDHHQNEQVLVSQFDDDNLNMGKLKKRNLLGRINAGQSDEDRR

SEQ ID NO: 138544 - protein, 39 aa, Heterodera glycines
MAMSPVTAIETWIMKAMPIMENIRWRLQFVSKTSTFMTC

SEQ ID NO: 138545 - protein, 219 aa, Heterodera glycines
QFPVPNSASSLAATGIANTSSNNNGTEKEALSGTEEGASLCHSRGYGTETPFSTIVPSSPSVSISNFEWVEDIQIGDLPNQNESFARVPSPATPPPLAPSALSKDIPFDATFEHFRVPPPATPPLSSSSSVLTMSTTAAEDSSNCSTIFSTTTTPKADAIDNENSANCYLDRFGKEWRLLVEAAADVKQLDQIAGEHCLNRKGPTKNDGRIYFKWVTMS

SEQ ID NO: 138546 - protein, 18 aa, Heterodera glycines
MQSEANKQKDGDLVDKQK

SEQ ID NO: 138547 - protein, 113 aa, Heterodera glycines
MRAQLAQSLLDGTVHSIVDSLKDLQTIQEQHLWAQREEKPSQLNCDGISDEKERQTNEDKAILERIDQIAHEQQSTLICAGLPLFKSSDDASDLRIQMALIQFILSLGSIYRD

SEQ ID NO: 138548 - protein, 293 aa, Heterodera glycines
MLLSILLKQIHATDVTNASRTLLMDLQNRKWSTEMCTFFDIPINVLPEIRSSAEIYGHLQKGRAGEAKNTYGTGTFMLCNTGQRAYISKNGLLTTISYQFGQASPVCYALEGSGSIGGNVVRFLRDNLKFFEVIKGTWLFISISNALISFRKPRTLRDWPRVFPTLRTFISAVAFQTVEMVEAVEADMSDLGATVLSLRADGGMTQNALFNQIQADLLGLLLECSKMTEITGWGAALAAAIGAGQINANTMIELQQRIRPQSTIFYQPKTDEEQRKKENGRWKEAIRKAFRWA

SEQ ID NO: 138549 - protein, 69 aa, Heterodera glycines
MESGELFTFAFGAFAIALIALVIIYYKCIDRRFAKKTILLNGHKKEKIEEKADEQKKGKATSKERKKKQ

SEQ ID NO: 138550 - protein, 321 aa, Heterodera glycines
RSFMWQIGLMGWQLASVQISKDLALSTLSQYGQLQIKGSKLMSSSGKEIVLRGMSLFWSQWDPKYWNAETVKQLKCNWRGMSLFWSQWDPKYWNAETVKQLKCNWGINIIKLRAPMGVEGSDGYLQSAAASGINIIKLRAPMGVEGSDGYLQSAAASAEKLMTIVDACINLGIYVIIDWHYTSGKAYTAQAVDFFKKMVIIDWHYTSGKAYTAQAVDFFKKMAQKYGKNPHVLYEIWNEPVGVDWNKVLKPYHQTVISAIRAIAIRAIDPDNVILLGTPTYSMDLNPVISSPMGGLKNIMYVTPVFITITQISDKNYAEKI

SEQ ID NO: 138551 - protein, 97 aa, Heterodera glycines
MLKKAIKSGLPVFVTESGAGSGGSNAPVNLPVMNQWWSLLEQLKISQIIWAVRGEGNLQNPLNKNTAPANIGQNWALTEYGKVVKNVFTKNAKPIGC

SEQ ID NO: 138552 - protein, 363 aa, Heterodera glycines
MYNNCGQQNSNSATDEFIQTANQRQFQTHFCGAQNEGDRAIGQRPPIGGGNGVIRNGHGIIDALMLKNALVPLDNRQTNFYQQTMGGVGPMKRAFSEHENVDGRREGTDEKENQQPMAKRMHLSVTESAETKRHNDGKFGEHGEKEEEEEEKEEEEEEGEGEEGENSRTTKSSSSAENEEPLGCYSSSAGHPQQSHLSAHLMATPLQRTQHTSASIVYPEFGQLNTPNGHRLQGNPLAHSTPYLGALSLNSFPQQPLDYWGNCFGCSLPLNSLTSFSRRCRAASADELPFFVDGFQQKHRRGGDSGVGSVRAELKGGFLNTESTQWEESQKKGEMRRGAARREGRTKAEAAEVPWDSIGCALG

SEQ ID NO: 138553 - protein, 144 aa, Heterodera glycines
MKRFITPANNYFLKLTPEKENEGVGEANDVGGKKKKPKIGNEDEKSTETRKEEHQQQQQEVQADESPAKERKVEDRELWKLCKGKFMLSTYLCQDDWNHLYHNKQKVTRLENGRYSVSYELCPECVWANCRATDLVAPMKKKGK

SEQ ID NO: 138554 - protein, 324 aa, Heterodera glycines
MESELIAQVKEYCDAFLSLKVHVNDLKNMAINLSSRTELIEKWATNSRYSPYPKGIGSTMAPAVMRESFQLLKQQSNQRQQLEQRILRDGNFEETVMRTAIASLKGTINAASAAQSSSPTPLDDAPTSSSSSMPKIAQKRKYMATDGLLSEEDREVAALALAAFNHLKVHIEQKQQTLELKLNKIEHESKAKSEWQMRQLMKSLEANFKLQIMSMEQRLDRKWSALIGKEKERAQRIATQAATVIGELIAEGGGKGKEKQCSGVMWSDKCKWCLDAGNVCFGSSNCGHAFVCPQCSITIAGSDQPKCLTCFCESTEFVYLGMEK

SEQ ID NO: 138555 - protein, 104 aa, Heterodera glycines
VFRNGCEIEDMEEFWKQAQQIQTDNHELSERVSSLTREHNRILVDHNTLRTEHERILVDHNTLRTEHERILVDHNTLRTEHERILQRQLDDFHYWILCFAFFIP

SEQ ID NO: 138556 - protein, 51 aa, Heterodera glycines
MANRKLENRDSRRVLISEFLIQKCSITSDHNSGFRPGNSEQNLYEEKLRLS

SEQ ID NO: 138557 - protein, 21 aa, Heterodera glycines
MRKFIRLAVLTIDEIIFFNDQ

SEQ ID NO: 138558 - protein, 191 aa, Heterodera glycines
SFVHFAVSMSPPKRAKVSADDDGETISDDGEPSTSAGAKRKQKASKPRQRKAHEAFILLVDVGRSSAENSAGAQSDHGTTTDLDRSVQIVDWVLSRKIFTESSDRFSLMFFGHENTSSDDHPNVYVHNEQFATARIEWLHVLQNEVQTNVKCPGDYVDALYAALDALKVHFDDAKEAGEPMSGATVTLVSI

SEQ ID NO: 138559 - protein, 136 aa, Heterodera glycines
NPETGELRSCGTAAALHGDLDSVQHGICPSSFVCKRDVQRRKPATKGEEAPRVCCSPIAFCPDARLPQVDPRTRHAKRCLSADVKASPTAGAVKRHHHYYGDSDNDYGNCTPPYTCQPSTVSGIFVCCKVPPMTGI

SEQ ID NO: 138560 - protein, 331 aa, Heterodera glycines
MFNKSSNYDKVLQHLPPREDYCPNQMMKTDLQKFITWYNNNCHQKFDLKEKLPEYCCNDVLILTHALVELRREFKQLTQREGKHGGIDILVASHRRSPKLAYLTLHSTSTSRRHTPGTANTFSKEKGGQVYQVDGYIKGTNGKRDKIIEVNGCVWHGCEECFGNMDEETLMPNGKKLCEIRQREKKKHEMLRRYVDLEVVWEHEINERLKKDKMMKQFFNNWKENSPIKIRDAFHGGRTDVKKLIHTIKPGQKISYKDFTSLYPWTNFSTSYPLGHPKIINLPQNEQIVNWRKPSDNTYKGILKVLLLPPNNNLSVTVMPVKFNQRLLFPL

SEQ ID NO: 138561 - protein, 363 aa, Heterodera glycines
MSNSFFVFLPSNVTDYPENQPNKFRVRLPKPLHFNGTWVCGLHSISYPFSWSTIGTLDEQWIDIHFTDRNAPDEDKQRVIRVPVPKAAHNRAEQLKDFLTVTLRNHSDAKLLPLPREVEQDRNRTKPLESPPPLKRVKRDTGTITPSQPPSPQPPPILDEHGKPLGSPPKYKEGEENVIDSPPLYQETQKDGVTTSVGSKEPSPTPPTQSSAKPVTATTPVPPTSKPPPSSIQSAASVKPPITPNPATKPSTPAAAAATVSPTSSTPVNTTAPVVAAKSSTLTKHPVQTPTTPKTVASTASAEQTTSAPPPSAQPKATNTVKKSATTPTTSTTPETVHKQTVSPTKTEQDDAKQSSGPVAAAL

SEQ ID NO: 138562 - protein, 125 aa, Heterodera glycines
CVDGYYGDPRLGINLPCKPCPCPGGPGSGFQHADSCYLTPSPSPTVTCNCRSGYAGERCDQCAVNYWGNPREIGFVFNNLGANSSAGSCDRVSGQCPCYANVVGPQCDQCAPLHYDLASGKGGMR

SEQ ID NO: 138563 - protein, 217 aa, Heterodera glycines
PHQGKTNLSHDGLNPAHVPYWVNNPTIGEFYFAMIGRADIEESKSNVAMDAWLPQASYPCGNFSDTSSLKFKELKDRATLSRFVFILKIKIKAFTLLFYMRFLFSLSSLGHLCYHLTDVPPQPNSPPDDVFHVAHPHKSTGFHLELGTREDGQARYKNDIRSSGISLLAASHLSYTSVISQRQTRVKLNRVFFPADFSKPVPLAVGSLDSRGQWESH

SEQ ID NO: 138564 - protein, 44 aa, Heterodera glycines
MQVPPLLYAYQLVSNDGKLLKKETKQTHQLLAPVDNPKGPLGQW

SEQ ID NO: 138565 - protein, 50 aa, Heterodera glycines
MRGGKAAEIMLTGASVGHESDEIEWKKLAKKANVGPFLLSEQKMVVPKEF

SEQ ID NO: 138566 - protein, 75 aa, Heterodera glycines
MLFVSLLATFCFQPSRCAFFDKHRKRNAMDNADGECAEDGCVSDVEAGSGAEDGDELLDDDDVQQQQHLRSDESE

SEQ ID NO: 138567 - protein, 98 aa, Heterodera glycines
MRYARHHVDNAEEVADKLLHGPKQLAEVDDTEEQQKTENGENPNFFEIKLKFHIISIEKNVRRADIRATAKRRRAQLRFVSHTSQEIAEDAQIELLII

SEQ ID NO: 138568 - protein, 21 aa, Heterodera glycines
MAQMDICTLAWSTVNSVLPTI

SEQ ID NO: 138569 - protein, 152 aa, Heterodera glycines
RRYSQFYCSILCTFPLELKMLPPNHAAINEQRKHIDVDTSWTGKEQKTQQQIGLDASDKERAVVDLLTERKQLAASAHGNVAAAETSDGKRAQVQRFGDKGGIAQVEGHSAQLKTKENAEGRHALLKADGKYELDTMAKGSLETKDTEFESA

SEQ ID NO: 138570 - protein, 62 aa, Heterodera glycines
ANFVTSSTQISKNFFRRRLSAPPDLPFPLFLQVFCLKTAKIWSFLVKKCSCYSAVEKKLLVK

SEQ ID NO: 138571 - protein, 111 aa, Heterodera glycines
MRGRLCPHGITSCCVDISVRGVQQISAYCCYKCAAAASSSAAIEANTTTTTATSDGGGTLAKVATVADDSDGQLTVPVVAANNDDEIKMEQQHHSPPAQHRSPTATATVYN

SEQ ID NO: 138572 - protein, 195 aa, Heterodera glycines
MGGASLGPLKAVKGGAGSSIGARIARNAIERNSGGMVKLQVSNLPGSVVTLDLEELFQDFNVFGVAVHYDEMGNHLGTADLFTDQQSATNILNEFKNIAIDGQEIKFCLVTEGADSVGGKRGNIRDRLQRISGGPNPIRKKPMVRKRISGGPIRKVSRTVGGRLKVAGAGTSKAAPKAKTADELDKELEAYMKKL

SEQ ID NO: 138573 - protein, 76 aa, Heterodera glycines
MTFAVEEGESLLLGEDLSQLARNDAETIHGSICARYERKKRFYKWGTNGKEHSVKILEESLENLEGEGKRTFAIGP

SEQ ID NO: 138574 - protein, 265 aa, Heterodera glycines
MTDGKLNPKALQRQLRILSVSDHCLAVRHGFQHKIPIKKFADLFHVLLPEEVVHGQNSHQIAKDILDAQGIRYAGLFEFIPGHLFLMESLFAKLCQLKQSTLTLAALIIQKNFRKFLARQHFLLKRTATIQIQAAFRGWKCRKMCGRKAWTEKKMKSLMEERLRVGAKKEEQREISEDEESDEGGKDMMRTMMKMEDMEEERRREISAMLNRTDYAGRKAKAEHTKWALFRECSDYVRSTWPPAKAKGPSFGPTITFEQFAEQIK

SEQ ID NO: 138575 - protein, 167 aa, Heterodera glycines
TYLREFGHLKHNENGLSHGVKHFQRFLGYRQTGNVHFQRFLGYRQTGNVDLATLQKMSWKRCANSDEGYTAQDPSQLWERSTLFWNLNASHPKQFTHGETKGLIAQAFRAWEIVIKIDFLETNNADNAQIIFTFESDGAKKEKSKIGERRKERKGKKAKSLSDLINT

SEQ ID NO: 138576 - protein, 71 aa, Heterodera glycines
MEPFIVRISYAGKLRPYELAEYETIAMLKITNWRTRESCPPWCNSHSCGAAWWRTRLMCQDSSESPCFFCG

SEQ ID NO: 138577 - protein, 101 aa, Heterodera glycines
QFASLRRRFTLRFRKHRSMIGPLIENALSDSDLRSSDIDAVSVSNCPGLVYCLKVGLIASLPLLPFRCFRRPLIPVHHLRAHSLVARLLHPHLSFPFLTLI

SEQ ID NO: 138578 - protein, 100 aa, Heterodera glycines
MRWNYNYAKRKHQEEVNDFADGVNRVAMDSSTAGKTYEFVGPHCYEMCELAAPADGIRGPHDRRKAKYIRQDNNLQALVANFDQRDPLEYLRACAYHLHF

SEQ ID NO: 138579 - protein, 81 aa, Heterodera glycines
DICGPDICGPDICGLLEIGHLRPDKCGRTFAVRTFAARFFRAIFGHLRPDICGPRENRTFAANETPNCHSFFKLIIPNIFI

SEQ ID NO: 138580 - protein, 35 aa, Heterodera glycines
CVPICQLKLGQLLLLHHQICVGITTMPNENTKKRW

SEQ ID NO: 138581 - protein, 15 aa, Heterodera glycines
MIEEDNMWANRIADF

SEQ ID NO: 138582 - protein, 110 aa, Heterodera glycines
MSVARECGIIRPNKRSFLLEATKAHDGQTHLTLKQSVSSSEEVLEFDENVSFYDAEQGTGGGVSGSGVGKLFNNNNGDGRIAESTYHVAVSGPTLSAFGGGGGGGNVQKQ

SEQ ID NO: 138583 - protein, 166 aa, Heterodera glycines
MPQNMPEANIDRELAPLQRTGETAHPQRNQKNFEPGDLIWYKEHTGKWVAGILLQPMGERMWEIQIEGSTVTRKLNSITKMSSGKNSPSNELERLEKEALLSKKSKSRDEKVAKEVRELVEQLQSKTEKEMRETADQLKGSIKLEMAAAVDGLWKKIEPWLSGQVG

SEQ ID NO: 138584 - protein, 19 aa, Heterodera glycines
TFAFSSLALPNTHTIFEML

SEQ ID NO: 138585 - protein, 19 aa, Heterodera glycines
TFAFSSLALPNTHTIFEML

SEQ ID NO: 138586 - protein, 19 aa, Heterodera glycines
TFSFSSLALPNTHTIFEML

SEQ ID NO: 138587 - protein, 19 aa, Heterodera glycines
TFSFSSLALPNTHTIFEML

SEQ ID NO: 138588 - protein, 19 aa, Heterodera glycines
TFSFSSLALPNTHTIFEML

SEQ ID NO: 138589 - protein, 19 aa, Heterodera glycines
TFAFSSLALPNTHTIFEML

SEQ ID NO: 138590 - protein, 19 aa, Heterodera glycines
  unsure (1)..(19): unsure at all Xaa locations
TFAFSSLALPNTHTIXEML

SEQ ID NO: 138591 - protein, 38 aa, Heterodera glycines; identical to SEQ ID NO: 129423

SEQ ID NO: 138592 - protein, 38 aa, Heterodera glycines; identical to SEQ ID NO: 130624

SEQ ID NO: 138593 - protein, 129 aa, Heterodera glycines
GTTAIRRGKTVIRRGTTLVRSGKTVIRRGKTVIRRGSTLVRSGTTAIRRGTTEIRRGTTEIRRGTTEIRRGTTAIRSGKTVIRRGSTLVRSGTTEIRRGTTEIRRGTTAIRSGKTMIRRGTTLVRSVQQ

SEQ ID NO: 138594 - protein, 396 aa, Heterodera glycines
MGWDQSGFWFFGVRYFCVSCEVTYDRPERHRMEYKERCKKCCRMGFGFPCTDVCDEIHCGECNLKFYNPECFEAHKKAACIEYKKCEKCRETHNTRNKHTCGEKFCKLCKVCHPGRQCFIKKIQVRPQKAYRIVAYDLETTVDGGEHRPNLVSVARTCNICAGEERECEICEGPSKITWSVADGFEPMSEFIECDVREELKKNKEMKKFFESVPDKGPINPRDAYAGGRTMPFCLYAKATEEIEISMFDIISLYPFVNYDTPYPVGVPKIVVSRNFNVNWTTPDDIPYDGLLKVKVIPPKNLLYPLLPLHIDDMLLFPNCWACAKRAKNEFVMTKDVKKCNHRPAQRAFLGTFTSIELRKALELGYRIVGFYRAYHFEQFDSQLFKGYVRMFLKIK

SEQ ID NO: 138595 - protein, 17 aa, Heterodera glycines
MGHQHAECIDKLGVVAR

SEQ ID NO: 138596 - protein, 23 aa, Heterodera glycines
MAKTSALLLILLLYERNCLRRSF

SEQ ID NO: 138597 - protein, 164 aa, Heterodera glycines
NTLNIEPEKRMTARGIVDYLNKKCIPGTSKQIDNVPSLPFFHKVTVGILRRTFEKRKDQKMLGLLGIVEEKQRKAMDELRMRGITCETKNILLGEEANEFSENDEFAKSAENESGQNEEENESKSKFKRMFSLKSKEKPKNDFWAIAKTKYSKLSKNSREEGDK

SEQ ID NO: 138598 - protein, 1157 aa, Heterodera glycines
DEVDEWHLKRPTFTGGGRVGDLCTQNTDCQSGMFCSVGQCICLSNYVPISSGMFCSVGQCICLSNYVPISSFCWPKVNPGDSGCVGDVQCESVVNPGDSGCVGDVQCESVWPGARCAKGGLCQCPDYYVPAKTRDGTMCVASSVPPACPLPESSVPPACPLPEPNNAAPSPVPSPVTLLANPSTHPLAPGSYMPVLCTSSSAETDDSNGGDGSTWCIYPDGERDVPIVDLYNCVPHPQVRPEYFPEYAPTVDGICCHSRAFVCIQPFVCIQPMEQGEEPSVPRWWYNSVTGTCTQFLWDPAQSDGVSPDPAQSDGVSPNNFRTMEHCESFCRDTCCRRGPAQFRRSLRASLSDDFPVANCVRQSGSCAPENTCVQIGSLQQCCPTVAHLCSAAGGRTLHLCSAAGGRTLSGGADALFDPGIQIAGSAPTSRFYYDAEQGRCSNFICSNFIYEGGLGNFNNFVTKQDCEHFCSKLVCELGQPLRVAEEWQRCELCSKLVCELGQPLRVAEEWQRCELAADCPNTHSCDSAHRVCADCPNTHSCDSAHRVCCPTAQTICTQPKRVGECTGSVSRYWTICTQPKRVGECTGSVSRYWYNAGTRQCELFDFTGCQGNGTRQCELFDFTGCQGNDNNFEQLIECQMKCRNIASEPRCPEPRCPQGRAHRDLSGLFTRCSLAEGCPLNHECHFDGQIFGCCPLRAWTCSLGSDRGTQCGAGRSFRFFFNAEKQSCESFQYEGCDGNANNFQSLDICQEYCGIGGCPNGGQPLRDQTSNQFLSCADSIGGCPNGGQPLRDQTSNQFLSCADSQPCPSRDSRECVPINANGVIAHRCCPTKAFICSLPPQVGTFICSLPPQVGTVCRKASLTRWYFNIVTRECGEFGFGGCNGNMNNFESREQCTKFCSSAGVFLQSNLPFRFNFAHFSSLCLNAALSSCPRDFLCVRDELGHRHVCCGSPSSAVCAEGEKPFWEAADETVRECQANVAGSCPSVRECQANVAGSCPSNFLCRFSAAHNKYFCCAPRNGTVVCPFGHSLYRTPKSLRPLRCFVGTSEITPLGQCPDGFSCQSRVSSDSQGHCCSVEPICRGGSPFLVICRGGSPFLVEELTQMPKNCVPGAFAECPREFQCEKSHANAIQSIGICCRRSRRKENDEKTTAGKRKI

SEQ ID NO: 138599 - protein, 514 aa, Heterodera glycines
LWLTLDLCMDSVYLVDMFVRSRTGYLEQGLLVRDARKIRSLYLRSRHFVVDSASLFPLDFLVFFVWRPLPILRLNRLLRKERIQRFMEQTETRTARPNAFRVGVVVWYIAVIIHWNACFYFMISENIGLGSDPWVYGKNNKQSMPDGINDTLTRRYIYSFYWSTLILTTIGFYWSTLILTTIGEVPGPEVPGPQQNIEFAFVTIDLMCGVLIFATIVGNVGSMIANISADRMIANISADRTEFQNRIDNIKQYMDLRGVGKQLEVRVIKWFDYLWANKQGLTDAQVLKVLPDKLQAEIAMHVHFETLRKVRIFQDCEAGLLAELVLKLQWQVFSPGDYVCRKGDIGREMYIVKRGMLQVVADDGAKVFATLSEGAVFGELSILNIAGSKNGNRRTANVRSVGYTDLFVLNKNDLWTALREYPEARKIMIGKTALREYPEARKIMIGKGRELLRKDNLLDENAPEERKTAEERIEELRASVRVLQTRIARLVAEHTNTETKVGGGISMEKLLNKY

SEQ ID NO: 138600 - protein, 232 aa, Heterodera glycines
PVRKFDAKIMFSLQAIAVPEIAKKLKCTLIPGKTKFTNFHLYSRTILGDGVGPELVYAVQDIVKATGIPIEFEEVFLSEVYYSRSASIEDVVDSEDVVDSIARNNCVALKGAIQSSLDDKTDGLNTQLRKRLDLFANVVHIKALEGIRTRHNKMLDFVIIREQTEGEYSRMEHELVPGVIECLKIMTRVKCERVAVIECLKIMTRVKCERVAKFAFDYATKHGRKKVTAVQV

SEQ ID NO: 138601 - protein, 21 aa, Heterodera glycines
MAFRGPKNFWKSEFRAIPGLM

SEQ ID NO: 138602 - protein, 60 aa, Heterodera glycines
FCSNDSQNVSSHSTNQIEIEAKKTEHGSAGLSILEILLLWLSRFSVLEIVLWALVPVVIW

SEQ ID NO: 138603 - protein, 122 aa, Heterodera glycines
MTVTSNTEFRLIECVPILEEVAREFGCITPLPNLGSHRDYRVSGCMMIRTLTSLNRLYIFDAEDCIEVKGFLRQEDGTSQKVVNEYYEKYDGLNGFAEFIRNWAFTFFCFHAFDDDDTPDED

SEQ ID NO: 138604 - protein, 101 aa, Heterodera glycines
MIGRAVRNRPFIFEGIFKFILYPRKMSISFFEKFYTSQKRLRMRRRAVRNRHFISQRIFIFKGYPRKMAISFFDKFYTHTNDLEHDREGGAQYTVYTLREF

SEQ ID NO: 138605 - protein, 24 aa, Heterodera glycines
ITGVSIIAVLFLVFLMPSQNLGRF

SEQ ID NO: 138606 - protein, 23 aa, Heterodera glycines
FDRKSIREPYLTLIKIGAFQSTF

SEQ ID NO: 138607 - protein, 147 aa, Heterodera glycines
MKFANLFLLKVFILAFFDNYHFAIGERLYKEPPTTLSRYLRGQIWDNNDAVDYYDVEVIGDDVQFPETVHAFVLEAPNGEKAIDFTKYYAFDLTEQQIFVFPTFSALQEELERRKNMPTPEQILATLRQALADLDSRLSEKLKTETV

SEQ ID NO: 138608 - protein, 21 aa, Heterodera glycines
MFKISSFIFVLCLVRLCVSMN

SEQ ID NO: 138609 - protein, 270 aa, Heterodera glycines
MDLKYPKNRRNSHIVKSSISRGSFWDGIKIRFNYGNQLKIMLENSIEYKNKRKFLSLQIVGTIEEQSFYTFYQCLFFPVAQPAPGPEVNLKNRDSDLGGSPGQGYNVSALQAAVEKEEEILMGPQIGGFEHILKIATVMMEAINQLNAAAIGPIPDRIKVEQLRFIGLVLAHLVLRDDPIVDPETGDYVFIAQMEPCIDPMDPHVWRQMREELDIQFDFSSKYLSKVETGDANRDLAGFSGSRGICSGPEFGQDQKVPPSLSIVFPKSWD

SEQ ID NO: 138610 - protein, 60 aa, Heterodera glycines
MIYLKKRRYENGGTKTAVCILVKITIVPNFSLSDHFWRVVMIKISTTFLSLCLYPSKISI

SEQ ID NO: 138611 - protein, 66 aa, Heterodera glycines
FMTSNFSSFSTRIGYEFVVKGINREWFPHKLPTVFMLFSFRWSSFAYGRHSHPTQIDPGPRLGTQL

SEQ ID NO: 138612 - protein, 30 aa, Heterodera glycines; identical to SEQ ID NO: 126607

SEQ ID NO: 138613 - protein, 81 aa, Heterodera glycines
MAQRNENNPKKNFNFTVVTVLVHEVPHEIGDFAILVQAGFSKWKVSMIPDLLEKSTVCQSVKEICALLLGLAMMYAIAFFE

SEQ ID NO: 138614 - protein, 69 aa, Heterodera glycines
MAVAILLFLLPAENPLGASAGSKSNSKEQDNTTNSSSSREGDNNSNNNDDNSMAGKRLMDWPTMQKQFP

SEQ ID NO: 138615 - protein, 19 aa, Heterodera glycines
MSLWTNICLPFCCLPNPRN

SEQ ID NO: 138616 - protein, 23 aa, Heterodera glycines
MNIFKKLLKTQIFKPNINLLEMH

SEQ ID NO: 138617 - protein, 111 aa, Heterodera glycines
MSILEKIQEIENEMARTQRNKATMMARTQRNKATMGHLGLLKARLAKLRRELISPKGGGGGGGGEGFDVAKTGDARGGGGGGGEGFDVAKTGDARIGFVGLPPAGDSNSLS

SEQ ID NO: 138618 - protein, 327 aa, Heterodera glycines
AKALECGYSVDRFYRAWHYEEEADDLFKGYVRLFLKLKEEASGFPKGVETEEQKNIWREEYKEKYGIDIELAKVKKNPGLRYISKLMLNSLWGKFSMRNCLNKNAVIDRASEFYKIACDHKVEMCDIVEYSDEAIRVIYRDKEDFVMEHKSSNIVISLWTTSMARLKLLEFMREAEGNGGEILYTDTDSIFVRHDRDVEPITTGKFLGEMSEEYGGHEIEEYCCGGAKQYALKMKNKQTGETEYVMKIRGITFDVDNRKTLHYDTFREMVLSYGKGEVDPAFFVYKNDFGPTRDSKVVTREKHKMYRPVCQKGIIDEELNVIPFGFC

SEQ ID NO: 138619 - protein, 127 aa, Heterodera glycines
RRKHMMNSYEIEIFLSKHPTTRKYFIGVFASDKMPKLKDRHFPYCFVANTDRVGTIGEHWVACFVNSPTEIEYFDSLGDYPNEDLSSYLNLFKRILINDRIVQHQFSDACGQFCIYFLTQRCYGITY

SEQ ID NO: 138620 - protein, 631 aa, Heterodera glycines
MAAKRNGTSQQSGPSTKKWDFRSIGNNFIEEMETFKLVDYRSTICEKFGFTKNIAEFVINPDVERPDEAMQDAVDTMIQVAFKNTEERMMRKVRMFGVAITGAGLAFPVWVPYRAYPQNNAEVIMQEINKLGQSGDGEENKKMLLLSEPITMKITCVTMPSGEGPRNVHKFDFGFKEHQRIRISNGDKFCLFYALASSMNYLVMDKYSFIRFMKNVVRQKETAYELLRNCEINGNEMNYGVEHLSSVQNYWDEIYPGKYRVVAFEKSADPRKSIRVLWKGPMGRENVVPIFLENGHWDGLKNYVCFFNRGRKFCIDCECFYSRDVFHTLECRARCYYCNRVGGVPCQKESGVKIECPKCRRYFYNWECYNYHQGHTCKLWKRCVICDKTYRFNPKKDHECGETYCQLCSVSHDPKRGCYIMPIEEKEDKDVYRIVVWDSETSQDTVYKGDQKEHVINYISVRVTCTECCDDKNRTNCKICGEERTKDWSEAVGHEPTKDFVEWILTAFTSYDTYIFAHNAGRFDGHFVFNYLCRTGKNPIPLINGLKIYEFKVQNSRKHSMLIWRDSCLLMPVKLESLKATFNLDCEDKPFFPYYYNKKENYGIRLEHLPPMEDYSPGSMNKEKYAKFEKW

SEQ ID NO: 138621 - protein, 95 aa, Heterodera glycines; identical to SEQ ID NO: 124528

SEQ ID NO: 138622 - protein, 47 aa, Heterodera glycines
SPSPAPVSFFCTKICCVGSIKAKVLPVPVGDCTTQSKLANMWRRVHA

SEQ ID NO: 138623 - protein, 41 aa, Heterodera glycines
FFNRFLNVWIFFWLTKTSSNLVLSILFQIAPNFFYSLTRPY

SEQ ID NO: 138624 - protein, 95 aa, Heterodera glycines
LFEYPKRTLEKIDFFVFGAVPPNRCAQIYGETESFGNSFPIVCTLILRWIFAPHKCLSTPNGHLKKSIFLFSGQSPRTDAPRFMARPNPSGIASL

SEQ ID NO: 138625 - protein, 106 aa, Heterodera glycines
QNEANDFLVANKIRVDVNDPKEEEQNAQPDKVIPFIENAIIERRDKVSILRMIAIQSMYAKGLKPVVLHSYSKLLVQSYGFSMLKWLLKLQIAGIIRDDFSDSKIE

SEQ ID NO: 138626 - protein, 66 aa, Heterodera glycines
MLPHGCFPFRACLDCIQGPSLTATQSYAQLREEMRTVRLDRNHMGVLCKGPGILGKIGTRKAGIGA

SEQ ID NO: 138627 - protein, 124 aa, Heterodera glycines
MLFLFVIVGQLLLASEMVVHGGHYGGYSFEQPSIERAETDQIDSDKDTISDEALINGSTTSTFGSSSSPALIRRVDRSADTDDSSEHLRSGINQGWAKLKNKKRNAKSQNVRKGEMRNFQKFYQ

SEQ ID NO: 138628 - protein, 140 aa, Heterodera glycines
VLYNATMSFRVGQAPTAETAYNTLVRWIIDRNNFQVGQSGLFINPMPSPFGPCFMNDCHPKGICIATGPNSYRCECAHGYRDMSVANPGHDCVPLYGINECENTTLNECSEHAQCFDLEYLYRCECLRGFKDISPKGAVA

SEQ ID NO: 138629 - protein, 34 aa, Heterodera glycines
MLAVVAVSFGATVTRSRIRKLMAEKNGKMTIYGE

SEQ ID NO: 138630 - protein, 71 aa, Heterodera glycines
MDLSKLEPCLKEYYLNCYPYDLIFKWLSYSNKNRDYLSKREFAFILEKDEHLRFLSFVEPKEFIVKLYQLR

SEQ ID NO: 138631 - protein, 17 aa, Heterodera glycines
QHYGYAPVSDKIAHNTK

SEQ ID NO: 138632 - protein, 179 aa, Heterodera glycines
MSVPKPRRFTYFERLKSTFNAVHDQETKHNAMVKTVDQHCYQVLCLCALFCPVDMQKGVMDALFAHLCRIQPDRVFRPVDHALWTALLLLINPVKLKQQCLGISHELDEIELVNDGIKNMAFEYMQAFIVKAPAFFEFPFSIDVVDSLIKNFICYFRDKVDNLIVQFNKWYQNGVNGIS

SEQ ID NO: 138633 - protein, 34 aa, Heterodera glycines
MAKLMLAPTQLWCLYVDVVVLQFDGNAMDAISLA

SEQ ID NO: 138634 - protein, 122 aa, Heterodera glycines
MQYFVGTRYQRGAGLLKNVARFLMPVASNLLKTVSREGLTAGNRVLEDISQGKALRESIQAHAKHGMENLAEKLRQCGKGAAKTTTTLTKNKSSVNNKKKKYPSSVMTKGKRHVIDQLTFAP

SEQ ID NO: 138635 - protein, 244 aa, Heterodera glycines
MTVPSFPPAPTLELNAALKAGYTVRKLFYVLQYDQWSDNIFKSYVSEMMALKIHATGFPSWCGSEGEKDEYIEECRQLFGIKLDKQKMKAEPGKRYIAKLCLNSLWGRFSMRNLLSKALITDDCDKLLQLNDNKKIEVSGVEEMDEENETYLISYKEKEEFVEENPYSNVVISLFTTSAARLHLYGILKKVADTPKCEVLYFDTDSIIYVHPEDNDPLPTGKGHLGELTDEKPDHDILEFISAG

SEQ ID NO: 138636 - protein, 42 aa, Heterodera glycines
TVFALIKAPGGLFFNLLRKGDIIGDRAFNGDGGIIFRQIFND

SEQ ID NO: 138637 - protein, 74 aa, Heterodera glycines
MDKKEKTEGKATKKGRLQKRRTTPYDIWEDEGEQITATTKCKRVKYVPNLLPAVVPPPEGMSYNPPIDSYLVRK

SEQ ID NO: 138638 - protein, 31 aa, Heterodera glycines
DYFSKHLVDWGIIGDCGINRDWAIIRAYTVL

SEQ ID NO: 138639 - protein, 175 aa, Heterodera glycines
MNMSCHFTVPSGGLSFVGEIAHFVVDVVFYRLPIFAPTCPWFGTSPLALYTIGTFLVYFFEYPIYVLHIAITLNRCSCVWAPIRHKEVKQTHKQFTPLHFLSFGAVLVSRQLRLLLLFLWHFLPTVWSLLPSWSNSTKRTRPRAQFRSLSPTNFILYVQIFANSFEIFVALRIAL

SEQ ID NO: 138640 - protein, 41 aa, Heterodera glycines
MKNNFDIYPATPKKQLNEEICVVHGNVLARSARHMANNTHG

SEQ ID NO: 138641 - protein, 234 aa, Heterodera glycines
MSVEKDGCFDKTVITLLKDWQSFFSGGVSLELLDVGLAGMVVWQLYSERLLPLIGKDKIFAFIKISYNGILCLRHLTGFGLGDFVNLQKISLSIMTEDERLGFTSVGENEMTASQRVAEWLQTPLSNGQPKVLMTDFAYEVYKVQDLRRLLKELFTSASSAAKYFFILPKMASDSLNLVNNNTQERMMDRIIKEKCWLIRAPIGDEVFTNELDEKELTKVCENSMAAGFYEKDI

SEQ ID NO: 138642 - protein, 113 aa, Heterodera glycines
MCIPNLCLLVHFSVFSKLTITPIICKEMTEIVCKKIVIRWTEKEEYSAIVATIDEGVTTQFVCPVWPRYKFIGFNHIELRCFDKTVINLLKDWQSFFSGGVSLELLDVGLAGM

SEQ ID NO: 138643 - protein, 109 aa, Heterodera glycines
MRRSIKICKSDNTYRERKRWTPRKRETERKRERETDRHTDRDRKRANKRKEKETDRQRGRKKKRDIQKDRDGENCFTELPSTKFFLKKSSAKKRCENKKVNSYVIPSFY

SEQ ID NO: 138644 - protein, 153 aa, Heterodera glycines
MAETVWPMISNENIKAICLYSGKRFVVLRNTNPAAGRCECEKRLVSHSMAMCCTDYARKEWAPIQCQWHFGEKFVPINSFNSSFSQMHGSFKHSELHNVPSNNTLTNCIWGCCHFEMHSRIRRENLRKTEEDNDQICFDKNAVFFSFRETDIG

SEQ ID NO: 138645 - protein, 187 aa, Heterodera glycines
MVVTNKESTGSKPTHMQKAKQHREGKTLRRHQVNKLLSSAATLRPRRKRESVPNSTTPIVIDLSSDSEGNSSDVEIIQDPVADQQISSSNKHSTAPLPKELRRSTATKQSSSNSTRPVSFRKRTQGKAAPSAGISRTFEHSSQTKALSPTTKEKRANQQHAMALEGSTDPTTNTYDWQSAKFSKHML

SEQ ID NO: 138646 - protein, 665 aa, Heterodera glycines
MVSLIQKGITFTLKALDSARTTTALSLHPDADLSNWENAVKLETQCTRVNREVQTIEAQLDNLRDLSNNWIDLLNRLEGAEKDKGEKEYVKFDTHEKIAERHDAATTKLRDLRDLEATLSADAKLYRGRTEREAKADQQANPPPQTAMPPMAAPTFTAPLYQFQPIQLDKFFGQKRKWPEFYESFKSAIGSQSISKAQKLNLLRNLLGGEARELIAGFRLEDQNYETVLQLLKDTYGAPEEHIRALHFELANLKPCRSLRDTKEFLLQLERLTRELNNAGEDIEGPQVFLMLEKKLTPAFLRNILNKKGEDPANWTTTKFRDVLNEAVRKEVQIQEVMGEYGHHYVQSKAEVVSAAHVQSPITANQRSRRPNQPSTQRHESFIASTLDESLRQQAYKKQQDMQLANSRHPQARDQAQSINRIPPYPCTFCNGNHWHDECKKVSTLNERISIVREKKLCFKCLKANHQASNCARPSKCYHCKRRHPTALCRDQCRSENDINMPSNSYSEKKPNDQNGRRSTAIEQQQMCNAVQSRDTRALLMTARATIFNPAQPGLSMMATVFIDPGSHRSFISSSAAKQLELTNLGTEECFLTSFGEREPKRYLSDRVAIGILCPDNDRFIFNLNALKFLLNEMPVLQLNAVDHDELQQKKLNLPNAPRQPDILL

SEQ ID NO: 138647 - protein, 99 aa, Heterodera glycines
MRFSAPRQVLKYFYKRTNAFWDKSMLHKERVAYAKLRLKLYGALVLSMCSSFANYVQTKGAGGLDIADETMYKQFSFSKGRLLENALETPEGQAMGLSE

SEQ ID NO: 138648 - protein, 63 aa, Heterodera glycines
MTNKFTCTSFTGIGRSCDKCVDGHSAEQHGIAKSGRLAMLFVIALLVIALIAFCLVSVFIGTW

SEQ ID NO: 138649 - protein, 68 aa, Heterodera glycines
VPPNRCAQIYGETESFGNSFPIACTLILRWIFAPHNCLSTPNGHLKKSIFLFSGQSPRTDAPRFMGRP

SEQ ID NO: 138650 - protein, 95 aa, Heterodera glycines
LIELCEGIKKGKNLNAEAFSKNWQKMVKIGTENGGKQWKSEGGEKIAKPNETIQKMHFEAMKSIKQQGNDTELDEIIGKLMQGFSQLLIEGANPC

SEQ ID NO: 138651 - protein, 69 aa, Heterodera glycines
ITYTLPKIRHSHRFVQSAKTAANVCTEQNGGHPSKSPKVAGAEFRVIYKVFAVPDGLVLLLTFTNDVPK

SEQ ID NO: 138652 - protein, 107 aa, Heterodera glycines
MSDRRKEAEEKMEKAIFISADCWLGVFDLLPPSQLGLGIAMISHRFDYYVDEHFKTRKRALAFIRIRYKIEENGTKGMEIVNSNCESLSIPQIQLPKKIIGFKRISI

SEQ ID NO: 138653 - protein, 194 aa, Heterodera glycines
MQLLADPLLKQIANKTAFVSIEEFAIRFKNIRMNCSMEIGNECAAGTKLIMLAMSGRTSFERRTGARETWMKEAAPGEILRFFVADPSAGEAADVKQKLEEEQKKHGDIVFLHGFVDKYKHLHLKWFGALTWQQRHCAGAEWVAKVDDDTVVHLRRMDYWINKKFRQIADDHPLIIFGDMDASRKPFRDREIKW

SEQ ID NO: 138654 - protein, 180 aa, Heterodera glycines
MTTHKSWQFHEYIKKKGTAFQSFKYFETRRTEIRQIFRIEQKLCRTVDKYKKELFGDDQSHKYCVYTRRGDFVNFAWASNKDFTEQGIEFGVKYLMLIVNVYLPKAMPRINDLAFSIITCDSLLITANTSTWGWWVAYLMPDNATIFYNSKFGKGFPHNRENFLAEWVPIQLFNGKMTLD

SEQ ID NO: 138655 - protein, 18 aa, Heterodera glycines
MRTRPIWTVKQRLLTSQK

SEQ ID NO: 138656 - protein, 95 aa, Heterodera glycines; identical to SEQ ID NO: 130684

SEQ ID NO: 138657 - protein, 248 aa, Heterodera glycines
ALGITDEMRTEPADSRFSEHEAQWRMNKRGMDGETLIHLLLNRKELVCHEVARILINRYPGMARDIYLGEELFGQGCLHLAIVNDDYDTAKILLEYGASVNARANGDAKILLEYGASVNARANGDFFMPDGYEPGHSNRNMDYEGAYYGEYPLAFAACFENKDIYDLLIQYGADPDKQDTFGNTIVSATIYFNEISLYSYSAKHWHKPAHSLENFAGQTPLTLATKLGRKQIFEEMLELMKVKLYGFS

SEQ ID NO: 138658 - protein, 89 aa, Heterodera glycines
MVLATKLLVNITYILTSGCVNRRIWTWEKALRALGASLPRLAMGCGVIVGPEESYNKCCFVENRRGTTAIRRGTTVIRRGTKLLEEVQK

SEQ ID NO: 138659 - protein, 205 aa, Heterodera glycines
ALRRRKLLFGFGVGTVIGAGFYYMDKNNERRFKRDKVSHAHAHAATVDTKAALNKRPSGSLPTRAELLKGMRDEEFDILVIGGGATGAGVALDAQTRGLKTALKTALVELDDFSSGTSSRSTKLIHGSRSTKLIHGGVRYLQAAIMKFDREQYKMVKEALFERANLLEIAPHLSYPLEIAPHLSYPLPIMLPIYKTHTFLFYLFF

SEQ ID NO: 138660 - protein, 287 aa, Heterodera glycines
MPPYGPAHNQQQQMMPPSALVGVPPGAAATNTWMDWNSSAAMPPRGTYPMAPTNAMKAGTQTGTYIPPQSGGMMPPPAGQVPYYAVGMPTSTTAVHGQPMEPAAYHQQQQQQHYQAVQQQYTNYHQQQQPNMIYNSQQQQQMLFHQQQQQQLNQQMMMQQRQQQQHRQMVATATAPPAAGTAQQKAELGGVQAGQPAVQLGSYASSAAGGGGGGMAPAAGGPSAVNSAAQQQHQWPGSVTPVEDLYVRFHRRVGFGKSKNAWDFVLPFFMSPFLRINLTIAMYDIID

SEQ ID NO: 138661 - protein, 32 aa, Heterodera glycines; identical to SEQ ID NO: 130549

SEQ ID NO: 138662 - protein, 37 aa, Heterodera glycines
MNRSDSFRLLSSVAVEGILIFVEEMDSKPQEHIPITV

SEQ ID NO: 138663 - protein, 629 aa, Heterodera glycines
FSINQKYSPLTNVLLRNFKWNSNKGVYQRKILTPPSKPSKKKHYSDSISFSIKNTNKKYHNQIEKKAIQKGRNSIYKYIQNFNVNPFEIPNLIYEDKCYHNSAEKCEIFANLFANSFNNKETDPSNTYLGNIIEKCFISDINFNIIETQNLMKKLPNKNGTSPDNISYKILKICHSSLSTVITDLFRISLDTGSLPDIWKESIVFPLFKKGDKNNPENYRPISLTCSLCRVMERILSRHFTIFYNKKISEYQFGFVRNRSTTSQLNSCGRLEAIINGKNVDCIYIDFQKAFDSVPHELLLYKLEKIGIRGKLLIWIKDFLSNRTFRVKIEEALSSNKVCSGVPQGSVLGPLLFLIYINDLPDALPSGVRIKLYADDVKLYISDTEIMHKALHNLSEWANKWQIRISIKKTFVLHLGNKNPKEIYKIDGNIINVVDTIRDLGINIDNKLQFSNHVAQIIKNAYLRMRSLFRVIKSKSSRIWIILYKTYVRPLLEYAPEVWNPSLLKNIKKIEKCQKYFTKRVLFKCSLPPIPYQQRLEYLQLRLESRRKLSDLFMAHKIIYGRTEIPLKYSNLLNALTFPFIDLIRNINAKNLYLLQGETKIWNQLDKLYNNSLSFKNKTKTISFLNRPK

SEQ ID NO: 138664 - protein, 73 aa, Heterodera glycines
MSGSEPVSNEILNNTVMIAFIFINQIRYFKGIDIKVLYIFINRISSLLNSLFLNLVMVFILFVFLIEKDMLSE

SEQ ID NO: 138665 - protein, 83 aa, Heterodera glycines
MYIIGAVEIFLIYIMPQAKLFEDMYHNFRLFGSLLLILVGLIVLAGVKIVNKFALPAVLIVIACIVFTFVGIFLKFDGSDSLQ

SEQ ID NO: 138666 - protein, 225 aa, Heterodera glycines
MNSQLLCIFLLVICTVSIGTLTQAKPIPEEAAATETKADEGKKEEPKKEEAEAKKEEATKEEPKKEETKKGEGKTEEAKKDEAKKEEPKTEEAKKEEAKPSAPAVLTEAADNVNKAVDDLSVKQTAVNKILEAKAKNDAELESEVKTKTATLSEDSKKASAELTLIIEDKKTTLDEKVKRTEELTAKMSDNTKKELNLNNSADVVAFVKSYSAVAVPAVATEGKA

SEQ ID NO: 138667 - protein, 90 aa, Heterodera glycines
MRHTPRQIHNGGRAAHRNLSRSRKCSVTAAAATEEKEGVETNNNDDDNDADKDEDKENFQLNFLGSGYPTEYRHTRLFQDTDPVPGSEFQ

SEQ ID NO: 138668 - protein, 249 aa, Heterodera glycines
MLFFPIATVLLGVFVGSLQGKPTEQNAEIKPAAPLEATRNEIKDTPQRTENKEISRSEINEIKEIPRNEFKTAPITESRERPFIKSEIIRDISSAMNFLNEQIREYSERTKDREEFKGIIEARNKLETAIKPLHGVMESDMASSSLETSMTNSANIARQALEELPVRQMEQIAEEGKSKTVEEQERALREYAEKNSESVKKAVDQVFVAKDRADIALETYLRSHADTFSQEARKANDQAKSQIQKEKHS

SEQ ID NO: 138669 - protein, 77 aa, Heterodera glycines
MPQQNAFNQPPNGQGQFGPNGFNLNDQQMMAQQQQQQQPNIGQNAFGQPQQMPPKGNRRKWWHFFKFGTQIDEFYGQ

SEQ ID NO: 138670 - protein, 40 aa, Heterodera glycines
MAEGQCDVAVGGDIDEGDYQCLAFNGNGTAYSEKMRLQQA

SEQ ID NO: 138671 - protein, 41 aa, Heterodera glycines
MRRLVTIDGHLLKAGTMVFENPTAILSRTIPGREWKAKASE

SEQ ID NO: 138672 - protein, 96 aa, Heterodera glycines
VQAWIQVSRSLDFSWTWIFLDFCPLNPGPGFSKIPISNHHILKRYCTTWTTKSRPNCTSVSGPNTLTLDKNSECGATRKKTIRITSTRVSASSSRS

SEQ ID NO: 138673 - protein, 17 aa, Heterodera glycines
MISTNDDTDSSWIAIDN

SEQ ID NO: 138674 - protein, 339 aa, Heterodera glycines
MTTNLSSLPLPLPLSPEVSFVVRSSSSGTISGHNGKTNDGTAKAEQKQKHQMEGRSRNTTREEGRKSTEKAMEKTEKGKTKTTTKLIITISANDNGTLENGDKGNGTLINGAKDNGTLINGASNATLENGTKGNDTSGNCANGNDTLINCASNATLENGTKGNGTSGNCAKGNGTLINGAKGNGTLINGAKDNGILINDASNATLENGTKRNGSSVNCVNGNGTFGNCANLSANTERGICAGSYILANTTKENDILRNGTKDKDNGTYTDNAIFMNGTIANGTLENYSAKGNDTLINGGTTTTVLPSKIMGKSAVSTPTNGTTKTTPNEAISKGNNSRY

SEQ ID NO: 138675 - protein, 199 aa, Heterodera glycines
MENTNVRPDNIKEKNPLQFDLNIPLPEINEEYENVKEALEPKDKEISDKKASLTKADQEKNMSNKDVPITQELNKLSIIGEPLISREKQLPVNPKRTQLEKESVTNSSANSSKQVALTDIHPELSERNEAKPLQVELNTEMSNRGKAKSVQMETNHQLIEKNKIKSVQVGPNARLIERSEARPVQTGSKEAIDRKQQSK

SEQ ID NO: 138676 - protein, 525 aa, Heterodera glycines
MFKCNVIQESREFLAILFSFNSTIHNGKWELELASGADVTVMDEIDWKNIGNQKLEPSRGLVAYGGKSICGILGKAKVKVTHEGRTIESNIHVISGKHKNLCGRDLIMGLKIDLNRAFGISTIRAVEIKQELDACLGQYPEVFQDGVGRCKKMASLKFKEGCQPKRCKPRPVPFSLRNEVEKVLDQWQSEKIIEPVATSEWATPLVIVPKANGKLRLCFDYKVTVNPCLDVHQYPLPRPEELFSILNGGEKFTKIDLKDAYLQLLLDEKAKSCLTICTHKGLFHFARLPFGVASAPAIFQQVMEEVLQGIDGVAVYLDDILITAATDQQHIKRIDQVLKRLSENGLQVKHEKCEFLKPEIEYLGHIVDKKGLHASPGKIEAILKMPEPKNLKELQSFLGMVNYYGKFVASLATLSEPLNELRRNDAKWTWTKSQQKAFDVIKKVLTSTKVLVHYDPKKPLFLAADASDYGVGAVIFHKDEKGRVGVIAYAFRTLNSSERNYSQIEKEARAIIFGVDKFKQYLYGR

SEQ ID NO: 138677 - protein, 231 aa, Heterodera glycines
MGRKKTEAVTVLLKDAGIADRVTMDQYIAEYDKHVLQIMRALTELPGATKLIDHLYAHNIPMAICTGSDNEEFASKMLKFDEWLKKIPLRVLCGSDPEVRIGKPNPDAYEVTIGRFAAKSDPEVRIGKPNPDAYEVTIGRFAAKPTSPKNVLVFEDSINGVESALGAGCTVVMVPQREFLPNDWPVVMVPQREFLPNDWPEKELRSRPNFAALLDSLDNFCPKQFGLPDYR

SEQ ID NO: 138678 - protein, 58 aa, Heterodera glycines
GRPTPVHAFSRTSVTKYGSTRSTGHGNEYKSADWKVIRRKHHFLLYCLNILSLIHFER

SEQ ID NO: 138679 - protein, 55 aa, Heterodera glycines
MAANRLPPAEPEAEEEPEVIPWQARSADDDDDHDDPDAPDNWRSMLFILVFFQIE

SEQ ID NO: 138680 - protein, 59 aa, Heterodera glycines
MTQQQGATDTDLRTFRDFLFQYNAVTEQCFDACIRDFTSRDISEKEERCSKNCMDKFLK

SEQ ID NO: 138681 - protein, 73 aa, Heterodera glycines
HESRRNVADITCYKCGEKGHYANRCTKGILAFLSNTATASDQQREQPRDNQQKKYAGGEGGTKTQNDGQENFD

SEQ ID NO: 138682 - protein, 95 aa, Heterodera glycines
MVGSQTADAHLDVQSAQIDQLDTTLNDQTLRSIVDEASQNIDRAISKTNEELKISNPQDLLKHFKFVGKRPTSQLSRAREIYEESLRLIEKHVEL

SEQ ID NO: 138683 - protein, 745 aa, Heterodera glycines
PTSIKPGQPQITAQPTEAVREGEFVTVRCESQDGNPLPRFQWLFDNRTRVPDAWFHERHEGGGGSGTKPRAISTLQWHLTRSDNGAYLTCQTWNKALREGEVINAETNRLNVLYAPRVKVVPTPELNIEEGELAELKCTADANPPATNFAWTHLPSGETHADREWRVHVRRAHAGEFRCTAVNSLDSASDRIRLNVLYGPTVRIRTVVSPAEGDRLVVDCEADANPKADTIAWSIRTVVSPAEGDRLVVDCEADANPKADTIAWSGPGGFQRNGSRLVIEAVNRAHSAHSGNFTCTAWNTLALSSVSASLIRTGIRTGSARVLVDVRRRPGSATISAKQTTLNVGETITLSCGTDGDAGSPSAHFRWAGPPTKGAYERKARNKAQLRLPDAQLAHNGIFRCVAHNELGQGEEATVRITVVEPARISRMPMPSKILNNGANDITVVEPARISRMPMPSKILNNGANDVTIECEARGFPRPSIRWLRDGVQLPIELFVHWTVTERICPSDESCVRSILSILRFAHSISWADKGNYSCLAHNSATSPPVSSQSLLSVIHQPIALNERFVDGSLTAAEIGASAQIVCRISARPEPKVAQIVCRISARPEPKVTWSRDGTEIGGGGGLSFTFGGGGLSFTFPSPLDAVDEFEAVLELREVSEQHFGVFTCEARNGVGAKAAVDIRLQAPPQTPLPQTPLQARLIQSGTTWLMVGWRPAFDGGDRQQFELEYRLVDPYKGKAGGDGQTDTL

SEQ ID NO: 138684 - protein, 178 aa, Heterodera glycines
CVKLNILTSLCSILLIRPQSGKEKEEPIYLSVIPGEPQLTIGRDKSFAYDFVFDQLTPQKTVYDKCVRELVAYDFVFDQLTPQKTVYDKCVRELVDGAFEGYNTSVFAYGQTGSGKTFTGSGKTFTMGTSLGDPAKRGIIPNAAQQIFDEIEGRREQARRSGKVIPSLEVSAQFIEVR

SEQ ID NO: 138685 - protein, 64 aa, Heterodera glycines
NVQPDPHSQCGPYKPNWREADGADFLSPTKQLDNSIGFDKEEEAFGGSKNQWRELALFWSILRE

SEQ ID NO: 138686 - protein, 25 aa, Heterodera glycines
TCTCGVVVKLSTFHNFSPEFNSPLG

SEQ ID NO: 138687 - protein, 265 aa, Heterodera glycines
GLNSPAFQSLGLNPPAFQSLGLNSPAFQSLGLNPPAFQSLGLNTPAFQSPGLNSPRLQSLGLYSPAFQSPGLSFYAFQSPGLILLHFNHWDSTLQHFNHWDSILLHFNHWDSTLQHFNHWDSILLHSNHWDLTSPGPSAFQSLGLNSPAFQSLGLNTPAFQSPGLNSPGLQSLGLSFYAFQSQGLNSPAFQSLGLNPPAFQSLGLNSPAFQSLGLNPPAFQSLGLNSLAFQSLGLNTPAFQSPGLNSPRLQSLGLYSPAFQSPGL

SEQ ID NO: 138688 - protein, 315 aa, Heterodera glycines
LFSSFISFEATGDLTKYLDCLIISHFHLDHCGALPYMTEMIGYQGPIYMTYPTKAIVPVLLEDFRKVVTEHRGETNFFTSAHVEDFRKVVTEHRGETNFFTSAHVKACMKKVIAVNLHEIIQVDEQLTIVIAVNLHEIIQVDEQLTIQAFYAGHVLGAAMFMVKVGEESVFYTGDFNMTPDRHLGAAKVPPGESVFYTGDFNMTPDRHLGAAKVPPGLCPNVLITETTYATTIRDSKRARERDFLNKVHETIQGGGKVLIPVFALVLIPVFALGRAQELCILLESYWERLDLKVPIYFSHGLASRATEVVFYLSI

SEQ ID NO: 138689 - protein, 83 aa, Heterodera glycines
MADRNFSTKKTSIRELYLECSFRRTTVAQLQANQQHEDGQQIAAVSANSHLMLAPEFAAVKSALIVQKAFHRFALIVQGKPTK

SEQ ID NO: 138690 - protein, 45 aa, Heterodera glycines
MNKLYFPLLFVATIFIYAVALPRLNLPINKHKNNTEHLTKTDLEA

SEQ ID NO: 138691 - protein, 54 aa, Heterodera glycines
MGEKGYPELADANGDARIVFKGRERHFTCAWQAEKAWNAPGSVWNERRQIISTI

SEQ ID NO: 138692 - protein, 37 aa, Heterodera glycines
MENIFFNFILFTIFIVFMKENCFACGTDECPIDCEDK

SEQ ID NO: 138693 - protein, 454 aa, Heterodera glycines
YFFCIFKILMSLSELFLKELIMVQKIHRDLISGPNPVNLAQLYNNFVATNCAPLTRTNGTEIGQIGHEQQRQSPIGTNLASSSRQTQTWPNGLHRQQFRTDEKRMPNSSQVGEPDEKSHLAKMPCQIKFHKKDWLRASHVTASGVLAPINSLSHHHKNPSVQTNLPANKKDQNAEVKEQFEQQSTSNATQMPFELAQIVAKSDQQEKNGTILNRKTSNSMPQIEAKKVENLNQGAGNDQEIDEIDLFIDIETIDPFDQPEPSKRLFVDRIQPNWNDRRQCLNVINSESVGTSSSFERSIYESADNESASSSSFDHCGQNANGETEESAIMDKISTKIDHLDNDWEDFANWKKSAGIKVEMVENKQIENKSCKEQIWIKEEVSEFDQMVENDQNAKENEKIKSANDENENGAKENKKFNRNKKIVVQNIIRKCEWAECELKFENDNKLYDHLKTV

SEQ ID NO: 138694 - protein, 99 aa, Heterodera glycines
MFEYPKRTLEKIDFFVFGAVPPNRCAQIYGETESFGNSFPIVCTLILRWIFAPHKCLSTPNGHLKKSIFLFSGQSPRTDAPRFMGRPNPSGIASLYPVL

SEQ ID NO: 138695 - protein, 54 aa, Heterodera glycines
KSFLQPLIANIISCRLKAIHCLPVSAQQSTNSVFDSLQKIIHYPKVFYNHIFPI

SEQ ID NO: 138696 - protein, 92 aa, Heterodera glycines
MISFRIIPRITEKPTGLEQTVGKKELLFFYVCLLRRMNIFLDMPNKEKIFFEFHEETVELIQFIGQFITKFMFELTQIHKMDQVGVSSNGAV

SEQ ID NO: 138697 - protein, 600 aa, Heterodera glycines
MDESKRENFSPQNDDDVITIGDNNNTQTLLDLQPGPSKRGRKPRLDKIHEEIASAMKKAKAMEAEEKAAKEKKAKEEKEASEKKAREEKLAREKKEEQRIAKEKKGEKETKDKKAEEERVAKERKAEDERVAKERKAEEERVAKAEAERVAMVTKAEEERAAKAEAERAENETKKKQEEEKQLEELKRQQQAIRKQKELELLKEFRPWRGGYMRLVHGKDPTPDVHYLHETDDYHFVNAVHKYRVRHSELPWEAPEFNPSAHIQQNIGEFRELFEQEVYDENYAVKTREEKEELIELVKGFRFYFTEQIGRFELKVFNGKISHITLTDQLAYVLGYEQEQQIRNEELAKYAVDLGGGVSHLCIYLNSGVIESMIVGNTFANLLQVIAVEGKSGSVVEKDFQAPLFHKIIAREVDVLDVEIRTLTGREMVRVIFDGSNLRLEKIYPQSGGGGPISVFEGAPTFQRGYGYFLGVPRQKGAGVGSVLRNLWRYLRPMVTAARPYAANIAAEIGKEGLETGARFLNEVSKGGNIKDALVSEGKEGAKKLLDKASSSLQKGRGRRKRRGGGKKAEIILKPSDVVGQTVSQKALLKKKRFDSLGYY

SEQ ID NO: 138698 - protein, 130 aa, Heterodera glycines
MVLPLTAALSKLLNCKPENLAEYLNNPEAVNKANAYLAGKKLKTTYQGRDSKTKEVKFGTFSVKAAAETYAFEGFLGKFPKIQFRSNTHAFRELLAVEEGGESEPVERPAAETDYLDYLNFRSGWQSTLY

SEQ ID NO: 138699 - protein, 70 aa, Heterodera glycines
MAFLDSRWVRIERPKQQKIMSLNDKCENLVRFSSQTPMLKQMTNALSEHSVPLLGSAGGVEFRRRNAIDF

SEQ ID NO: 138700 - protein, 43 aa, Heterodera glycines
MEINEFSFSNKWKSKVKIEGRAANDDLDFLKIKLIRLDIYLCV

SEQ ID NO: 138701 - protein, 126 aa, Heterodera glycines
MLGSALFKIRFPLLSKEDFSGKIVPSGILTTNEVVGVEEYHTIQNLQFPSHQRIKAFGTLLMDIEKVSEFAGEEVGSRRHIENVYISGLSWIILAQIRMKWRSTDNEKCLGIYLLCTEPKEGAINS

SEQ ID NO: 138702 - protein, 331 aa, Heterodera glycines
NLDIRIAILQSEALKPRASSLFFWFALLAFAMVSIASAAAGTVFASGRIRSRQRRYAKTWKPEFPAQESKIAKNSLATLCGGVGPGHYQPPLIDGNTQQHLFNAYTQHNHHQQNAYQFHQPQQQQQYLMFNAGSISTDSCASSTAASAIPLIRHADSLNSLTSNVHANNAINNNNNQQQQEHGQFHQLTDRKQQHFGPAQYHSLVSHNKQQTIHSNSVHPHHAPPAAAAAGTYCSRSSSSGIGGSSTEHSPIAIMHNIHLLSDSHGRMVEDMERRKLLAHLREKALFSPIGLLGLEERLEPQLADDEQCLVNNIQLLFTKGAKINALDTGE

SEQ ID NO: 138703 - protein, 66 aa, Heterodera glycines
MPIERHCENGCRNGGKCGKTKGPSPCKHKGKCVNIGNDRYRCDCAPGWIGLNCEENRNDCEKMWQK

SEQ ID NO: 138704 - protein, 87 aa, Heterodera glycines
RDLLAVKVTVRFKLPSCVGLGSSGAYCVCIAPALLQTAGLIPPPSVSAESDELTWDDSVLDIIRKWSSAAESLIHGRASGLDAAICT

SEQ ID NO: 138705 - protein, 98 aa, Heterodera glycines
MRIVLANGTEASFGPESAELRAVACGLGAFGVITEVELNLVATFDTISYNFVSAFSSFFQLFSLPTESLYAHFDEIQKMGNNVLLMTSLANETLWDKV

SEQ ID NO: 138706 - protein, 136 aa, Heterodera glycines
MRKRAISTLGHLADVVGDEQFDRIVEKVLGTCADSETELSSLKTFIISVITICRTSGARFAKFLPQIVPILIQKCESVEDDELREICLQAFEIFAFRCTTELSPFVPSIVKISVEMVSYDPNYNYGAEEEGEERGM

SEQ ID NO: 138707 - protein, 75 aa, Heterodera glycines
MRNIIIFPCHRHCSLRDDYRGDTDLRVQLAHGQTIYGIDYLSLFWRIKCTLILSTANGAPKFAGLPVNWTLLDIK

SEQ ID NO: 138708 - protein, 718 aa, Heterodera glycines
MNGDSGAQATVISFKTWIKLGQPKLSPTDIETRNCNDTAFSTEGKFHCTVSCFDRPSKTLIAYVSSDLKHDLFGLPWIEEFELIPREILYPKSIKGKPNASINANVVKAPNPAIGITDESSLTAVLQNDFEEVFKSGLGHCAIKAHLILKPDARPIFCKARPVPHGAIEAVDTELDRLLQIGAIKPVEFSHWAAPILAVKKKNGKTRVCIDFSTGLNDSIELNRHPLPRPDVIYAALNGAAFFSNLDLRDAYLQMELDEKSKHLCTINTHRGLFQCQRLPFGVKSAPSIFQHLMDQICAGIPGVFSYLDDCLIASKTLEDHVNALHTLFQRIKDFGLRIQLEKCKFLQKELLFLGHIVSSNGIRPDPARSEAIQKMPAPHDKTTLRSFLGALNYYGRFVKPMREIRAPLDQLLRKDESWSWGDDQQSAFEKAKAIMVSELLLTHYDPTLPIVVAADASKDGIGATISHIFPDKKEKVIEHASTVLTNAQQNYSQIEKEALALVFAVQKFHRMLFGRKFTLLTDHKPLLAIFGSKKGIPIYAASRLQRWALIMANYDFEIRYINTASFGQADVLSRLIANYPRPEEDILIANICTETECYISTLLQTKTDQLPVTADEIAEATPKDEILKKILAFIKSNWPKKSSDPDIAPYFPKRENILEIEGCLLYQNRVVVPQSLRNRMLKSLHMAHPGIVRMKALARQHVYWPGMDSEIERIVRQ

SEQ ID NO: 138709 - protein, 733 aa, Heterodera glycines
MSADQIKQLLEAMRVQSDAIQQLMGQAPQNAASASLNHANLSSSIDGQISKFNYDAETGNTFEQWFKRFGVLIEEDGKDLPESTKVRLLLGKLGDEEYGKYRDSISPTQPDKVTWVDSITKLKGLYPETRSLFVRRYECFKIRQQPSQDISSLVAHINASCENANLSPTKEQLKCIILVIALNDEHHDLRQKCLKMLEDAEKTGTDITLQKVEEELKAIQIVKESALSLLTQPVSTSAIQLRPQQWRETSKGKHKAKPGPKWPQHESAPKSPHHAPSPKQKSDDKANRGRPPHPCASCGSTDHWRSDCKFANAFCNKCNRQGHIAIVCRQRSSNTAPKFQNRSFHTVVAKSHCMVIGTTQGRWWKIPVMINGINLKMNGDSGAQATVISFKTWIKLGQPELSPTDIETRNCNDTAFSTEGKFHCTVSCFDRPSKTLIAYVSSDLKHDLFGLPWIEEFELIQKEILYPQSTKGKTNASINANVVKAPNPAIGITDESSLTAVLQNDFEEVFKSGLGHCAIKAHLILKPDARPIFCKARPVPHGAIEAVDTELDRLLQIGAIKPVEFSHWAAPILAVKKKNGKTRVCIDFSTGLNDSIELNRHPLPRPDVIYAALNGAAFFSNLDLRDAYLQMELDEKSKPLCTINTHRGLFQCQRLPFGVKSAPSIFQHLMDQICAGIPGVFSYLDDCIIASKTLEDHVNAIHTLFQRIKDFGLRIQLEKCKFLQKELLFLGHI

SEQ ID NO: 138710 - protein, 49 aa, Heterodera glycines; identical to SEQ ID NO: 129911

SEQ ID NO: 138711 - protein, 16 aa, Heterodera glycines
EAIPEGFGLPINLGAS

SEQ ID NO: 138712 - protein, 53 aa, Heterodera glycines
FEYPKRTLEKIDFFVFGAVPPNRCAQIYGETESFGNSFPIACTLILRWIFAPR

SEQ ID NO: 138713 - protein, 40 aa, Heterodera glycines
MLLFEFAKFTLLSIIFMHLLCQSDQTAELAHGSNGVGAIF

SEQ ID NO: 138714 - protein, 40 aa, Heterodera glycines
LFRLSISERFISNMVNGPFRKGPFMISMTICHHRWTADPY

SEQ ID NO: 138715 - protein, 563 aa, Heterodera glycines
GEISINFRKTQIFFLFLGSEKDRVVGRIQHLQNELSDLAFHNYRTYVDVGRTAEHCKEMFAEMFAEMNSFLVKLKAEFPDLIGCINLANSDSEKFTEEYKLLHEVESVSNIIWKVLRLPKLMDKYIRTGRYEQLMDKYIRTGRYEQAYSLTNFAISLKQSKLTQKNAMLAKVVDVLIEARHNLLNELKVVDVLIEARHNLLNELFSKFAGPIDLSRSIQIVNNIRKIPFISNIQLRESILQYRDIYMDKNIQRVMVNTDFFLRAIDVDFFLRAIDVYRECMYDTIVLYLAVFPDCDVQHKNSSEDPRWERWTGSSQSSEDPRWERWTGSSQNFLLHSWAQRNIERLSSLLRGSENKNYLDMEVMHTKLMLMSFAFSFGRMGLDFRPLVVNEFAQMVLEICRRRVETATNCIDGDIFENTRQDFEDSGHPSIDLSVLSAPLELCIWDDICVFGNLLIDILNDLRHSFSIILVFTMISLLYSVQNVFKWVQNVFKWVDSFLSVSAEIVSAKRAISLLLKYFVPFFNRCFFHCFPHEKCVHFFRSSHCPVEDYVSVFFDLKSTAKS

SEQ ID NO: 138716 - protein, 70 aa, Heterodera glycines
MHISKQICPIWDSPEYEEDIAKAEAEVNKTPNIELLDHEYKRLIEIKCVEFEDLMEGKARTKLKFYRRLG

SEQ ID NO: 138717 - protein, 324 aa, Heterodera glycines
MAANFDQLVRLMTQQQQQFEDQQKLVQQQSQQIAQLLANQNAANIAAGQQNPPNAVAIPSLPDISLFEVCDEKSRVSEWLDRFKFALDCAAPTASDQIKVKSLMNKLSEMAFSEYSRSVLPASVTDFDFSTTVQKLEKLFAKPQSIFIDRYECLKAVRGEGEEFRHFINRHKKLINDFKFDDLKKEQFYALMLLTALKSPSDAALRQRILAKLATDGQNVSYDGIVEDLINFQSTIAEARAIETPISSRNVNAVHQKGKKNFLPKNKFPKSGQTTTANKSCWRCGECDHQPINCRFKVTKCHKCGAMGHLGKKCESVQAWKKQQ

SEQ ID NO: 138718 - protein, 1094 aa, Heterodera glycines
MLLTALKSPSDAALRQRILAKLATDGQNVTYDGIVEDLINFQSTIAEARAIETPISSRNVNAVHQKGKQSFLPKNKFPKSGQTTTANKSCWRCGECDHQPINCRFKVTKCHKCGAMGHLGKKCESVQAWKKQQSAKMMGNKKIGHLRIGMTSCSINALSLMQIKILLNQQKVQFFLDTGSDIDVIDEFTYADIGKPPIEACDEIGKTFDGKEVPFIGKGIGIFKFGEIEVKRPFYVAKKGSLNLLSCQTMDKFGLTLHKGEGTAVVKEDAAPIFRKARPVPYNSLEVVEKELGRLEKMDVISKVDHLNWAAPILIVKKADGSARLCIDYSTGLNDALLDCQHPLPVPEDIFATLNGGKIFSQIDLRDAYLQIELDEESKDLCGLATHKGNYRMERLPFGVKSAPSIFQSIMDKMLAGLNFATAYLDDIIVVSGTTEQHVRHLEEVFSRIQAYGFRVKLEKSSFFRDQIKYLGQIIDRNGRRPDPAKTHAIAQMPAPKDISSLRSFLGMVNHYQQFVKNMRFTRKPLDDMLKDDVEWKWTEERQKAFQKLKEVLTSELLLTHYDPKLDIIVAADASELGIGAVISHKFSNGQMKAIAHASRSLTPAEKNYSQIEKEGLALIFAVQKFHKMIYGRHFTLQTDHKPLISIFGSKKGIRQCSANRLLRWSLTLLAYDFDIEYVNTKDFGQADALSRLIAKEFECDDERVIAACNIDEDLGMILDMAKQILPIKFENLVSESKKDKTMQIVMKFVRDGWPDERKLAPQSEEIELFGRRKADLTILKDCLMYGERIVIPEIFRTKILTLLHKGHPGIKRMKQLARQYVFWPKLDQQIEEFVKNCAPCQLAAKAPTKTDLHSWPKSTRPWQRIHADYAGPFFGKEFLIVVDSYSKYPEVFEMATKSAAATIERLRYLFTRHGIPETLVTDNGTQFAASEFAKFTEANVIAHLFSAPYNPMSNGQAERFVDTFKRAFRKIKGEGVPNKEIINTFLVTYRTTPNDSLPDAKTPAEMLLGRKPRTTIDLLMPPLPQPTERDTKMEHISIAGLAPDHRNLCQISQFGLDTDSRRIGELGQFVIAPESSTRSNSPTVRQIAFMRIN

SEQ ID NO: 138719 - protein, 311 aa, Heterodera glycines
QIHLVLKQKHNARLKDVKMKFWHKFNQIGVAFGKHGTQLTNICQMICMNIGQQCKVNEICADIDRLHELCNEPVVEQIITQNCCNKLEMPKTDAKNSHLDEIASSSSPSMFMKLTTKSQKKPELPNYTKAFNLGCYLEELLRSITNGAEPAGAELAGGVLNNAFRVGINDEKVKRLIIKLNVDIAMADLFVEVNDPAKKRANLCLMDSLLTHLVANGTLYTEVQEWQTHMLYEHFINHNEIPRPSDADLRWAKPECHKAEVAQAAVSKLLGQMYLVVQSHSFVLGQVAKDCAEFVQFVNQNGKGILKNLYC

SEQ ID NO: 138720 - protein, 85 aa, Heterodera glycines
MPKITSCILVIFWDIILIDAPKFQVWMCRFEHLLSLQLPAVRQEIEKIWLFFRCYYDIISDFEPPISTEIDWPLAAATNELILGN

SEQ ID NO: 138721 - protein, 174 aa, Heterodera glycines
MDTTGKTVLSKNAINHIPFDKTELTAILKFGAAELFREEGEESQDLELDIDEILNRAETRECENMESANDLLNSFKYANFTIDEEKDLAEISQLDDSGMGENSPKLTDNSLDNSVKRDLEKQWDEIIPRQEIERLKEIEQSKSGEGDILLPRNRPSVSNVNYGGFTDESSDDLD

SEQ ID NO: 138722 - protein, 154 aa, Heterodera glycines
KRRFSIKLWKTFTDCFNCLPIAALIDEKIFCCHGGLSPDLQNMEQIRRIMRPTDVPDTGLLCDLLWSDPDKDVQGWGENDRGVSFTFGPDVVAKFLNRHDLDLICRAHQVVEDGYEFFAKRQLVTLFSAPNYCGEFDNAGGMMSVDETLMCSFQ

SEQ ID NO: 138723 - protein, 34 aa, Heterodera glycines
MYLHVILPTNIHKQIINSEQIWIIIIRKRTTNDC

SEQ ID NO: 138724 - protein, 267 aa, Heterodera glycines
MCRQIGLLETGEHFWIPPQFLVKSKEELIDYVYPNFQQLLGNDKELLNRLILAPHIDTCDEVNEIMMANVPGQVREYLSTDKPLDDRPLDIDEIESEVAALNRRTDSGMPPHSLRLKVGCVVVLLINKSDKEGLINGTRIVLEELGDDRLIGRVINSNAIGGQVRFFLERTRNVYEDKSPGGIKYERLQFPIKPAFAMTIQKGQGQTIRTVGIDLEREVFSHGQLYTAFSRATDGNNVRVHAPNREIDAQGRAKVLNIVATNMLKLQ

SEQ ID NO: 138725 - protein, 153 aa, Heterodera glycines
RYIDIGGSEIVPLSGVLRMHREHSRIVPLCMQLTLESIKPPNRASEWLPKECTFFRSLIRTDRAMSCRIRHSNQRWACPLKRDGCPLNPFFGSANYQPSSYNSSPQRWSGVFGVTSLLNGNFRVEEQMVGGVENGEGNREVMAAWANLENGFH

SEQ ID NO: 138726 - protein, 40 aa, Heterodera glycines
MVVPSNCPEDLPRTMQVDPFVEQTARQKATDVAQRMIDEK

SEQ ID NO: 138727 - protein, 136 aa, Heterodera glycines
MDLNNGFYDREEDKVKLIIDLTTVDEPKVDKFNLDQSKSNGTISMEIEKVSEFAREVFWSERKSETVHIKGLPWKIWAQINPKIGSTDNEKWLAIFLWCDAPKGEIDISQLTESTDNIEKCLGIYLLCAAPQEGAN

SEQ ID NO: 138728 - protein, 163 aa, Heterodera glycines
MYNKLRILRPINCCCLINFANCCLAYIGKNADTLLKTDAFLQIDQKLLCEILECDELQIRGEISIWNAALRWADEKCRENGIDCSAENRRQMLGPALFKIRFPLLSNVEFTKKIVPFGVLSKDEVIAVYQFKSLPNCHGISDGIFPMPFSTNGRISDRKRAQF

SEQ ID NO: 138729 - protein, 70 aa, Heterodera glycines
MMELLIMSQSVLDRMKHLLSTASADCPVEVPDVEAAAFKVMLSFIYTDDLSELNVENAMAVLYAGGFNFM

SEQ ID NO: 138730 - protein, 68 aa, Heterodera glycines
AVLVRFITAPNLLASQQSLLNLPDRTGAHDSTVPSTPPKAKRYNQNIRENFLKNFFSIFLFDTKASEC

SEQ ID NO: 138731 - protein, 165 aa, Heterodera glycines
MHECGERISIAKYDQQGFRRNQIRRNSKDNFQILKSLNEYKFSVYESTKMLKKIYEQMKEISYGNYNSFHGNNQTEEKMPKIIGELIEQIHKDFRILHEVKKFEFYLLKIITDYFEECEYFRLQKYILVNLERMLKENGIANEKNEYHANVDKFIQEKFEKECKM

SEQ ID NO: 138732 - protein, 20 aa, Heterodera glycines
MCFSVPWVAANGANSAKQFK

SEQ ID NO: 138733 - protein, 310 aa, Heterodera glycines
TFQFQQQQLEAQQQQQQEEEEERESSMTKEEEGKKRQHIDVKRGPVEKKGRRGAVPCRSVGKDGTTKGSKYFIPEDVWRDYLGTEWVDMDNLQLEEVDQPQYEPMMPLNPDKPGEVDCWVKELQDVEDNGLARGWEVESVIGVSAKAADGTRQCFVKFVGFKLPQQIPLAVVQEMAPEAFIQWCTWQNGMDNLDKCGAYWEEQLRQPPSWMCRRSLDAFAAWKASKLKQCNNNANNGSNGSTIANSNVFCDDDDDDNGAAADDHRQGQSQVELPPKWKWAPPEEEEEEAEEEEREDDIEEAEDIDDGDDV

SEQ ID NO: 138734 - protein, 294 aa, Heterodera glycines
MGRIAHLLQSDGFFRTHSQRRFSSSSDVKDESLPLVRIWNRHQWREYMCCQPKHRAMETKKEHQQQQRLAHGHRQLTPETVQMHGVGEQEEEEQQQPPEDPSTSGDDGVATVAVPGAASSPVASAADGQQTPPPLSADRRAAVERVKSSESVSPLAFDERDLDELVTTGGCDEPRTSPPHMDNADEAVEEEEEVEMGDQQQQPMVDMDNGGGDGGSDDVVAAAEAVVDVQQQVVVQQDADEDDEDNLIFIIDKARGGGKVGGVGIIGLLRMEGTPPHHITFVLTIDWLFVTNVT

SEQ ID NO: 138735 - protein, 308 aa, Heterodera glycines
GQLNVCLYFTFIAQAVAIRRLDTFERRAIVTDPCKRSLWMDCEYLQCCDRGKLRLGEETFWDELIDKYLKPVETTTREQAQVANGLPVETTTREQAQVANGLVALRNRIAFSIILLNCLLVLAIFLLQRHKDVLSVKFTPYDGFKWTKMGFKWTKMNETTGKFEDTTEALKVDPLGIGIIFFLMGILIVQTIGMLIHRLNTLVQTIGMLIHRLNTLVEALHELSEMKDVQYNTTFTDHIKVLNEARQMIDTVNYDRRQMIDTVNYDRAHGADGYTRHGLGDQKVQKNVLYKLQKQNNLLYLSILPCFS

SEQ ID NO: 138736 - protein, 26 aa, Heterodera glycines
MPVAFPAALFLSSSLSSCDSTAAMAE

SEQ ID NO: 138737 - protein, 250 aa, Heterodera glycines
MKRRWQSADEKRECTTAEDNRSNGICGNGKGIGGEAAKALADTASTSAAELSPPQVKRAKPQQKRQKFSSIEHLLREEKRRDEENGGRGEERIRRKRSIEKEEEEEGGREGVGPKSRKEGEREGHTNERYAREREEERGKIMMEEGGSGKDREEEEQRGEEGRQRMGPKRKRKGEEEEGIEREDQEGEEEEEEEEELKRKNWLRAISVPDNGSALDGLNCELENAETWSMGGGGGLGENLTLLWGELDMI

SEQ ID NO: 138738 - protein, 227 aa, Heterodera glycines
MEREFVANKYLSASQREKLAKEIGLTETEVKTKLQNFSSDQLDILKCAFDERKYPDIFMLEELARETGITVDQIQAWFQKRRAQHRQHKECKANDNQQKNVCENDQNYAIRIIMPQVQSQPNANGIGIDSFFCPSVCAIFGRAKCRRLNYKILKDGQQKLLATPFKPLDLAPQFKPLEGLFKKTKYPNRTECTFLAMLSNQSINQVKEWFKNRRDELERQGNEEAFW

SEQ ID NO: 138739 - protein, 267 aa, Heterodera glycines
TLSADGYRPTMSRIELIKDMSIPGNVKEVKSFLGKASFCRRHIKNFATIAEPFLSLSRQSVKFEWKEEQQKALEMLKKFISESPNLIFPNYFKPFHIFTDASGSGLGGVLMQKNEIGTFSAISYCSRTLSASERRWPTVQIEMCAIIYALREFRPFIFMSDIELHTDHKPLAYLLKKAETHPHLARWLVELQNYQIKIVHVAGRQNTLADALSRAAEEVPTIDGLPEMEDIVQFPICFSVSRSHIVFAPFATPTDPLSYRAKCKWSL

SEQ ID NO: 138740 - protein, 879 aa, Heterodera glycines
MKDDVKLLIEACEKCQVRKIQPGQAKSAPSVPIEPSNGPFQRIHCDLMGPLKKTERGNLYIFLAIDSFSKWVMAKAIPDQKANTVSENFVEMVVHQHSTPEIVVTDQGRQFTSGIFNDLAKIYGFEHVTTTPYHQQSNGMAEGAMRIMANIISQMVNEKGNNWDEILPHAIFSYNVSIHSATKFSPFFIINLRQPKLPTDRLLKLPSPDELVSDISVYTRIQTEKAAKAWEIVRNEILKAQERNKEENDRIRKANEREFEIGDLVLFKKEVLSHKFDQRWLGPMRCVGVEKEKKNVILQSIDGRAKLRKVHQEKVKHFNGPAILPLRQSDEPLNWEKYVDDPNLEQEEIEGESCESDCEETQDNENAQSKNKMGLKVSKYGFESSDDENDWNIVAFVRENQNSEDDEGPEVIMDRNPEIEIMPIFTILEVLIEGSFTEVYTGWRDPVTISLISSIPENLVRENWEIYVNGNGSRFVMAWIFGESFEIFIVNEFDQIMLGIDAQMLKGKFGNWVWAKLCNSRDSEGMISDQDDLEEVNDFSRTDINVINYVKPFKSLLDFSNEIDEDEGNEELVENAGERERNMNNSLEILGRMENEQLNEKGRLNKSNKTQNKKYASHSFFKELDRMTSPAPLHFESLTDDEEESLRRLERRLQEQLNKVRQTLAQEQPEECHVKAREEKCIEQLKQQTVKDTVDQKGTAEKEEKSGELCEKKEPEAKKAEPEAKDRKTDEDGIVQTKMEKEKSTVEDVLSLGDEEEDSPYEAAKVFETGTSFFESAGVRANSRRELEELTKSRNEAKIKAKNELEPPALLDMPKERQNGRKRLREGSPNKGELFTNNRWDEKMREIEEVNKNSKEVRNALNGLLTMRQKIFEIQDEAQ

SEQ ID NO: 138741 - protein, 456 aa, Heterodera glycines
ITNDPRRLPSISVRLNDLLTAALVDSCASVSYCRERTARKAGLKILEQNDGKGNLTAANDSSIEILGKTMAKLRIEDNVTGNVGEWEVVLLVSVDEHCPGPLLIGLPLLMELKGVISLGEKRVRLGDEWTNIVSVIGSEKPKPPSVILENTEVLEPRSENILSAKVNECFPMEQNFLVKGIKLKYPGIIVGRTLVSPGNTVKLYGKSHLADLESVQINASPGDEIPAKDYIPPETRWSENLPKLPENGLNRPPSKRINLEGTKLSENAKNDLKKIVDECSEAFVGDDGKIGKYNGPIVHKIDLIPGSLPFHCRPYRYPPETQKEIERQIKMMLDQNIIRESESEFASPIVMVPKADKKSWRFAIDYRTLNKMTKKRVFHLPNIQEFKDLGPEQEHAFQTLKQMLTTVPVLQSPRFGRTFTIECDASKKAIGAVLLQENGPVAYISRALNRHETNYP

SEQ ID NO: 138742 - protein, 17 aa, Heterodera glycines
MLLLHLYFSTTPDRNYM

SEQ ID NO: 138743 - protein, 97 aa, Heterodera glycines
PFVEQQRENQQVMRSLRANVVTGAHCCIGLVDLFTWFAPLLWFVLQPPVKASLWSDGGGDGHEQRQMVQRVVELMRSFGISLVRTTGADGMARFAFE

SEQ ID NO: 138744 - protein, 120 aa, Heterodera glycines
MNPPNLLLFVLFIFSFQIHFAHSDDNVICGIASNQVLTFKYQSRKEPKEMEIKISLYAKKSGTVIFDGFITESDNLSKKQCVVIKMYRKSDEKFYKNSVNLWKKLKKVDQKNEYFVNIID

SEQ ID NO: 138745 - protein, 173 aa, Heterodera glycines
MLKQHVEDVMKAEQYAAWHVNKVKLELKRKMALKEEIQKMVGMLHQVKHSVRMGSIGTVCFQNSLDRDIEKAEKTFGNFYSDLANAPWLPEKREIQREFKKYDDELAKFREQIAEYINAISKIKSEAELHAKLPFRTFVYALANYSRQSGKVCQLTKREQKKAKQVKVMDLKQ

SEQ ID NO: 138746 - protein, 251 aa, Heterodera glycines
MPSNSFYVILPSNTSVDGNRTNSFRVRLPLKIQFNSEWEVGLAVIVYPHSWPSIGTVEEQFVQVDWQTGSTVHIAVPTTNIKNPDDLSKSLYRLLGEGSEPLAKKARTAQLAFNNSASVARQWAKDEYIRRKTREKRAIRDEQMLLDALQTGGTDSTVDLMDAAAQGIVSREKRAESSQIPLREKMYDKDTYQNKLDNYFSTLKGEDLELLDELGRNKLNDEIANMFDEDRTILDATKELGLEAWIQAYKK

SEQ ID NO: 138747 - protein, 17 aa, Heterodera glycines
TVWGTQTYMESKNPSHN

SEQ ID NO: 138748 - protein, 61 aa, Heterodera glycines
MALQSVPSTNIALATICRTGHRMKSAQPQPYNQHLSYWYHKEKDQQKDGRRDENQSLCQIL

SEQ ID NO: 138749 - protein, 64 aa, Heterodera glycines
APASSTANDGTIEDEEEEEESAGGATNAKNRKNRKSRQTQQQQQKQGPKTKSNKELFNGVVERK

SEQ ID NO: 138750 - protein, 90 aa, Heterodera glycines
MEMEKEEEDRQREKTKREEEEKEEEKEEEIEKRQDKEEEKEEEDEKDEEEEEEEEEEQQIWERSRHGKKEKRVPSWRGTQLQAAKVAQLL

SEQ ID NO: 138751 - protein, 240 aa, Heterodera glycines
MAILQAVDHQGIIKLDSMFETDDKTFVVMEKMDGNMLEMILGQTKLCDFGYARFIGETQFRKTIVGTPAYLAPEVLKKKDQCRCCGFDPTTAQSPSRLISEAPGLSKSQSFSKLLNFQLSFDQIEERLTIDECIGHRWLKDAQTYWDLICLEKRLGHRYLTSEAEDLIWAPQLSAMGLIQTATTTTAQQNANGCEAIETTGKCQRTEQQPIEQQRSTISMETDPQQQQGATANIVDLLGG

SEQ ID NO: 138752 - protein, 386 aa, Heterodera glycines
CSGRTNETNWGNTKSLFRQTRQMVEKQLQLESSISSNGGHPTGTSAQVTASEVQLFLHDYKSFNMLTCLTSLAQLDNGSVVEIIRIDRDNGSVVEIIRIDRSEKPTKPHLLQVNTFVTPTFCDYCGEMLIGLVKQGVQCRLCKCNFHKKCALAPRNNCPSQRLCRPPFWPVPDITTAPFPSAAEAAAVLQLPHSLWPHNYRTPTVCKVCDKLLMGVFKQGLRCKDCRVNVHKKCVHLLPPNCQMNAENPLTFSTDQPNLPMGGTDQMIPLARLPGEKGATISSKRKCEGWLIHFLLQEKERRRLRHYWVLANGVISLYNEYNDGGGVNTSRVFRHIHLAEIVALIPYEGLPIDPKFAPHAFEIRTSSGLTFCVENLGALVGSLGTN

SEQ ID NO: 138753 - protein, 94 aa, Heterodera glycines
MDQGNGFYNKGEDKMTLAIDLIVKNAKVAKFTHDPSKSDATISMEIEKFSDFSREIIWSERKSESVTFIKGLPWKILAQINQLMENKCLGIYLQ

SEQ ID NO: 138754 - protein, 58 aa, Heterodera glycines
GGRCAIDLLFLREFLNLYSIPEKWLSLFLINFIHIKALAYETEGCAQSPFYFTEDFYI

SEQ ID NO: 138755 - protein, 34 aa, Heterodera glycines
KIPSKIKGLLRTALPIMLESICMCIKFIKKRDSH

SEQ ID NO: 138756 - protein, 68 aa, Heterodera glycines
MVAELKRRLRSSQMQLRPSQRRHPCHRLRLRTYRQAQEAYFCFKYLICYFISNLIIIFLILANICSVG

SEQ ID NO: 138757 - protein, 55 aa, Heterodera glycines
MPLLAATPGNPVEHIAGLIPVGDTLFSGFNIFITVALIVVMPFITRMMMPKPSDV

SEQ ID NO: 138758 - protein, 34 aa, Heterodera glycines
MASIHLRQGQDKKRMKLMPHETRNWLCLVENILT

SEQ ID NO: 138759 - protein, 102 aa, Heterodera glycines
MHHLGAIATSFCKYKYKFRCSTPVKFDLLHKVLSDCEPLFDAKLMQDSQRLEDFFALFCPKLKLIYPPTKKDSIGKARNPGEKNTEKSPSLISVSTLLQLDE

SEQ ID NO: 138760 - protein, 109 aa, Heterodera glycines
LPYSLYFNCALDFCSPYMLEYPKRTLEKIDFFVFGAVPPNRCAQIYGETESFRNSFPIACTLILRWIFAPHNCLSTPNGHLKKSIYFCFRGSPPEPMRPDLWGDRIFRE

SEQ ID NO: 138761 - protein, 72 aa, Heterodera glycines
MQEQLFQRQEQMLAKIDELQKSVFALKEGQSSIVSVFEKQFSSLGTKLDDKINELMNSKTGSIGVQMVKFKI

SEQ ID NO: 138762 - protein, 158 aa, Heterodera glycines
MLSNEQQMTPSSSGTSSVTDETVGQQGQMPWHQMPEAQFGQTPTENWHQIYAEQTLYNTYPTDQNWEQSLSLDLWWQKYAQQFVAGEQIYCPSDPPNWQQSHELHQFAQQGMGGFDQFNQNDFQMQMDKAMQRQTEPEQPIDAFAPQFAEISLEELQQ

SEQ ID NO: 138763 - protein, 176 aa, Heterodera glycines
LFTFSVPLSFPFPPGGHSFPSCKSANFPFLLSFARPLFLIAYLSLFFVGFVGNFLVVWVVATCKNMQTVTNVNMQTVTNVFIANLAVSDLFVCCTSIWLTPSYTFIGHWIWGAWMCYALPLFQGASIFISSLTLTAIALDRHWVGGERRGNLELTHRPPMRCLLSVFLCPMSRSFV

SEQ ID NO: 138764 - protein, 172 aa, Heterodera glycines
PSQRRQRSSGGNSLKCLYCPKKIVGGQAELQAHLEDCRMVRMHECTQCGKRFKARGGLQQHSKIHINDRPYHCRYCPKRFTQKSHLDQHERIHTGLKPFTCQYCGRQKSHLDQHERIHTGLKPFTCQYCGRQFRQRSQQLGHEARQRSQQLGHEATHMNRQRNSMGGMAMSA

SEQ ID NO: 138765 - protein, 100 aa, Heterodera glycines
GALDGPYFRAFANYFKRFFEEYQRSANVTFWGLTLTNEPLHGQRPGMSMNSSVQRFLANGMSPKMPSPALASIGTPLPNIRTTCSHESTRFSPKNFYWPQ

SEQ ID NO: 138766 - protein, 67 aa, Heterodera glycines
MTFWKWKKELMPNCHKSPNKYSNEEKLRKIKQYFETKEKNPKICDETKAKKLRIASDTLRIWKRNLL

SEQ ID NO: 138767 - protein, 141 aa, Heterodera glycines
MTTLKKIDTASEDGLEGGLSLFDIPPTNVAINKSNNQFCDLNKTFLYLSTSIERKDKSNWIPITKDSEADQHVGVESYDSGIYYAFRAYMMNELGFSEDVKKGLCEASCYYVDDVDQDDYTNSGFKNRASRFADGAKCETM

SEQ ID NO: 138768 - protein, 679 aa, Heterodera glycines
SFPPNGHEWYNSLNPSFIEFSISSDSVPDRSYLNLEEVSDIFSKSQYDLGSSTAGAHEIVTSTQEPITCKPHRTPFKYRDELKKHIEQLLKSGVMVQSDTPWVSNIVLVQKKDGGLRPCIDFRKLNEITIPDHYPLPRLETIMEKIGHCHFYSSLDLSSGYFQIPLTKEASRKCHTVSSKGYSPSLSRIEVIKNIPTPQNLKQVKRIVGMASFYRRHIPNFSTIVEPLTSLTKKEKKFIWDKAQEDALTRIKELLSQNPILTFPDYSQPFHIFTDASVVGQGAALMQKKNDLFSAVAYASRTLSAPERRWPPVQIELGAIVYALRTFKPYIYMSEIELHTDHRPLAYLQAKAQQHAHLARWLIELQNFNIKIVHISGKKNALADALSRLSDPQIPSDSQELQDIIEFPVCLSLHYCKGSPSTCFLKFGGCTELISDNATTFTSDFFKSFCSLLYINKSFSTPYWSQGNGATERTFRTFHNILSKYINPKEPNFDEFLDAATFCYNTSIHESTGESPFFLVFGRDPIFSIDQILDPSVHLPLPHNDLAEFKTLLVLSLRKAWNSAADSIKEAQNKSKVQYDKKFRNPDISIGDRVLLRNYTGKPGTSQKFHNPWKGVFRVINIEELHVTIVSCSSPQSNPFKVHINQLKKLFEISGPPSTLTTNADSTITPAAYSTEPAD

SEQ ID NO: 138769 - protein, 75 aa, Heterodera glycines
MTETFDAIDNEIAKIEKQRQFETNLCAVSLVDHFLDAINNNEQRKKNGTMPLAQDKYFHMESLRSVCFDFYIAAN

SEQ ID NO: 138770 - protein, 66 aa, Heterodera glycines
MGDPLDRNTKWVLSYVSDKGSYPVLGKDAEGRERMNALIVGHFDGHTFEKLFEQQMDFVGGSFAYQ

SEQ ID NO: 138771 - protein, 150 aa, Heterodera glycines
EWVICAPAAILRRSGHFSGPFSGVEPLSSVTRHHHGSQIHYHRKLIRQTLERHVAGTRPCDQLSCSESTLDARRALGFVANKCAPLWGDWSFGACISSRITTVIQVRSQGQVNYSWCNEPYAVSLSGRLNLHMHGLIFEMNTSVQAGSTR

SEQ ID NO: 138772 - protein, 19 aa, Heterodera glycines
EPVNSCIGCKCRRCCTPNI

SEQ ID NO: 138773 - protein, 151 aa, Heterodera glycines
MMRMMEQYANNLEKLVQERTGLLEDANKRADKLLNQLLPSYVANELKLGRSVPPKTFKTASVMFSDIVGFTTLCSSSTPLEVVTMLNTVYTGFDDLINKHEAYKVETIGEYGLADGVHWASGEDSVQRILHGGAAQALPRVQNGTTWENRY

SEQ ID NO: 138774 - protein, 136 aa, Heterodera glycines
MGCGESFEGVAVGADMFHQQNVKAFIGPYCNAEMDAVAIVTNTGPMAFERTQAFEEVFHQRHVTVVKKILFEENADAKMIQASGYLEDLKNSARGQWQGTEGIHWPFHWQFPLVIAIVNCHCPLPLLIAICHYQGH

SEQ ID NO: 138775 - protein, 51 aa, Heterodera glycines
MALGKEGKHGDGRKAEDELKTDKRKKERMGKASVETTTARSLELMNNPKFK

SEQ ID NO: 138776 - protein, 36 aa, Heterodera glycines
MGIPYFGRIDMIRAFIGIISIKWETGSETHQILFTC

SEQ ID NO: 138777 - protein, 62 aa, Heterodera glycines
MNFLQSDSFSFIQGPFKERNDERNTTFDHNQLSKEAEGFKENIRSQISTRVGTDENTSLINA

SEQ ID NO: 138778 - protein, 72 aa, Heterodera glycines
MVPDKMDKVHLSITVWDYDKMSKNDFIGEVLLSSANLQLASVSLAAQEQWNEMMLTRRPVVRWHTLQPRDKK

SEQ ID NO: 138779 - protein, 95 aa, Heterodera glycines
LFEYPKRTLEKIDFFVFGAVPPNRCAQIYGETESFGNSFPIVCTLILRWIFAPHKCLSTPNGHLKKSIFLFSGQSPRTDAPRFMGRPNPSGIASL

SEQ ID NO: 138780 - protein, 95 aa, Heterodera glycines
MFEYPKRTLEKIDFFVFGAVPPNRCAQIYGETESFRNSFPIACTLILRWIFAPHNCLSTPNGHLKKSIFLFSGQSPRTDAPRFMGRPNPSGVASL

SEQ ID NO: 138781 - protein, 84 aa, Heterodera glycines
MALLALHRYHLRLADSGLPNMSVDQGQSVSRCFGCEVPPRGMPFQYPMGRAEKLANALLRFDCAALPNAMATSDDCLNKLRVIR

SEQ ID NO: 138782 - protein, 198 aa, Heterodera glycines
MALSLRSKFSVLKGDITKMTTDCIVNAANSSLLGGGGVDGAIHRAAGPQLLEECRTLKGCEVGEAKITKAYNLMPNIKGRTIQRRFAHKSSKCLAIIHTVGPQIGTEVSDEQCRQLRDCYANSLSLARDNKLRSIAFPCISTGVYNFPKKEASEIAIKTVRDWLTEGQNNEKLDTVIFCVFGDDDLGFYEKNIPQFIL

SEQ ID NO: 138783 - protein, 86 aa, Heterodera glycines
MSGFSEKLMRDRLQKLSNTAHSEVRNNSENERLISLINLANDVIQNSRKKVPSFMAAFFEVLQPAFVHASECLDESHRKMVARIVA

SEQ ID NO: 138784 - protein, 200 aa, Heterodera glycines
MFDFPALPSSASFALSSPVAQLSHSNAVLVQDNERLNDRVGGELVHLSQFHGFPLRFICTKTTESEAIVADEEQHRILEQATDNRHTVGQARRFMLQQRQRHRQQQGSVNEVYDWVGITVFPLFALPPILLSYCQSLSSGSSSSFASSSSTFDSSFAADPTDFSLAMMRRLCIRPVARDDSEEMQVKRRRFAVSKFEWPN

SEQ ID NO: 138785 - protein, 111 aa, Heterodera glycines
MVLLCCSQHKMDRSLPNCLRGCRCGILVGRKGKKNVPKSSGEEGKAEQSQQRNERKQNNENYYCSVEEMAYDAMYDEKMPADERDKTGTVLQRVAMALQGKAGPEQYQQFK

SEQ ID NO: 138786 - protein, 44 aa, Heterodera glycines; identical to SEQ ID NO: 126591

SEQ ID NO: 138787 - protein, 92 aa, Heterodera glycines; identical to SEQ ID NO: 131128
  unsure (1)..(92): unsure at all Xaa locations

SEQ ID NO: 138788 - protein, 124 aa, Heterodera glycines
MQYNAFKPRREAGQFQNFVPHFTVESPSTLLDNYVSMSTVAFGQLWNGKMGISDGLLITLYNAFKPRREAGQFQNFVPHFTVESPSTLLDNYVSMSTVAFGQLWNGKMGISDGVRSFLKIPLFV

SEQ ID NO: 138789 - protein, 79 aa, Heterodera glycines
IVKNIRKLFSLLIMQYNAFKPRREAGQFQNFVPHFTVESPSTLLDNYVSMSTVAFGQLWNGKMGISDGVRSFLKIPLFV

SEQ ID NO: 138790 - protein, 173 aa, Heterodera glycines
QKSALPKKEFLFLGVPIEMAFIFASKDKLPTSADNTRINMNNFGIFANYFVENIKKLINSDNFDEKMNQGEMKIQQDLLDNPSCFRNKFEMDKILKEKRQLEITKEKAQERRKIVGEQEAMLRALSRNLMNERILEILSPVQKLDKNYNKKVFNENSNERLRVVLAYLELWAK

SEQ ID NO: 138791 - protein, 17 aa, Heterodera glycines
TCYEMYKNNFIILNIIL

SEQ ID NO: 138792 - protein, 136 aa, Heterodera glycines
MALQLLIILPLFRFYIFQQTVGQHTDKRELHRQYRLPLGVDPGTVKAHLTATGSRLTVTAAGNKATGQPPPPPAVLATHGTTFGQSIIPVKHVPASSFPITQKKQKFQVELDVQQFGPQEIDAHKEHLDLSNDSKD

SEQ ID NO: 138793 - protein, 174 aa, Heterodera glycines
AEYGFVMADKIGTSLLEQNRELQEKNEFLEASLATSRDNVAQLKRQLEQRCDLFKKLQLQLEGMEEEEPNGTDKYHQTGSESKTRKCIRTGISGLKFSFFRVPFSGCKKDITWFEFLPGFRIGSPGNPYRTIPIHQWYRTINTKDSDELRVIAEKREEQRINEYCSRLRGANLK

SEQ ID NO: 138794 - protein, 67 aa, Heterodera glycines
MVEGGLPLNRQYASPCEFPQTWAVSIVGECVCKDKCKQFIESLVKLANDRGVKMGMPPRVDMTKAIT

SEQ ID NO: 138795 - protein, 70 aa, Heterodera glycines
MEFHNIPTLIFGFCFHLSHVFDILSRVPRDRDRAGNSRSSEVPVPGPGFLKAQVPVPVPVGQPGTEKNKH

SEQ ID NO: 138796 - protein, 21 aa, Heterodera glycines
VRLGTQQIWGAKIQRRIKYRL

SEQ ID NO: 138797 - protein, 107 aa, Heterodera glycines
MEEEGAEIDGQQRRDGIASQMPIIRMVYMEQQQQNIEAINSANEQQSLEELERELEELGIEEANLAKSEAEEGERSAQLTVELEQLDNEEQEQQKAYETHGTELVKN

SEQ ID NO: 138798 - protein, 39 aa, Heterodera glycines
MGCNEALSPGDFSEHANFARLCRWHGLDGLLSAMSRGPK

SEQ ID NO: 138799 - protein, 59 aa, Heterodera glycines
SSLPKILRLPNSIGFTVCGFGLSIGAFIVGALLLDGPMYAYTEWVQQRTDKGTEKQKVE

SEQ ID NO: 138800 - protein, 188 aa, Heterodera glycines
MTCKSQNIQSDQRELKRKAKVALDLLEIGLVAYALQDSESWKKAKTAMNVLGNVLLAESLATVKKENKNSPDSPVAQNIAQPKAAPQKETTKKREASEEKKDPTKSHLDSASTQIDDVSVPKADKKPKSNNEEEDVGDIDKTLDEFFASIKAATTACLYTVLFWGNEFAVPALQRAGVAVYLASLLKN

SEQ ID NO: 138801 - protein, 84 aa, Heterodera glycines
MGGYCGVSFSALSKGIKMPSPSGLPWLPVENCQCPILDNECIRPLNYTKPVICAHKSIKNLLDFVASPGEEHPGTHNHLPIYFF

SEQ ID NO: 138802 - protein, 213 aa, Heterodera glycines
LNPPAFQSLGLNPPAFQSLGLNSPAFQSLGLNSPVFQSLGLNPPTFQSTGLNPPAFQSLGLNPPEFQSLGLNPPAFQSLGLNPPTFQSLVLNPTAFQSLGLNPPAFQSLALNPPAFQSLGLNSAFQSLALNPPAFQSLGLNPPAFQSLGLNPPAFQSLGLNPPTFQSLVLNPTAFQSLGLNSPAFQSLRLTPPTFQSLGLNPPAFQSLGLTPP

SEQ ID NO: 138803 - protein, 62 aa, Heterodera glycines
MHDNVMGNLATLLKALSDKGTLLDSCIVKGFTRLYAVLADLYLDLPAAFALAQLWIKKSLKA

SEQ ID NO: 138804 - protein, 46 aa, Heterodera glycines
VDELSKDVPKLCDTLAVLIAKLVEQNIVTSNVISFLAYKNSDGKES

SEQ ID NO: 138805 - protein, 62 aa, Heterodera glycines
LFFSFITQRSRLIRCSPNFAGKLLRTLQMLINFLRIFCLEEHSSSHLPHQHYFFLIIFFILS

SEQ ID NO: 138806 - protein, 108 aa, Heterodera glycines
STGYREAIPEGFGLPINLGASVRGDCPENKKIDFFKCPFGVLKQLWGAKIQRRIKVEVYRSYSRRIRSPHKSGRIGSGGLPRKQKNRFFQVSVWGTQTIMGSKNPTQN

SEQ ID NO: 138807 - protein, 18 aa, Heterodera glycines
YREAIPEGFGLPINLGAS

SEQ ID NO: 138808 - protein, 113 aa, Heterodera glycines
MEFFEKIVPSGVLTQQEVTSVEQYCSKPKICGGTSGGIPYPLKFPCHERNLTFGKIVMEIENVSKFAHEKMWHIRCSKFVHISGIPWRIVAKINTNEALAFYLQCDVSMKGSH

SEQ ID NO: 138809 - protein, 119 aa, Heterodera glycines
MSESERVVFNLRIGVPSLKKVMSSSFWLLAQFKMAHFLLTLCLTFALLAHCVSAKRRPGLRTWDFEAKPGMDNSVGKAKDEQDEDEEKEPKADDGVGDKAVTDPIPPFKISSTTRQAKI

SEQ ID NO: 138810 - protein, 96 aa, Heterodera glycines
LFEYPKRTLEKIDFIFVFGAVPPNRCAQIYGETESFGNSFPIACTLILRWIFAPHNCLSTPNGHLKKSIFLFSGQSPRTDAPRFMGRPNPSGIASL

SEQ ID NO: 138811 - protein, 45 aa, Heterodera glycines
MRSKFMISVPDGVVYEGHRPSGLFSVGVLELGNDYGGESRDCFHR

SEQ ID NO: 138812 - protein, 76 aa, Heterodera glycines
MDKQTFGGDSSANSAAEDKMSGCCSEHIVEIEWKHFDYLSALSGLYTASVERRKCNLLVLVQGNLDNLEGKMVEMN

SEQ ID NO: 138813 - protein, 110 aa, Heterodera glycines
MPPNTLFDQCVSVGFSVDGPGVGVDPLHFDNPRNCRKHQRDSQFGPNPKALRGLAEVGDEPTQFEPVDVLLVSGAKAPHNENMMHMFKNMANDRTGLLMAEDCVDVLSEA

SEQ ID NO: 138814 - protein, 55 aa, Heterodera glycines
NLGPLHCFHPNCCAECESTGAGKNCKEAGSRPMSGHVGAPSSSRKKETLKRSVAS

SEQ ID NO: 138815 - protein, 81 aa, Heterodera glycines
MHLQENQNIKHKLLLNLCQWARIADGVLFRAEAEPEHQPMRYAKFGGPVPQKTSAFECAVSRGGPVQLPSEQRTKGGDLGF

SEQ ID NO: 138816 - protein, 101 aa, Heterodera glycines
MEQDMLLLGATAIEDKLQDGVPQTIATLAAANIKIWVLTGDKTETAINIGYSCRLLTEEMREVFIIDGKEEKEVEVQLKDTRRRICSAKQTQQAKEMKREK

SEQ ID NO: 138817 - protein, 98 aa, Heterodera glycines
MARRRDDQKGKEGGKDGESNGQTVQEHFAFGDLEYWGNETETNFPMPDGVDKFTKIASMNAELVALADNGQLYAWTWAKGSVPSNVPHVVNSQFAITG

SEQ ID NO: 138818 - protein, 128 aa, Heterodera glycines
MEQERKARQKAAKKAGGGVVKKQSKKLATTNPLSSIEALAKRVAKDEDNYNANQFLVDSLPEVPGATTENSDTKAGARANAKSVRSFAAEVRRTIENADIVIEVNIGGKKDLNLSDCFHLDLGFFLPK

SEQ ID NO: 138819 - protein, 387 aa, Heterodera glycines
MEHLTDAPPWASAMLGLVNQMVGMCRELISMVREQDGGSNPNSVFDEERRLHSVVIAQLQESNSQTPTQRATDDLANVKELMDHCDIECLPTQVYRMGKKQADGRPRPPNTSANFTKKILNLNFIIMGDFNLNAKDITWTSGTPYAKSEKGNIFCEFFNKYGLFLMTNGPTRGSAWLDLILSSKPDFVNNVLIEDIFSSDHLTTNFSLSFPILEDWYDSIYGKKNIDCIYVDFRKAFDSLPINILINKLHNIGIKGKLLSWLSEFLRDRSYRVKINNKSSNLHPIQSGVPQGSVLGPLLFLIYINDLPQVIPSVVSIKLFADDVKIYVSYKTRDERSKLNIALENIGKWANAFGLNISQNKTFIQNNNINYLTILLMRLNLLVIWAF

SEQ ID NO: 138820 - protein, 82 aa, Heterodera glycines
MALCPYLPALASVKYTRWLTVSSARWSSSARSMFTNTNGLPPSMSARATFVATPPLPWSSQNSRPRSESTAMAMGCATAVGV

SEQ ID NO: 138821 - protein, 82 aa, Heterodera glycines
PLSVAQPMPMSTIPLQPMYPMQQHIYGPLGPDKNDATKPGTTPTPTRTECGTATGATSHASVECAMATGAAATSDATERNAR

SEQ ID NO: 138822 - protein, 92 aa, Heterodera glycines; identical to SEQ ID NO: 125147

SEQ ID NO: 138823 - protein, 55 aa, Heterodera glycines
MGVLSADWGTQTIMGSKNPTHNYSTGYREAIPEGFGLPINLGALGSEGLSRKQDN

SEQ ID NO: 138824 - protein, 64 aa, Heterodera glycines
MARKSFRFCKANKACNEPYARTIWILLTKKKVIIQRRAGAQLSESVTNNAKKSLTINFSLSSLW

SEQ ID NO: 138825 - protein, 137 aa, Heterodera glycines
MQKVFKLKTPFISIYIARFIQCLFYYAGHKIWSFAAQGLIEKIVNKNKVCLMNIYINKLMTISKKKVKFERARRALHIQTYQLRAYRHSQARYGQSKQSVTHNHEALLQNSCNVSRQIFVIIFFTDFFYLYAYALFV

SEQ ID NO: 138826 - protein, 90 aa, Heterodera glycines
MAILLKPTKLPMPFGVTMTQFWPIAPGFLGIYLVAFKEIKKEGIEFVIAALINSSSASKCAFISVSALSNCSNCSRDSLALYTLTNESFF

SEQ ID NO: 138827 - protein, 62 aa, Heterodera glycines
CQKLIENINLYSGYSSVKNDATLAIRPRKRALSNGTFKSKNDCQGAELQKKIPSQGQATIAV

SEQ ID NO: 138828 - protein, 94 aa, Heterodera glycines
MTDQSLQGRVGGFKRERENGFEWLFKWFFYRLFQRGGGVPGTDERQKTEEQPRDQWSKIGEYFFYGINGERRRLRGRGHGKGGKNGKIPLERTI

SEQ ID NO: 138829 - protein, 478 aa, Heterodera glycines
MNTSDVFEAMFRFDSQNGKAENANCPVVEVPDIEPTTFKLMLKYIYVADFSELNGENAMAVLYAAKKYNIPALVDRSLQIPISELRNVFMAYAYACLFELKDFANKCLSYICQNAAHLFKSDDFLEIDQKIFCVLLDLDRLLLSNEFEIWKTALRWADEKCRQNGIECSSDNRRSVLGPALFKIRFPNIPEEDFSKFVVPSGLLTVEEVFGVYQFNSHPNLYLRGVPELYSLKFPSHGRISDWNTAKRNGRGTLALEIEKVSEFAGESVGGYRCSDTVYINGLAWNIQAEIREGTAADDEKKYLGFFLWYERTKHEKPLNCLFSATFRIVSEKSETENSIGTLCDYNNQMNSSWGFGNFISFEEVVNPINGYYNREEDKVTLTIDVMTVDEPKMDKFILGQNKSTGTLFMEIEKASEFGREVFGSDRKSETVHINGLPWKILAKIQTKNGSVDNEKWLGIYLSCGAPEKGVNELPIIA

SEQ ID NO: 138830 - protein, 66 aa, Heterodera glycines
MILPDNILFITLIKKFFRRAGRTDLYGFEFVGKMLVDQSGEEIESDPIDQFTDNSDQNIAKREGGK

SEQ ID NO: 138831 - protein, 26 aa, Heterodera glycines
MPITNLTSISNCEFDKRCKCHHEGVI

SEQ ID NO: 138832 - protein, 132 aa, Heterodera glycines
MKFDQFALVIFLDKTDQSKFDQRRENERDADKEPKINCLRQIWPFLEEFKNKRDFDERNAGQIFHDISELESQCHETEVKQNDGKRNGKRTENERPGHAESDPGGECTTVQPKGDPADTGGIKQTHLNHLDK

SEQ ID NO: 138833 - protein, 250 aa, Heterodera glycines
CVHPEFVGLGFSGAWDQLKVTFHFKRLYGYYVLQMYLPTYLSVFISWIAFWLDSRALPARITLGVSSLMALTFQFGNVVLMALTFQFGNVVKNLPRVSFVKAIDLWFFVCVSFIFAIDLWFFVCVSFIFSSLVELALVGFVEKNHERKLVKFHRERLSRRNPHKHSTGISLFWNFKISFLSSKPRNSLALPTTTLNNNSQNDDQIRNGEVVRSGSLLKRVYSRRYTTELSNRVDAVAARLFPALFALFNG

SEQ ID NO: 138834 - protein, 92 aa, Heterodera glycines; identical to SEQ ID NO: 125147

SEQ ID NO: 138835 - protein, 78 aa, Heterodera glycines
MIGRAVRNRPFIFEGIFKFILYPRKMAISFFEKFYTSQKRLRMRRRAVHNRHFIFERIFIYIRYPRKMAISFFEKFYT

SEQ ID NO: 138836 - protein, 48 aa, Heterodera glycines
MPMSSKAFSTFYIGKEEFVRNEHFPCIVKEWSEKGRYVEHLRRNSCIS

SEQ ID NO: 138837 - protein, 42 aa, Heterodera glycines
MEIMTSKTLNEPTSFNVNGRVHRPEDGAEQNHQTMHGAADAS

SEQ ID NO: 138838 - protein, 66 aa, Heterodera glycines
FLNFSLYQKTTIITRQSIVHNPETINLWMLKLLHICQSFFSTVGAKSVAKFQFHQPSSQPHQSLNC

SEQ ID NO: 138839 - protein, 94 aa, Heterodera glycines
MALLINGTDKHYDNAYREDSYITLQINWPRYLKNILPNEVISRRYSEAIGTVKVRIAEVQLIKVGANLATQLAQNEMFSEIRKIGTESVGTNTQ

SEQ ID NO: 138840 - protein, 81 aa, Heterodera glycines
MANLDRLEAKNVTIFIPELHFSSQNGVIEMSSFNITADFLEVNSAEAILDDRAHFHALPPYDRMMFAMFDACMVTIVSPFC

SEQ ID NO: 138841 - protein, 42 aa, Heterodera glycines
  unsure (1)..(42): unsure at all Xaa locations
LRIGNXQRPLMARVDVTRGITYDLLKAISSSCNNNKRGDSNK

SEQ ID NO: 138842 - protein, 98 aa, Heterodera glycines
MPLSSPADAIAIVAFVLKPTPYIEEFLHRLSLLEYPDKNSRVNLRIYNNQMYKKRHFETWAKRRSGKKKTIWDCANFEWHGKGQTKIPAEAGAVKFEI

SEQ ID NO: 138843 - protein, 50 aa, Heterodera glycines
INFATSQVILQHVQLRLGRPIAMQNERVGVVQKIFKHDKIFAVFVGLVEK

SEQ ID NO: 138844 - protein, 53 aa, Heterodera glycines; identical to SEQ ID NO: 126655

SEQ ID NO: 138845 - protein, 183 aa, Heterodera glycines
MEMEQKKQEVSTDKIEHLQNEQKRNINALEKELKKNQMEIALLKFRQNCWDANNSHNNIDIIDDKCLAVNHKENESEFCKIFATHPILFDKDFSKIFYFEIEIKKMQNSFDNFLSFGFSTKQQKNVDEINTYSYCNHGFFIINAEYHYQEAQQDDSFKENDVVGCGINSATRQVFFTKNGRRQ

SEQ ID NO: 138846 - protein, 107 aa, Heterodera glycines
MIRILCSFQQPLVGLDVLNPEEMITPGLDRELVQDMFRSLSMLHLQQQLLATKSKSGGSRSVERPTKALFPPNDSMAQSDELSERVTNLMETLRPMLTQALANCFLD

SEQ ID NO: 138847 - protein, 61 aa, Heterodera glycines
MNGGVAAGGGGGGGAGGGGGGGGGVGNGGGAANGGGAGNGGGNGGGAGSGGGFGGGSGNGQ

SEQ ID NO: 138848 - protein, 52 aa, Heterodera glycines
QKNGRKLFSFFSASINCLSVKQNKYILFIKIKTISSKQLDWPIYVCLTVNPG

SEQ ID NO: 138849 - protein, 82 aa, Heterodera glycines
MNGNCTDRSYMKTCLDPVSKQYTNSLAIISFHYRITTLCPCPNAASLAQKCAPQSLPASTFPFRSVAAAVAACKLRMESDCR

SEQ ID NO: 138850 - protein, 131 aa, Heterodera glycines
GNGGGKGNGGGKGNGGGDGGGRGNGGGGGNEGGGIGNGGGSGNGGGGGEGGGAGRGTGSGDGGGGGDGGGNGGGKGNGGGIGNGGGDGGGIGNGGGKGNGGGDGGGIGNGGGSGNGGGGGESGGAGKGTGS

SEQ ID NO: 138851 - protein, 212 aa, Heterodera glycines
MANILLSHTFESMPFNGVDELLQILGDIINGFNVPLKEEHRQFLFRVLLPLHKSPALPMFFSKLAYCVMLFVEKDASLAKPAIKSLLRNWPSKSGIREILFITELDEILSQVGEDQFRAIMKPLVGRLVRCTTSQNARLAERALLLWKSPKMLTFLKDNQLAFPEAIRAIDKAQRHWSSGVIAMKMTICLSAPYSSSRHQFKLIQQKFQSLK

SEQ ID NO: 138852 - protein, 114 aa, Heterodera glycines
MANFGHKIKKCQKFLLLYTALVFGYRTLFLHFPPIFLFTVNAMHSENGRLCLGHPSALDQEAGRLAEEVQNWHAWGGKSGGNALQCAPVVRKGFYLFLSVRNALILEGSDTVWF

SEQ ID NO: 138853 - protein, 30 aa, Heterodera glycines
MGAKSTAELGTDYREAIPEGFGLPINLGAS

SEQ ID NO: 138854 - protein, 334 aa, Heterodera glycines
MVPKPPEGVAEKERIGTNEERGETESTDNGNNGQMHLNAFKGQRKVIGEGAGGSDQLDIPTLSERTDELREEKQTEAESQTTEERQTRAEKHTKVPFEEEGKTQPKTAEEAKSRTDQRDTGVQLVDEGARSRDLEKPKETASKVSSPMKRMAVQENSWEFHKKFAERLVNKTAKDEEEMGTDEKRKEEEEEEKRSEREEEKEEESVTTEESQQRERRERQSNLNTTPAFGEVFKGRNDQQQLEEEEEKEGEEEEGVWEDKQKEKWVGRRDEESEPKCEERPKEGHMAQMPAEIEVEEENPAEMFDSPPLDEMTTDESSSSAGEETPIVVRRERI

SEQ ID NO: 138855 - protein, 100 aa, Heterodera glycines
LFEYPKRTLEKIDFFVFGAVPPNRCAQIYGETESFGNSFPIACTLILRWIFAPHNCLSTPNGHLKKSIFLFSGQSPRTDAPRFMGRPNPSGIASLFRLIL

SEQ ID NO: 138856 - protein, 141 aa, Heterodera glycines
MSRCSSVQSSGPEFSSNVSVESAIFDDNEKMEQDQNEGKASDDKDRTMVANGEGMDTAIVKEEGATTSNGFKLELRQQRQNAHSQQQLNVPLHLNSSDPSLSDMAKPLANLQHQSAFQTSPAFPFPFGQNSFIQPPFNRFF

SEQ ID NO: 138857 - protein, 187 aa, Heterodera glycines
MAEAIEKLRLSVVQLKNNGTQKRQECAKLSQAIASVGGEGTANAGTNHANLAEFKDCRANASEKVIQMETIRESIGDKAEQVKQLEQLIAATGRELPETERQLRAMERSKKAKCESAKAIWPFLFKELEMTVQQNLRKMTLDVDSINATLDKITEMGESNERDRLSMFATPTDFREMVTHPFGDKIN

SEQ ID NO: 138858 - protein, 108 aa, Heterodera glycines
MNPQQIWTRISKMIEGEQNNRRSGNREEDEMELNRSLQLIVITYVRRLVEHLHLACRPEYIYSMAKDENGVSHIKAHRQISAAGDGDDELEMCLLEPKNFEKHSISSH

SEQ ID NO: 138859 - protein, 91 aa, Heterodera glycines
LFEYPKRTLEKIDFFVFGAVPPNRCAQIYGETESFGNSFPIACTLILRWIFAPHNCLSTPNGHLKKSIFCFRGIPPEPMRPDLWGDRIPRE

SEQ ID NO: 138860 - protein, 214 aa, Heterodera glycines
DETEGRCEKTNGICQNAKKSWERLRQRIVRFATTFERRTKPNGNVFNLFGRKKREGAGRKKETEHRKFSQFGEAGLRVCDKNGRTSKKRQTGREGGDQAVPGEGSGHCGRKQKGGEIGLCLVLGTAVLDKQMDRGIRKSGDGSQTRTGTIRKSGDGSQTRTGTTVRILKNGNGRLQGAEGRGGQMRGEVGQTEGMDRRLFQVKMEMTNHPIHTA

SEQ ID NO: 138861 - protein, 32 aa, Heterodera glycines
MVFISTAKSLPLVTYNFNQPIQLLRLLKMNPR

SEQ ID NO: 138862 - protein, 88 aa, Heterodera glycines; identical to SEQ ID NO: 124691

SEQ ID NO: 138863 - protein, 67 aa, Heterodera glycines
MLLLLLLLLDMLLLLLLLLLLVRVPLDAHYHLLNGQWNPGENLVLNQKFGCCHVMTHHYQGYPFCIA

SEQ ID NO: 138864 - protein, 268 aa, Heterodera glycines
INLGAYVKICDGTIRFCMRCACIKPDRCHHCSTCGRCFLKYDHHCPWVRLYFRRIQSIDSFSLLKYDHHCPWVRLYFRRIQSIDSFSLYQINACIRFNNYKFFVQFVGYAWLLSVFIFSTIFPFLCVSFFPIFLPDEVCRILVTFLFVLDEVCRILVTFLFVLMFLLGLSLTFFLTHLCLISKNRTSLGESPVFTYGEDKRAFPVFTYGEDKRAFDLGIRRNFHEVFGTVKWKWFFPLFSSQGDGVRFERRQGDGVRFERREEVQAVA

SEQ ID NO: 138865 - protein, 134 aa, Heterodera glycines
LYILKAKNGIFPNNSRISIADFGVSAIKNNERRDSFIGTPYWMAPEVIICETFKDRPYDCRADIWSLGITCIEMAQMEPPNYNMNPMRVAFKVQKSEPPTLEQPHKWTTEFSDFLLKCLVKKVDERWGASQLLM

SEQ ID NO: 138866 - protein, 91 aa, Heterodera glycines
MRRGRKSTRARTCVHEATHGWILWKTKDCSDTFEMLKVRKKPGRLNNGYCSYFTTKWYTRPELKGKLLMTMGGRATEEVLWAFNWTSFGQS

SEQ ID NO: 138867 - protein, 186 aa, Heterodera glycines
KINLKKHLNLARYALSANQTEMSKRERPFGHSKAKNEARPLQQAKSYPPVRQRNEAQRKRILITGGAGFVGSHLVDRLMTDGHEVIALDNFFTGRKGNVERWVGHPNFELVHHDIVNPFYSEVDQIYHLASPASPPHYMYDQIYHLASPASPPHYMYNPVKTLKTNIVGTINMLGLARSAQQVPPP

SEQ ID NO: 138868 - protein, 26 aa, Heterodera glycines
MDNSDIELKLFRQSLPNVLGAFAINS

SEQ ID NO: 138869 - protein, 66 aa, Heterodera glycines
MPVLPVKFDQRLLFPLCRTCALKHPHGAVNKDYECTHREDDERGENIRVERDREFWAKPGPGLAGT

SEQ ID NO: 138870 - protein, 97 aa, Heterodera glycines
MAFITSKVQQVLVFWECEINAEKRNNDEMKRAFAQYKDSGPIRLKDCYHGGRVGPQRLHYEVPKGWRMKYYDVRSLYPHECCDSISCGPPNTSEHHR

SEQ ID NO: 138871 - protein, 194 aa, Heterodera glycines
MPVPLGALPGAFGLNVQDKEFFPHLANVEASYGHILQSLPPKADYLYGGMTPDRQRRFDQWRWLLLAQFLAIRDPLEWHGCLDDEDDEEEEEEEEDNDNAFDVIVGGIDITWEPMNIASASMRHFRLNHLKRDQLAIVPEYGYYTTNTQSLIALKFIDWYAKKNGVSIQTAHSPDGEKKLANTLWTDTSRRPTP

SEQ ID NO: 138872 - protein, 472 aa, Heterodera glycines
MGEERIVASISTDSGSAVHNAIEKGLPIVNDDLIRAAEQDQTILKVKKFVKTQWPNKKAISDELMQFHRRREALTIENNCLLYSERVVVPASLQNEVLQLLHKGHPGIKRIKSLARQYVYWPGMDEHIENMIKSCQPCAAEAKAPVKTELHSWPKTDGPWKRIHMDYAGPFFGKMFLIIVDSFSKWHEVFEMRSSGTTATIEKLRGIYSTFGLPETFVTDNGIQFTSNEFKQFVTRNGITHLFSAPYNLMSNGQAERFVDTFKRTSRKLKGEGIANALETFLVTYRTTPSESLNGKSPAEMFLQRKVRTTLDLLMPKQRQPIIRDEAMEKNFNRRFGATPRFFLVGDKVYARHRLSQQWNAGHVTSCKGVMYDVEFVLGSTSRFHANQLIKSDTDQLDVDPLNVFNEDFGLPKMAHQPNQRPNEAVVEPNIVDNAEPANDPPPVEQQPISPIRPRRQYPKRNRRPPDRYSPK

SEQ ID NO: 138873 - protein, 92 aa, Heterodera glycines
MIGRAVRNRPFIFEGIFKFILYPRKMAISFFEKFYTSQKRLRMRRRAVHNRHFISQSIFIFRGYPRKMAISFFDKFYTHTNALEHDREGGAQ

SEQ ID NO: 138874 - protein, 40 aa, Heterodera glycines
MIGEGRCAIDLLSLRGFLNLYSIPEKWLSLFLRNLYLTKA

SEQ ID NO: 138875 - protein, 105 aa, Heterodera glycines
MPVITVERQWYFVALERDANNTRGNSSNNDSAELLRDERVWRMFARSQQRCAAIRDASRARAQIAAGRRAVVADLLTGGSSESMYSQTSPPKSPGPGQNVAAKKK

SEQ ID NO: 138876 - protein, 159 aa, Heterodera glycines
VETLGVGYNRTLGGRQLTLRLRDHLVRAFKQQHPSTSNTVEQNLRAMAKLMKEAERVKQILSANTDHYAHVESVFEDRDFRVKVTRDELEAMFQDFEQFHMEPITDALRMAQLTLDKLDRVVLMGAGTRMPRLQTVLGTFLQGKEISRQLNTDEAIVWA

SEQ ID NO: 138877 - protein, 177 aa, Heterodera glycines
GPGRRLRNVANVRKHIDYIANALNHMEARLWQSPHRRQLRWERPVIQPDILYQSYVLMPKLTPEVPVDCVLSKFVRAAMNKVKCPIYSLCWTPEGKRLITGASSGEFTLWTPEGKRLITGASSGEFTLWNGTAFNFETILQAHDVAIRAMKWSHNDQWLASADQGGFVKYWQPNFNN

SEQ ID NO: 138878 - protein, 284 aa, Heterodera glycines
AHIITGKFGKIRRLSWCPTDVKLATASDDATARVWDFARCAEERVMRGHGADVRSVDWHPTKGLLATGSRDSQQPVKLWDVKTGQCLATLHDHKNSVMAVQWNRNGHDHKNSVMAVQWNRNGNWLLTGSRDHVIKMYDVRMMREIRSFRAHKKEVTSLAWHPVLAWHPVHEGLFVSGGGDGSIGYWLVNSEKELTLLEQAHDMAIWALEWHAIWALEWHPLGHILATGSNDNNTKFWARNRPGDTQEDVFGMTSSNGNGKTASQSVPRAVSTGDEEGTAATAIP

SEQ ID NO: 138879 - protein, 109 aa, Heterodera glycines
NGKDIFRVNGCARDNEKKCPTVFYTFCRESGGNLFNCRHCDELVDGKVCNSFDQLINLDQSEEQMNSIYKSHSHHSNSSSSKAEKLGPVSAFTWISSNLLLLFGNGEKN

SEQ ID NO: 138880 - protein, 366 aa, Heterodera glycines
MLFEKVPEHFIWAKDKWNKRKYNLTKRPPIGRIVPVPPSDPERFALYSLMRHFPGDPDHLKMVNGLLCTSFTEAAIMHGLLEDDKIWDKTLAEAALSRWPDQMRWLFVSILVYGQPSNAIELWNKYKDQMYNPQGIITLAQHKVAELEALADIDWRLHSCFNLSCVHFSLPDPPTSIAKNTDAAIEEFFFGDDDLNLPPGQPNPRPQPNTPPPLNSDQQKVFDAVLLAIQSNPRDSTVPRRFFIYGDGGTGKTFLFGQIIRRLRKAPYTYKVLATASTGCAAILLPYGKTAHSTFRLGREVSLDKLPSIPLESFFARRIREAQLIIIDEITMLHNTVIEVIDRVCKEMAIRQHKDLLFGGKTVIFS

SEQ ID NO: 138881 - protein, 40 aa, Heterodera glycines
MFSVRFFAFLLLLAVLCFSLVECGLIGFFWTTDKSLMRVK

SEQ ID NO: 138882 - protein, 27 aa, Heterodera glycines
MPLANLAKRRSSMRTNSTLCLRKSVPR

SEQ ID NO: 138883 - protein, 82 aa, Heterodera glycines
MALAKLKTSVFAISVVLFVSIDKCRCTNILFTFFHDTGSHFQSVFPLMQNLNVTLPMTFGHAVFPPLIWAFILGHVTRNSEF

SEQ ID NO: 138884 - protein, 18 aa, Heterodera glycines
MRMNEKKKSNYFVKKENE

SEQ ID NO: 138885 - protein, 61 aa, Heterodera glycines
MALTEKGIKTNRGENDLLDSWQMMAKFAFNFLPMLMTSSIHLFLIHFTAPSLGIFSFYCQS

SEQ ID NO: 138886 - protein, 80 aa, Heterodera glycines
MVRNVYNWGEAKAVGEREQQIADTPPEDGAEHRPQIHGQRMGAVHPTDGEQFKCQNGQHSDVIEEAAGQFVAEGTGLKNT

SEQ ID NO: 138887 - protein, 781 aa, Heterodera glycines
MWFEDRSLSNMKVTLIVEEWRDIWSAKSEFMFAAFAYLFATTNFLNLPRLILDNGGPAFLVAYGAALVLVVLPIVALEICLPAFLVAYGAALVLVVLPIVALEICLGQLTGRGPVQAFYNICPVFKGVGISQILFSLFVLGVGISQILFSLFVLATMTHFLARLIIFIYAATMTHFLARLIIFIYALFWTLTDDRPGLPWLHLPWLHCKNFPEIQFGPCRESMSVTAIVGTVQRLATFHEESAMSKFQNLLDHKLLDHKSDSVVDVGNFNWHFLVAQCLIWILVFCAICFGVRWLGKVIVFSFMVPLALLLALCGRAMFAFSFMVPLALLLALCGRAMFASGAVEMLEFFVDSLDWHKLKDYLVWKTAVEQAILASVWKTAVEQAILASGVGFGALITVGSYNKRSNNLVKDSFILVFTHALISVLQVATDSFILVFTHALISVLQVATVVALVGHVSAKSGLSPDQLIDQGENQFYQLENQFYQLLVFLGFLPHAKILSGLFLFLCAFVLLNVFVLLALSILALSILATLEDAFGEKWSRCCPRFSLCCPRFSLALFVCLFCASSSLFFATQAGAFGYAGAFGYELASGFLNYVTVLAILAFELFAVGWVYCAHSLAMDLRTMLSSVFWWCVGYLLLSLSYCLCFAPIAISVLNVLGYSFAKYSPQLRSFAPIAISVLNVLGYSFAKYSPQLRSWEWSEWCGVAVALFPLLPIPFCALLAIFRACARGGRSLCRVFPIFNHRVTSHHGLPRSSPFPPLLRRPPGYVLLPQAPLVSQNYLQ

SEQ ID NO: 138888 - protein, 67 aa, Heterodera glycines
MGWKKEEDERTDGWKRGRESEEKHGLMGRRESTKKREEKGKGEKEEGGKEKREEGKEREEGEEEEKH

SEQ ID NO: 138889 - protein, 111 aa, Heterodera glycines
MFEIILSLFIYWSLLFFQQIPDENIDYPDQLDLRFTKTGQLRIPTTKDQDNCGCCWAISSTTVFSTAVFDARIGQKDRLLNFSEQYLVDCISEKKKHLSGCQGVPIADSFE

SEQ ID NO: 138890 - protein, 85 aa, Heterodera glycines
FLSKKIFFWVFGAVPPNRCAQIYGETESFRNSFPIACTLILRWIFAPHNCLSTPNGHLKKSIFLFSGRPPEPMRPDLWGDRILRE

SEQ ID NO: 138891 - protein, 71 aa, Heterodera glycines
  unsure (1)..(71): unsure at all Xaa locations
PGLKCPAQAKNFFYFREKIEIFPKKIPVDRARKTMFWKWSPFLWEIRXKFLNSKTRKXFLGLARKILKIFE

SEQ ID NO: 138892 - protein, 44 aa, Heterodera glycines
NIEAQDGRFAPVFKFVGLGRALRARYSNFVGLTEIRRDTTVIKR

SEQ ID NO: 138893 - protein, 75 aa, Heterodera glycines
MIGRAVRNRPFIFEGIFKFILYPRKMAISFFEKFYTSQKRLRMRRRAVHNRHFISQRIFIFRGYPRKMAISFFDK

SEQ ID NO: 138894 - protein, 35 aa, Heterodera glycines
MIGRAGAIDLLFLREFLNLYSIPEKCLSLFLRNFI

SEQ ID NO: 138895 - protein, 91 aa, Heterodera glycines
SNAFMVVVPTADKIKRLRLIRANATGPPPLSVYMLSFDSLSQMSFRRNLPKTMAFLENEMKSVVFNGYNIVGDGTPQAFIPILTAQTEEEL

SEQ ID NO: 138896 - protein, 69 aa, Heterodera glycines
  unsure (1)..(69): unsure at all Xaa locations
SNQATVFLPGYNIVGDGTPQAFIPILTAQTEEELPLTRKRYRSASXVDEXYPFAWRIFPAPLCHMYGET

SEQ ID NO: 138897 - protein, 179 aa, Heterodera glycines
ISITGTQSTNIPITGTAFQSPGLNPPAFQSLGLNSPAFQSLALKPPAFQSLGLNPPAFQLLGLNSPAFQSLALNPPTFQSLGLNPPAFQSLGLNSPAFQSLALNPPAFQSLGLNPPAFQSLGLNPPAFQSLGLNSPAFQSLALNPPAFQSLGLNSPAFQSLALNPPTFQSLGLNPPAFQ

SEQ ID NO: 138898 - protein, 41 aa, Heterodera glycines
MQCDTGEANTQVLKIIRELKFAVHKSVMYGLKTWDFTGYGH

SEQ ID NO: 138899 - protein, 31 aa, Heterodera glycines
MFGQSLSNSTQEARPEEMPLELSNNIKKIQM

SEQ ID NO: 138900 - protein, 155 aa, Heterodera glycines
MGVSGSSLSAYVQVAVHRFKTDAAFARSAKMVTSLAFMPLADLTPAWAALEDHLPNELESVLDWFIINYVGRLLNNDTRTRPLFRPEEWSVYERTMNSTDRTNNFAEAYHRTLQLAIGQGHPPIWKFINILREHQKIIDVDFEHFLAGNAPADEI

SEQ ID NO: 138901 - protein, 48 aa, Heterodera glycines
RDGVGPLYTKTELARRSWPDGVGSDGVGPKTELARRSWPQDGVGETEF

SEQ ID NO: 138902 - protein, 119 aa, Heterodera glycines
NTFYNIYKWVGKKYSNKIVKILHKNGVFLFISRYFPLFASRPPLLLLPAVRLSCYCQPSASLVIASRPPLLLLPAVRLSCYCQPSASSCYCQPSASLVIASRPPLLLLPAAHFSCYCRP

SEQ ID NO: 138903 - protein, 134 aa, Heterodera glycines
MKTLFLFSLLFFSSYENPIRKQRAVRNERAIAGLAQLAASLVAVKAFIAANAALTASTAVALAALGTDIYLAIELVRSSDHYEELLKDFFPLTFVLDDYEFTVSAKDYTPDYIFRKISQHFGHKTEEICINSMF

SEQ ID NO: 138904 - protein, 85 aa, Heterodera glycines
NTFYNIYKWVGKKYSNKIVKILHKNGVFLFISRYFPLFASRPPLLLLPAVRLSCYCQPSASLVIASRPPLLLLPAAHFSCYCRPP

SEQ ID NO: 138905 - protein, 46 aa, Heterodera glycines
MCRGITNAHRPFFVAFVCPFIWAFGPFCRGFTSVRLNAYHLWANYF

SEQ ID NO: 138906 - protein, 16 aa, Heterodera glycines
EATPEGFGLPINLGAS

SEQ ID NO: 138907 - protein, 645 aa, Heterodera glycines
GKSSHECAILCRSWFGAQCKLRRCSQHNPCINGAECEKTKESFKCHCAVGSGFTGTYCENAVPTICERDDPCMHGTCRVGTTVDDFVCDCQYGYTGKICADINFCQSSTEVCLNGCMNDQNGSHCQCQTGWTGQRCQEDIDECQLSKLCQNGGKCVNTIGGFYCECPSDFVGYLCIGGFYCECPSDFVGYLCEVPHRPTDPCLANHFPCLNGAQCHENIDWHWECECLPGFDGDWHWECECLPGFDGKHCERAIDECDKHCERAIDECDMGMMTCLNGGKCAHAGPKTRVMGMALWWTGDFCEQDINECELGATLCKNGGTCVNRHGSYMCICVGGFAGKFCETNIDDCVDNLCYAKFCETNIDDCVDNLCYAGSTCVDGIARYDCRCAPDRIGALCEFQNICNIHENLCEHGHGALCEFQNICNIHENLCEHGHCFTNPFNGSYTCLCDEGWKSQNCSQNCTEDVDECSDEMTRCFNGKCVNLVGSYKCECEFGYTGDICASWISYCDDEQPCQNGGICHDQLSHYECRCKFGLVLIYCSEKPDPCEFKPCPERTICTPTTIHFECICPKNFSGTLCENMLIERHCENGCRNGGKCGKTKGSWGCKCLMGFEGEQCEIFSWGCKCLMGFEGEQCEIFRNPCSKS

SEQ ID NO: 138908 - protein, 189 aa, Heterodera glycines
TAVPVDKFNRTDLMDKENCKKAGCEAKYGNHRCDSECNLFACQFDGGDCSTKQAQPFGKCPQASYCAHVFADGKCDEPKLFEWRSDKGIGKRIELSPEVNATALFNVRYDEKEEEAGKRSKRKAEEKDVVEGIALFLQVDVTMCNMITPGSLAQSTQLVGVHKLCFSDLENVAAYLGAANAKQTISSAN

SEQ ID NO: 138909 - protein, 150 aa, Heterodera glycines; identical to SEQ ID NO: 134527

SEQ ID NO: 138910 - protein, 57 aa, Heterodera glycines
MFESEFGGYHFTLETGAGRDPARDFGERQKEGLTFVKDSILCTVLSQNFGRASRSHV

SEQ ID NO: 138911 - protein, 92 aa, Heterodera glycines
MRKFLEALQLHTKLMKEALDRDVKQKRGEGGGDLAKSNEVMEKRNGKKGILNGTLFKVKHAKAEADRRAKLDTEKEGTARDAIKELEKVGVE

SEQ ID NO: 138912 - protein, 116 aa, Heterodera glycines
MQNALRVKLAELQNSRRTKEEEKEQQKEEPPQKLDFSLFDDSEFANRSWVELIEEEEAAARKTHKAKAATAETTAASAAPPIASVAAVASSSASPSNKRCNSERAEKGENVPKAQK

SEQ ID NO: 138913 - protein, 66 aa, Heterodera glycines
MLERVNDGEEPLNGQRNDGEIAHVNCRVPSETDGEAKGETDGVKIDKHSHEHAEKDQRIGGQQHQN

SEQ ID NO: 138914 - protein, 130 aa, Heterodera glycines
MCASLFCMNYCWQTSLNYCLCRCFRFDWFHLETLFGIFRLHIFCRHCGGPWPYCCPFSKPFATKFFPKHRASIVMLEKNILTFVRLEEFEKVFEVVHEIEKDVNERDDGQQNIGGTHFAGARLALKFCCN

SEQ ID NO: 138915 - protein, 21 aa, Heterodera glycines
MSATIIRVPKIACDLSLAKNG

SEQ ID NO: 138916 - protein, 104 aa, Heterodera glycines
MIVGTKRHFKKFFLEEEGREGRPFNQNLTPGSVIQEKGTGKPVEYAMLEDEIGISMDELQGVIMALSYSHQIVNVAVSMPEPVYQAHELAKRGKNNFVTLKYGH

SEQ ID NO: 138917 - protein, 48 aa, Heterodera glycines; identical to SEQ ID NO: 136255

SEQ ID NO: 138918 - protein, 32 aa, Heterodera glycines
MVYVGIFSQLMRLAHQQQRPAENLSNLVAKAV

SEQ ID NO: 138919 - protein, 62 aa, Heterodera glycines
MCCCVRIPISKAIEAFLGTMRECAQMARDSARACAIFSQWSREFGDQLQLQPNWEVKRENLN

SEQ ID NO: 138920 - protein, 69 aa, Heterodera glycines
MTRRRFWPRVKMETKKFWPSFWKRKSPGFDPWPAGRALTMTASLICGVCSLLRKATLPVATNKAKTHSQ

SEQ ID NO: 138921 - protein, 21 aa, Heterodera glycines
  unsure (1)..(21): unsure at all Xaa locations
EFRKYYHAXVVQLLLENGADP

SEQ ID NO: 138922 - protein, 182 aa, Heterodera glycines
MPTVREILESLQKRVKKPRIATNEDSVLNVERTDAEQQIEGTSTRNNLDVASSDDEENCEPVQFKRGETIRGALCLWYQGFRFIKNRKDGSWFRCEQRNCPATAKLDDNDLMTGILGAKGHHHGCAPSRYDAETKRNQMKRLIKEEPKTKPCQIRAQIRTDIDDEVFELLGTNEALDQMANR

SEQ ID NO: 138923 - protein, 61 aa, Heterodera glycines
MKILRSFKISKEPKICLEGIFFERKLIDVEGAPHLLIGGKDKQFPCHEMPNKIRFCFLQIE

SEQ ID NO: 138924 - protein, 92 aa, Heterodera glycines
GMRDSATSSSSACSASSTLRRPFDHPTNLFLCQQALNSSNNLTLNGMPTTNNELLFPSATTPLLHQYGTTAQLGTAQFGISAQLGTAQFGIS

SEQ ID NO: 138925 - protein, 56 aa, Heterodera glycines
FAGGRNGHDGGSNGWGKRNFGAQPHRRTERREERDHQTLTAYVVADVVKALGPVKW

SEQ ID NO: 138926 - protein, 67 aa, Heterodera glycines
MFEAANDKEAYYHMLAEKIYKIQKELQTEKNSFKKPSNFILDPTFKMTVRVAFMGCSYFCRKRKTGG

SEQ ID NO: 138927 - protein, 113 aa, Heterodera glycines
MHGSSPLTEANLCMKFESSFSWKDWVRLRDTWNAVVTSQSQIHRHSEQLDKIVSEESSYRNYASDIQNRQIMIQIVERNVNKARELVRTARYQLNAFNSALSQSEKPIYVQRN

SEQ ID NO: 138928 - protein, 164 aa, Heterodera glycines
MNDQNGPTNIENFVQRLFVEESNQIFDENLEMKDEKSEEMSTNCDQLEQMTENSGQIYDQIPILNDKQKREIVEKFHKIKEKIKQMGKKYSTKEWNKIERKIATKLGANQMKIYKWKREFGMMKNKNYSVEEKRIMLKQFDQIYGKLKTKLNEKLEGKGTKCQK

SEQ ID NO: 138929 - protein, 195 aa, Heterodera glycines
MAKTMDELQRRTVKVNTLMTPTKEQQQKQSEQKHQKGGEAAENWAKQNDAGQNAKGNAKDGEGTIGGELSMRDKEIQAQFKFYERLIYELNMDERRMADQCTRLGKTHAEYAQFGLKPHFLDIYQQSLIALISKMEFADDNERAETINAFGRLIRFIVEAMIEGYGQRVTELRTERRGSGETTEEKGQIGRRIEK

SEQ ID NO: 138930 - protein, 108 aa, Heterodera glycines
MTAIVGGEPKPNVKWLLNEQEMDAVDKNVQVFFMKIQMMALKRYLKGECLVSGDNLRVKYDAVSGKTSIRLFHPNTDDSGEVKVIAQNVHGQAEASAKLKAIEKTKLE

SEQ ID NO: 138931 - protein, 128 aa, Heterodera glycines
MTKWLFTPCPNGVPKWLQCFVNSPVGQWSSMMEQIKAAFSNASSVTFRIHFLLSSPIDSVVPFVDRINEVTGEELALQQSNGFWLTRCPIGWDNRNWDNVWEELSARQNPIDIVINRDRISGFVLSIL

SEQ ID NO: 138932 - protein, 98 aa, Heterodera glycines
MEEWKQKKKAFKDIKRKIKNDIFDKTEKGAEFSFGNHIFNAVERKNGIVGKLLYDWEKKKLYEWDRNQMSIWVAKQYKNPDPPEHSELQTAYYCICMV

SEQ ID NO: 138933 - protein, 78 aa, Heterodera glycines
  unsure (1)..(78): unsure at all Xaa locations
KAFGVKDPYXXGHPNXCTSEKENEWEESDEERVARHAKEREEEEERERKEEQKRKEEEAERLRQEQLQQQQNQEQQPQ

SEQ ID NO: 138934 - protein, 218 aa, Heterodera glycines
MGRTLAPFAGHDHGISVFGFGDSTTGDWTVFSLNEEKDCENLEEVLSVYNRMTPNIDLSGPTNFAPLIYRAMEICQQRRDYHILVIIADGQVTNEKATVKAIVSACQFPLSIIVVGIFDESLPKRPWDNFHFVELHELINQRADQPIESRELAFAVHSLLEIPDQYATIRKMGLLSSTAFFTRPPSHSPRRSKSPKAAQKINGTTADDEGAQEKETNC

SEQ ID NO: 138935 - protein, 102 aa, Heterodera glycines
MVFNRKERLQISKKIVNLEKRKQRERQTIEEYEERKSNTNKEEEEHVEEEEQQHEKQQSDSNGVAMECQSEKEGWYSLTVALPGTILDNVQTSELKTYLSGE

SEQ ID NO: 138936 - protein, 104 aa, Heterodera glycines
MEGASTVDACHILRIILYQICLLVLDGDDHFAGASVGQSENGESHLNSKKVNGGNRFQIQEWDMVKGLMARVLLYRIRWQVDIECQRAKMPKKTNKSGIILHST

SEQ ID NO: 138937 - protein, 114 aa, Heterodera glycines
MQKNVRFVGDSPLQSKAIIQLDGNIPMISKFVKMDPGTKSMAKFSSCKIWIKELIPQRNRPSSRPLILSNLFADFSILALITSKMISHSPRRCGPSSNRSKVLLCKLCICQKVR

SEQ ID NO: 138938 - protein, 15 aa, Heterodera glycines
TFDHLYSDQIVNMVK

SEQ ID NO: 138939 - protein, 132 aa, Heterodera glycines
MPSRAFQRQVLVEWRNKSNTIRGKVTKAQLDERRRFHAQCVENRQRDGQDWIVYAGSVILREEIHIFRRQMIDTDSHDLNFSKKDLVWKEGKPFSLSNFGEIFCDFFNRFSYVNATHGPSRRNSWLDSFTSK

SEQ ID NO: 138940 - protein, 228 aa, Heterodera glycines
MIEPRTSLIKFAAELFNTKAEFVQCIVLTRADKREKLIMELRKADFNGVKIWSKMDTKPKVNLNENWWEFVLDMPFEAEFGGTNSVVELNKQINDDFRPNLSKFGPGLVLNRKFYPISGIMLEGVLDIYDKYREFWWKIEKENTQIQNSKSCQKGATKIMNANEEKEKTIEFFMETDEDSVDFEAESEFFQEEKEQNSAKRADGRLKLTVKANSNQNRVLTIKGVNAK

SEQ ID NO: 138941 - protein, 32 aa, Heterodera glycines
LHFQLLSLTNCCTFPNFISSLVSSIGAQCALF

SEQ ID NO: 138942 - protein, 106 aa, Heterodera glycines
MVKNPILSNSFVTAVTLGGLKFFFIICANGFGRFRSERLRSRRAWRPSRGSVVGCDLPIRALLLPRFSPSPALVVLCRAVVRQQWPIGRPIGGWLGPNRRFRNLFR

SEQ ID NO: 138943 - protein, 125 aa, Heterodera glycines
MKCHWLSLAPLLYWHFQRKDCTACKCEAISHGRRSNKNQIAHANEESGQRNKISVQIWDTSEKETHTIHAMELCAQFWHGHKSLFACKHFACPLLAECQFIADSLIRGNSHKNEIYANTNVCIKM

SEQ ID NO: 138944 - protein, 92 aa, Heterodera glycines
MSKPIRMRINPSWRNLRERLTQIRPVVEAQEITPEEIELLRKSLVKLKRSVNFIDERIEEWRNYMANVQAAQRAEEEGLFDNLTNNGRHITE

SEQ ID NO: 138945 - protein, 85 aa, Heterodera glycines
  unsure (1)..(85): unsure at all Xaa locations
PDSPKYDSPILAGSSGSPKKGKSPHADPKKAASHLVPVTPGKVXXASLKMVKKLCGTMMPTMNKPKAVVVDVEKKLWYHHAIIVV

SEQ ID NO: 138946 - protein, 130 aa, Heterodera glycines
NNLLKKDSEAALSGEIVGDERETENIVRTLITIIDSFEENEFFAQGLYRLSGSLTTQQNALNIIENAKGRELKLYFIYELNATDKASCIKTLLRKMPDTLFPHCQRVALLDLSGFVFVAFGLGAMLFLLN

SEQ ID NO: 138947 - protein, 128 aa, Heterodera glycines
IWYIIMSNLQNSPAYCVLVNDQRDGVLREIIDHLGLLESGGLGAQQKKIGSETLPCHTLHLDTKYYTCDVPLLSCHSFVRFKSICAAERRSNLSVFAVLFCVTRQQLTDDFLATVSKYSASLEKAEMK

SEQ ID NO: 138948 - protein, 99 aa, Heterodera glycines
MPIESFELVNERTKEKLTLKQNIDEFDVNVCNWLLQRCPIGETATAPAIKWGDSLNPSANLNHIRFVLWSFDKSIGPLSPLAEEDKEEDKADQSNKNVV

SEQ ID NO: 138949 - protein, 91 aa, Heterodera glycines
MSTENKSSDKTESNGPKVLRILEIVKNAQQKHGLRHENYQRYRAIGYTKLVRFVQLMKRVIASGRHPVGRRSFVPHRPCFMMAALRTKKET

SEQ ID NO: 138950 - protein, 52 aa, Heterodera glycines
MKFWLSPASVILGSLAIWSGAFFFPIRPKWSKSPPISLDLVPITGFWSVLAI

SEQ ID NO: 138951 - protein, 253 aa, Heterodera glycines
MPTMEMEVKAAAIKSTKKGKLLQLFSSTESDKRALLLSAESETELQFWLFSIERALAWNNREMMLAPEEDNLSLNSSGRDNSFPPCLSSLNDSESLASEDSGGSREFSTAFWRSRNAAAKALQPPIVERRNIFSLFWDMEPLPEGEGEKSTLGEQLSETEQCNVERISPIPSSSATTTSLVLRPNFGGKRTTSHEPSSFDEETKGQLAVREDSQCLEPSKSEFAGEKPAILFTAQLRQLDIRIRMAGKEHAEQ

SEQ ID NO: 138952 - protein, 930 aa, Heterodera glycines
IEPFFARLFLFDSSLGVRVSEEFHVAFRHFTTICFNKMDMPTLLNANSAPSSSFALNGVLATEKQLICSIHNPRADLFLVVLVERILSGVSRHLHEGNATDNKYSSKIQKSLSASIPKLGHLRTLFAWTARQFIINCDGSKKSSLATCSLYKCDSGRLTDGDLQKLLIEMQKADKLAKLVVFPSASLVLETDVTSVLCEFPMRISPSFLPLRPWKCIPTSPDFPMRISPSFLPLRPWKCIPTSPDTVAVLTFSMLLSFSELFMWNNHLKVYPLSLNYSTQKTFSRARNISCTVHYVPSSRSRKGPLPCHSHPNGPFVDSFVCGVQYHEQSPQFNAEVKMDLPVALGEDDHILFTFHHVSISNAITNKNKPFTEVETPVGYAWLPTPVGYAWLPMVKTDSHKSQEFELPVTANLSSKYYEFKPLSMVKTDSHKSQEFELPVTANLSSKYYEFKPLSSSVSPNFDLKFVEYGRPLFRVRVSPNFDLKFVEYGRPLFRVRLRLVSSVFTTDERLQNFFQLCHLIYPNITQSNRNPLTQLPKLSSIDLDQLIPFLAVIFDRLFNLLTFSKAEDVMLSSLNAIIYLADQLFMHRKSKRELLRNLNAIIYLADQLFMHRKSKRELLRNYVLLFFKAKVRNANAMPTVKNRPMAQFANALSSKDSSKDGTISITKLLRQLWFLLDCAAKSMAHWLIIHNLLKVPRRNRFPTDLYFSLEELFHTITERIIFMQRECPRESRMANNALGNFLKHCLSLMDRYQIMKELHCLSLMDRYQIMKELYTVVKKMDTIETRSFRVYKFELLQISFRVYKFELLQILAGHEHWLPLCLPLLTDKFGIILRGDSFRHFYLSKTYCSVHFPIGLLLQELSTSLRDSRDYRRKVIQLLRNLLAKHSQDERYGDTSARNRIAILTSARNRIAILTMPLLRIAIENIKEI

SEQ ID NO: 138953 - protein, 413 aa, Heterodera glycines
MVEALNKAKANPFSNGYVWTNGTINANNTGKSNNEQQQRSSDKFNRAKREHSLRVNEVRDLMLCVLYTLNILPKKILAAFWNVQEAIQPTKTMPSCDDSVTELPKQPQQNVLVDFVRILELSLLLFRYRGRTHHLMLQAKRNKATNPNKTPELLLKFDGSNSYVMSSKFSTLTDINFGAKFPSDFSSMSAPDGSKNSSLTERLGRPGAQIAPVLARLLSEKAVFLNSFRFERGLSALESLIGCGSATKSGAKGAASSALVLTSLFDKAVLIQLADLHIQLANSFRGSAALRAEFFDALAAQHIAGAWYSEAAVCQAHSLVIIGKELQSRGLFRPDWTLLSVLSERITATEGVNESGLMSSTQQGGFTLEEFTRKVEALVRVLLLSERYEAVGPICRLAIPIFEQNNDFKVQRH

SEQ ID NO: 138954 - protein, 87 aa, Heterodera glycines
MPTKGGREKEQRVASMNNGRASERPMDELKEDNDPMGYNLHTNISTFIQEERLVNAGLLAYAETFTASAQRHRYGKDGICRLATALK

SEQ ID NO: 138955 - protein, 132 aa, Heterodera glycines
LLKSVFVHDQKCHSGPSGQPVQPGQPGQGGGAPPPGPPGPGGPPGPPGPPGGDGQPGGDGQAGTSGGDGKYCPCPCPNRGSSGGGVPSESGGGGGGGGTSGGYGPGGGPSGGSAAAEVPPSGGGATESGGAS

SEQ ID NO: 138956 - protein, 259 aa, Heterodera glycines
MNILLFEDINNMYDEIIEDLGEFKVLANDAWSQMQAVQVQMVGGKAQAAAFGRDFAEMIRERRSYAAGGSGGGGGGGSGYASGGSSGGGGGSGYASGGGGAKKGGGGGGGGGYARAGTSGGGATACPAGPPGPPGQPGAAGPPGSPGQPGGPGENGGPGTPCPAGGSCPACPGGPPGPAGPPGGSGPPGSDGEPGQNGNGGGGGQPGPPGPPGDSGPPGPPGGSGPPGPPGNPGTCTGGGGGAVSGGSGGQVGYGGGRL

SEQ ID NO: 138957 - protein, 183 aa, Heterodera glycines
MSSKLSSKWVVFGSCLLFFASGCVLYVLVMTRHFVDDEIEMADEGQKVDEGTAKWELPNESKQNGNLVGGDEQQKDQQKEKQQSKVLLLEQSMPNGNSRLCLIGGRFFLQNAFVLGSFKPGPARSLRKESGRTDESDDGHHFALPTPKGGVGGARSMKGEKEEFGRMKKRRVWKDEEEKSLEG

SEQ ID NO: 138958 - protein, 151 aa, Heterodera glycines
MESAFCKKKCASADKQKPSQYGKAYPKLQMLKVPNIWRHEKCARKRAKLSEEDGLSLSEDKLCTVEEKSRDTCLLQQGLEKPLMQAKEAKMANGGHLIVKEFTNVTFHKNAIEKFVNGNLNEENPTTEETKKEKVKEDEEDEAEEMWGDCQ

SEQ ID NO: 138959 - protein, 132 aa, Heterodera glycines
MVGWMTFITTKNPSDPFALFAFYCQEISKIGRNLGLILSIVMAHKKQIFVWPKSETFPFFCLSFALAWPLNSPKLIGVATHMPIPTADGTAKGKPGSAHPQVLALLAVTETEMPTEEGHRRQQIDKGKVIKE

SEQ ID NO: 138960 - protein, 176 aa, Heterodera glycines
MAILEPRPVWFVYSGMGSQWVGMGRQLMRIPLFDQSLRESSQTLAEFGEDVYGMLTNAEPKQYENNTLNCMLAITSIQIALTDLLFALGVTPDGIVGHSTGEMGCGYADGALTRAQTMMLAYYRGKTIMAHKERMRGAMAAVGLSWEEAVKRCPDGVVAACHNGADSVTVSGDTEK

SEQ ID NO: 138961 - protein, 87 aa, Heterodera glycines
APRRRNRPPEELRHRNRQRHLLEERRRWAPCRRNRPPEEPRRRSQPLGEPCRRNRQLEEPRPRRPEQPPDGIRTRRSTTRFNDIYRQ

SEQ ID NO: 138962 - protein, 160 aa, Heterodera glycines
MDADIIELTGRDNDEHFLPHHAVINPKKLRIVIDASAHAKGTPSLNDCLHRGPVLLPDLCGILIRFRSATMPVLADVQGAFHAIEVEPDDRRFCKMLWLKDPSRPVSGDNLLIYRYKRLVFGATCSPFILAAVLLHHFDRHAHPFAKELAANMYVDNLLI

SEQ ID NO: 138963 - protein, 102 aa, Heterodera glycines
MTAADHPQLFSTELVALKRMTALPAKRQTASSRTTTSDGTQRKRGRRERGPKHYTSIAFFGLIVYGILIISYCLIYFLINFPFYITFLPFRRCIICECVTVN

SEQ ID NO: 138964 - protein, 111 aa, Heterodera glycines
MLRAIGISNSSAADCANVAYISSLIGTRAAHLCACGLAAILNRMQRPRVTIGVDGSVFRFHPTFKFNLDQKIKALLAVKCEFFMVLSEDGSGRGAAVAAAVALRMNRLVGA

SEQ ID NO: 138965 - protein, 72 aa, Heterodera glycines
TDDSLRAPMRRSSSLYDFFVSQQPPVHSLAKKNNEAKYYARNWELFPRSFVSSSSHMICRPKGKEKYHILPN

SEQ ID NO: 138966 - protein, 36 aa, Heterodera glycines
VVPVLRWHWFEFIPCFLDLAHQELSNDTKFVRIWAF

SEQ ID NO: 138967 - protein, 52 aa, Heterodera glycines
YPLYRAILTTHPKCVFPSTFNCRYIWQIRRNRQTKKMKEILQGIFPNRAKTV

SEQ ID NO: 138968 - protein, 83 aa, Heterodera glycines
TFYFEGIFKFILYPRKMAISFFEKFYTSQKRLRMRRRAVHNRHFISQRIFIFRGYPRKMAISFFDKFYTHTNALEHDREGGAQ

SEQ ID NO: 138969 - protein, 160 aa, Heterodera glycines
CIQFFNGDICITFLHPPVDDPHSGEMPSERWNPTQSVRTVLLSVISLLNEPNTSSPANVDASVMYRKYKVSDHGDQESDHGDQEYATIIRKQVEKSKEEAKKDGIKVPETIDEYVVKAKPRVQGNESNDVILDEDYYDYEDDDTGEGDSHEDAEYGGEEE

SEQ ID NO: 138970 - protein, 29 aa, Heterodera glycines
MAFFKQKGDDDNPPAGVHADERLFQTVRP

SEQ ID NO: 138971 - protein, 197 aa, Heterodera glycines
MNLDNKLFRRLRQFVPSILNDCPLLRVVSFSESNLFTEFPADDSATASDGQAMAKWLFTPLPTNVPKVLRCPLNKDYVNLASTIEAFKSAFASASSPVNFIVVLWFPKSFAASVMLFDLANELTHEQLALKRTVFNTRFLLIRCPIVRDANKWAKWEEEAANWLIYYQWNRIDIEINDEKNIGDGLLGATPGPSDQQ

SEQ ID NO: 138972 - protein, 140 aa, Heterodera glycines
MAIVRQKDKRRNSGDQLASLVSAASCETVPCRKPIPISRSANSVRPKNAGGAASSRLLLLSFALSLFLTLADARKNNHHYKGQRTAQRQQQQQQQHQQQHNKQQQQIDSEFSIEDVDEEQIDEILRDTAKNLVVFFCKRE

SEQ ID NO: 138973 - protein, 181 aa, Heterodera glycines
MGGGGATPFFVPPRENSPQNNAGQPWATPLPGEGPSHPNSPYNQPGQNGYFPPAPNAMPAEPGYPNYYGPSPSNAGSSSGYGAPNSPPPFQQQGDAKNPYNYEPPPPTSPAPTSAYMAATSEVSYTQMSDVTQSSSGYKPPIDTKASPFSKGAVNPNATPVHRADGPSGGAQAPPQYDAPF

SEQ ID NO: 138974 - protein, 50 aa, Heterodera glycines
VELDDEVRTLDDRLLCMRVEMGQKRRKVHLNACINGEWGREALIKHKWRN

SEQ ID NO: 138975 - protein, 75 aa, Heterodera glycines
MPNCVKFDTQRVLELLNFCVRKNSNGIEQFDVFYLHLLLNSEINCIMNTEIGLIKKATANQSLSKWSFIQVVYVF

SEQ ID NO: 138976 - protein, 61 aa, Heterodera glycines
MDEINRKNRDKVISKQTISRSGKAKHSFAIQLTRLTLLKNLDPDPAFVGPETPGPVQIAVF

SEQ ID NO: 138977 - protein, 57 aa, Heterodera glycines
FKNRIFKKKQNKKGPKDSNNRWLVFEPPITFCPFCLNRIMRRLSDSLCLLRLTLWLI

SEQ ID NO: 138978 - protein, 111 aa, Heterodera glycines
MAINGILSEEKTKQIMQEIGTIKQQNDAKLEAIKNVELRKKIQQKNHSEFEAHLINLLFSFAVRLEALINGKNEEGNIVEENGQNSKDKIRAFLAVLKCLTVVKEWRNNEL

SEQ ID NO: 138979 - protein, 18 aa, Heterodera glycines
MKELIGSYFYGHPKNAFQ

SEQ ID NO: 138980 - protein, 240 aa, Heterodera glycines
MSPGSPAQHSPVRYRKLTTAGELARPMFTEAAPNTGAARRFIVAAALKKVSGRAFASNAAASSAESAAISTGGITSAPISKMAQSKSMQSLAALHQRPIQLSAHELLPDLAESANEEWGSGRATIASSQASNVGRQQGCIFRTFVKMPIEIWTKVSNTENIEKQQVAMVSSGAETASTAANGTGDEDRVNLEPTEEKVDDIMGWWEDEGSEDNERGGGEEEKNNGMMKMSDGGGRSLDEM

SEQ ID NO: 138981 - protein, 307 aa, Heterodera glycines
SFISGRNSTLKMLMLTVVMSMLRSFFIIMASMLRSFFIIMAMVLLVLFYAYTGVILFGMVKYGQAVSKHVNFRSGFEALVVHVNFRSGFEALVVLFRSVTGEDWNDIMHDTSRSAPFCYWLPGANYWQTDCGNYYGALIYFCSFYLIITYIVRNLLVAIIIENFSLFYSSEEDALLSYADIRNFQQVWNIVDVEQKGQIPIGRVKFLLRLLRGRLEVDPNKDRLLFKHMCYEMEKLHGGDDVSFHDVLYMLSYRSVDIRKSLQLEELLQREELEYIIEEEVAKQTIKTWLEIKTWLEFCLRRLRSPG

SEQ ID NO: 138982 - protein, 105 aa, Heterodera glycines
MPYSNALADNHLLEVADVRITEQCVLFRRVKQREVFDDNCHQQVAHNVRDDQVEGAESGPETELLKQFKKISAKIFMGGNKSLAGGTLFSTTSALLPLCFLTHSN

SEQ ID NO: 138983 - protein, 132 aa, Heterodera glycines
MANQPFYCFLRDIIENDDHPIWPILARQIWPIFATNIHILDCADDNHLDILAYQISPTILTDVDQLNVIAFDIMFLDGIDDEISTGQLLSEWLHIPRKNGKPKKLYCGKGFNVERHLDWINSFKEVRLVTFS

SEQ ID NO: 138984 - protein, 176 aa, Heterodera glycines
GAVPPNRCAQIYGETESFRNSFPIACTLILRWIFAPHNCLSTPNGHLKKSIYFCFRAVPLNRCAQIYGETESFGNSFPIACTLILRWIFAPHNCLSTPNGHLKKSIFFVFGAVPPNRCAQIYGETESFGSSFPIACTLILRWIFAPHNCLSTPNGHLKKSIFLFSGQSPRTDAPRF

SEQ ID NO: 138985 - protein, 341 aa, Heterodera glycines
MYNQGGRTFRAICEWRRACRQCGAITYANYPHKCPAQIGQTEWVRCARCSGPHQSGDPCFIQPLKDEPMRRRRRRRGQQQQQQQNNNNDDEDDDDDNDGNEEGDDDHGHDADNEEEEEVGTNRSVRLCFFDAETSQDLPLQLRTKVVQKHVPMLIIAEIICEACINEGISVHSGVGQYANGCVCGPPAGPRGRRWCSPPFLNAPGDDNALSANVHYNPRRLFFHSFDDATNNDPVDDFINFLTGSGPHGVKTICLSHNGGKYDIHLILEALHRRNLPPKRICTTGLKIFSMTLKGNHQRHVIFRDSLNYFFCELDALPRTFGLNAESATAKPFLSLSVHPA

SEQ ID NO: 138986 - protein, 101 aa, Heterodera glycines
MARLLLLVFGLAFVFAVLAFGTAQPPPPFQGSGQFGAPPFGGNSADVSVSASDSSECSGEGGNGVQGGGEYGNGNGGFGGGGAEGGQGMDIDVDVEQSSEK

SEQ ID NO: 138987 - protein, 571 aa, Heterodera glycines
MESGVKENPILTAKDRPVNEISRVPLTKRWPSPEEMELNKTVAPKGPSKKNVIQTRRLKEERCAVRTTARQDVGQMQNETVLALIETENWVPNFKKKGRVNHHDAVFLVDTGAHITLCSVQTARKLGIKLLHNSEIPGVVGIDGKIVPIMGQTEILIELMGHEVKSIISVVDRNIGKGSYDIILGRNTFQKLSFLLDLQSGKLMEKTKKVMVAEEKETKTQILEEMLKEVGTKNEDEIDRLRECLKENCKAFSENDYDLGTCKIIAPTLLTSTEMPERVRPYPIPEKYESELKAHIGKMLEVGVIKESTTPWVHNIVLVKKANGQLRPCADFRPLNKVTIADPYPLPRMDKVIFRAAGKRWYSTLDLASGFWQIPLDAESSYKCGLITPWGLYQMLKLPFGLRNAPSIFQRTMDQILKGVPNVMVYIDDILIYSEELDEHIESLRNVFRCLCENGLKLKGQKCRFLQKECVYLGHILSASGYQPSLSNREVIENFPPPTNVKEIKRFLGMVSFFRKFIPNFAQIAYPLNKLTRGGAFEFEWGENEEKAMNLLKNHLLKSPSLRAPNYALPF

SEQ ID NO: 138988 - protein, 151 aa, Heterodera glycines
MVSRSQSPIDQQRNNGSDFDSSLFTLEENEFFQNLLPRLRSFEAAVCSQFRQMENEMRIESERKGEQIRELERMVNEQITVEERSNFDFAERIVKLEDQAEENANTLKGYKQAAKIGLKRIVERIESELKNVKTTIGKLQEKIETVENDFQ

SEQ ID NO: 138989 - protein, 85 aa, Heterodera glycines
HNFKSMATSANHRPIFEFIVELGIRLQADSLTVAFASVYCHRVLRQKAFPGDQICPFTMASACVLVAGKVTNDARINTRDVMNMA

SEQ ID NO: 138990 - protein, 71 aa, Heterodera glycines
MSGCWSAKLGGKKLERARDLFEQCLDKCPPKYAKNIYLLYAKLEEEHGLARHSMDIYNRATGAVEKEEMHL

SEQ ID NO: 138991 - protein, 54 aa, Heterodera glycines
MFDAGGLSPSDWNAVGLSPSDWNAGGLSPSDWNAGGLNHSDWNAGGLSPSDWNA

SEQ ID NO: 138992 - protein, 33 aa, Heterodera glycines
MPCRSARIQLIILIDEVLSLRTKIHEIEKQNGQ

SEQ ID NO: 138993 - protein, 92 aa, Heterodera glycines
SSSKNVELEKKEQQRLAKKLNHTQAMGHHDKPTNISVANNSSKNNVTSRTNVLVTSKNTTDAAAIGNEIEQYATNEPSLSTNKYSRRQKIKQ

SEQ ID NO: 138994 - protein, 132 aa, Heterodera glycines
MERHKQQPVKIGELIKENRGWLCALVRTKSGKKCRKLIRNANTEQLLSLVEICLNLVASRFQLTTRQKKRLMPYVDTVRRISRARSERGAKRVLVQKDAGFGGLYAALLTPVLMEVAKILCEQKRINTSHHC

SEQ ID NO: 138995 - protein, 44 aa, Heterodera glycines; identical to SEQ ID NO: 126591

SEQ ID NO: 138996 - protein, 92 aa, Heterodera glycines; identical to SEQ ID NO: 131128
  unsure (1)..(92): unsure at all Xaa locations

SEQ ID NO: 138997 - protein, 255 aa, Heterodera glycines
EMPFRDRTAEFRTVAKSCQLRQQPNGYRKSEREKIVNSSIQLRQQPNGYRKSEREKIVNSSIQFNQLAKRIGRDLSMTCAKMEKLAQLRIGRDLSMTCAKMEKLAQLAKKKSLFDDRAGEVEELSQIIKQDITGLNKQIANLQQSHRTSIKQDITGLNKQIANLQQSHRTSGGSSVSLRQEQQSQNHSKLVVVGLQSKLANISKNFQNVLEIRTENLKFKRERRNLKFKRERREKFSQSGAIPSNLPPSTRSGPS

SEQ ID NO: 138998 - protein, 106 aa, Heterodera glycines
MIPRILAWKSKVSMGLLSLSRTEHALTECQTRLHQRVPNAFLGTFDLGHSQLAEEKASKQRKDQKRKSRKAITWTKEEWKSLNRRRNGRMEPSQSDFQKDLMMTNN

SEQ ID NO: 138999 - protein, 350 aa, Heterodera glycines
MVRISVSFVVLASFVSTVLTILNAFFLKKQFYPSVVYLSKSSTSMAVLYFQAAVLSYLVFSLLRCLFFGQLRVAEVERAQERVWHTLMETCLAFTVFRDDFSPVFVVQFVVLFFIKAFHWLAEDRVDYMMHTFPLFAIRPFYLTVRAFRKAVNDVILSRRAINAMNNLFPLATAQDWQKAQQNPQQQQQAAASLANGSVGEQPQTLDQERVQPQQSATDGTQQPSQQQAQHFPWSPQQPFFMPFGGLPPPPPFLPFPQPPLFAGLSDAEIAAMEGTERRAVEARIQSLRNISTLLDAALLQFQQYLSVSPGIAPQQTQRDENFAQNLSTSADSATDAETNGRESQRNETE

SEQ ID NO: 139000 - protein, 45 aa, Heterodera glycines
MFKYNTRQFNFYPIIKSNFLCWIFVTFSLFKLVWRFVGVFPLLFC

SEQ ID NO: 139001 - protein, 103 aa, Heterodera glycines
MASATTNCTPTYATSTPTSATTVGTTPSVTTTGTPVLTTTTRPPTNGVLCRCTRKEYRMLTADERTRYKIDYFFCPWLICRVGFCLWLFCHNANWTMSIFLGN

SEQ ID NO: 139002 - protein, 79 aa, Heterodera glycines; identical to SEQ ID NO: 127784

SEQ ID NO: 139003 - protein, 184 aa, Heterodera glycines
FDKEVVLMDHYLIALLIGETEISRMTNKLAADLSVFVHWSDSEPKGAKMDKFWQKKRTIEMHRMYDGLFDVELEVEMTKIALAFEETIKGMKEFLAANRNAGIEKKLAEEWDKMAKKADKETKRRADEMPKRTNWNNLMDATPKWVKELHAAKFKKYADKRLGRETENAFFVHPGESLINELKK

SEQ ID NO: 139004 - protein, 103 aa, Heterodera glycines
EFEKGICDDHQQIGNWDIPKFDKMEAMQIYESIMAQGERGKTINLYCIGMLIERFINMRIFFCKMDSDRLVQSKEKLITLIGEMGLIQLEQMYPEVMNFCGFN

SEQ ID NO: 139005 - protein, 120 aa, Heterodera glycines
EILRNFFVRVALCTSCLLYELPIVRVALCTSCLLYELPIVRVANCTSCLLYELPIVRVALCTSCLCTSCQLYELPIVRVALCTSCPVYELPIVRVALCTSCLLYELPIVRVACVRVAMTP

SEQ ID NO: 139006 - protein, 78 aa, Heterodera glycines
MAKSKSLGKQNDVKTKNDLKHSDANDGDSDDEHVQLLSTSRLGKITDNIINKKHDVQLRPVVDTSRKSRNLQRNNTAG

SEQ ID NO: 139007 - protein, 69 aa, Heterodera glycines
MEKSDQKRDPTTWMDTAREWSGWMANKLGNIYSWSKAETPAAEQSSPNQKTKSLKMVKQNSSPKREEIV

SEQ ID NO: 139008 - protein, 302 aa, Heterodera glycines
NLLKELDDLINLIKNARDNFTHAEVELGVASAFKHKTNDIDCWINDAKFKQFLDGQPIAIDLLPRGDANNMQYILDSLLQRREHFINENLGKGKLENKNDHNLIKRMDSVIRHVNKARKFLKKAEGGSSEKTRAHSYITEKKMNQIFKKILNGENVMPILLPKGGSSCLEGYLDNLIKRRELMRYGGEGLLEGQQQQQNEENSDDNAQKHLQNGDNYYSKPYDKYSNSHGKYGKSKSLPTNGDGKKQAIENENEYSKSRSMPTTGAEYEEKGTKKHTVTSKSSIYPIHPTVTHFIMPISSLS

SEQ ID NO: 139009 - protein, 347 aa, Heterodera glycines
IEEQPHNEDETENDEQSEDGQEESPPESSRKRYQLLLDEKGPQILERLNNLMEAIKRRKTELIRDQENGLMPEDHGKALLQNCEVDDELFNKFLYGTDIEHELLSKGGPNCLHTIYNSLEKRRNKMIEKRPSLVKMKPNVSIKINGSEQDSDLMHIAKNLRPIKTSKNLPNEKTKKVDKPHKKDNSPNRGINSPTKMPKIDHYISPKLVSSPSKKLINSPSKVKIKQTDKLPKWDTWPNNGIISSPKTTVINNVKLPKWNTWPETDSNGPRNAVPNVDNVPKLDNSPKQGINNPLMTRAINSDNVPKLDNSIKQGINSPPKEGTVKNDNAQKLNSSPDKGKNVQIRV

SEQ ID NO: 139010 - protein, 92 aa, Heterodera glycines
SFAVSLYGRDDGFEHKRLRKQAAKTLKQFESDPARTADDQEKMKHMVMANLPSDQEMSMYKDSIGLYADYYAAKSGNFVGIAECQALSIHLN

SEQ ID NO: 139011 - protein, 99 aa, Heterodera glycines
MSDNSQIAIQLQRMAFLLDEKEAGLETIQKLLVAKNEFLEKIAADLLERQKIQHAIESQQNARAQLLNEMANNLLTAASDFQFHLDLHIIGENPPSESP

SEQ ID NO: 139012 - protein, 174 aa, Heterodera glycines
LLFMVAIALSLMLRTYADVWMIQTSTKIEAIQTSTKIEAAIAIISRHKPRFWRSLTEYLLCMPLVSVINSFLKLSLCELKLCFRERLTHHFYAQYLDGFTFYKMTNLDNRIANADQLLTQDVDRFCEGIVELYSNLSKGNANFCLNSFRSEIAIGSRTFGSYLVYTKNWVTPKH

SEQ ID NO: 139013 - protein, 38 aa, Heterodera glycines
MQANGEHNITGPLDVEFKAQTIFPYAPLQELNSSLISR

SEQ ID NO: 139014 - protein, 287 aa, Heterodera glycines
NASAFTSEFFREFCSMLYIDKKYACPHWSQGNASTERTFRTFHNILAKISKTQPDFDEFLDAANFCYNTSVHASTGETPFFLMFGRDPIFCVDQIIDPKVRDPIAISDRNEFKQKLVAIRHAWHAAADEYAKAQRKMKEQYDRKARPQQITIGDRVLIRNYDGRVGTSKKFHLPWRGIFRVIKIDGIYVTVISCTSPNSNPKRLHLNQIKKCFEILGPPCTMPTQPVEEKKCLEKTQNVEEVSSERSVNPKNAESREGENLEEIHAREPETRPEIEADEEKNVNEKT

SEQ ID NO: 139015 - protein, 33 aa, Heterodera glycines; identical to SEQ ID NO: 136332

SEQ ID NO: 139016 - protein, 83 aa, Heterodera glycines
MSSSIGSPDTFFRSETDQEAAAGAEEVGKYEVFSWHGNLSDQLSAELFVTDQQLLKVRPFEWTNDQTAGGEGRPKTEKDLWKI

SEQ ID NO: 139017 - protein, 56 aa, Heterodera glycines
AYFGHFYGILCLFHFLRRIFFQKITIKKILFTYFPTYFEDFCTYFIHIFSIFYYIF

SEQ ID NO: 139018 - protein, 402 aa, Heterodera glycines
MRNKNDSGCRVQMSKNLEVYHGTSERICLVKGKLAATMIVMGAILEKIQEKIDANHMGAILEKIQEKIDANHASDHFDLKGLDRTKEMKFVVPNTSAMKFVVPNTSAGMVIGKNGTSIKEIRDRFSFSANIQIYPKAGSEEAKISAERVITVGHESNEVLLSAVQRVLEKVVADPMHAQPVPAESQASNKGTKTISGHKKGHKKGVSLYMFSPHFVSASGFEFGGSRLSAGSNQFGGISNMGNNSGEQKPNVTFSFGGPSFKYPLSFGGPSFKYPLQGTGNNELLAFLDNLQSTLLLAFLDNLQSTLRSSGFNDQSVSEVMQAMQVLAKYNIMGLGLGLGVAAMAQMRGLGLGLGVAAMAQMRNTESAMAQQNHSEWTHHDRESYPGTATSFYDGHRSLSVP

SEQ ID NO: 139019 - protein, 157 aa, Heterodera glycines
MRRKSIVGEQKDEESAGSSKGSGRKKGRFSNLARKLNIRRKPSIGLHSKRLSPALAPQPTPRALQSKQLEMEMSDRQAQDRQLRSLLIPTPINITCKRHENGEKGNDALDIMWENAIPLMNSVDSYELFLNGKQCDSVKAKARRLRITDLNPAEDIK

SEQ ID NO: 139020 - protein, 49 aa, Heterodera glycines
EKPKERSHSAMDGCDTNRTVSTLVLPPVSPTRTVILSGSSFDTVRLNFS

SEQ ID NO: 139021 - protein, 87 aa, Heterodera glycines
CLSTPNGHLKKSIFLFSGQSPRTDAPRFMGRPNPFGNSFPIACTLILRGIFAPHKCLSTPNGHLKKLFFLFWRSPPRPDAPRFMGET

SEQ ID NO: 139022 - protein, 36 aa, Heterodera glycines
KPKLFGLFKKELKIFKNFIHIPFDRKSIREPYLTFN

SEQ ID NO: 139023 - protein, 30 aa, Heterodera glycines
FFINYLFFAKLIHKYFFRTCSETHKTLIKS

SEQ ID NO: 139024 - protein, 83 aa, Heterodera glycines
VRALDTRKDKSVRQNTLDGLGEAMKEAASKAVGAESTFGAILLKVSQTESKMAAGERQLIQSVTTQTLASLRHLLENELRTVQ

SEQ ID NO: 139025 - protein, 65 aa, Heterodera glycines
MPWHEFVRYFTDICVCQLLTMGTLTECKQPQQKQAQRGVSLRRKQLSMQLSNVTIGLTEKRWREW

SEQ ID NO: 139026 - protein, 129 aa, Heterodera glycines
HHQCFVIDYFIIRNESNNFYRLVKKYFFKLIFCQQIIKERELELQKEHRRQEDNDKLRREFARQANEFHQWLADTRGEMMEASGSLEQQLDTIRRNAQDIKAQRAKLKKVEDLGALLEEHLILDNRYTE

SEQ ID NO: 139027 - protein, 31 aa, Heterodera glycines
MGSKIPTQIKVQAIGKLFPKGFGLPINLGAS

SEQ ID NO: 139028 - protein, 41 aa, Heterodera glycines
MQVPPLLYALALLCNATKFANQNTPNIIRNTLSHLTRRQTE

SEQ ID NO: 139029 - protein, 309 aa, Heterodera glycines
MMMIARDAAYCSKRAGPGTVVPKWATLHKGAVMGNDRSGRDEEGTGAGDAIGGQQFECNSKSRMQFGTTALKSAPICQHLAKRLNYKLGLINSLPNKLESHCAAKCSAIGRQNDRDATADHVTVPSLAKRLWAEFFWLRSLAFRILEIDEEAAQVAKEKKAEQQLHKLQLNINTKNTGEEAAQQQKQRHNAWGAARDTAQTQKTEAAADFYYATDSENMLISSNDQEEDNGIDADRSSSSSATAFDGTFAAGQSAADGLPLFVSVPLVLLYLCFIAFVVSCFDWPDQRTGDDGPPLSFGEAFYFAYGAT

SEQ ID NO: 139030 - protein, 247 aa, Heterodera glycines
MTIGCDFDYAKNAHDAGGGDNNANVDTRQKLSRHKSTSNVWWRTAKSLEAISNNFGMKMSRNLAENEAKNDDIEMQRDENEIGTMAKREYEAKAPTERRIYFKKEIAESAASSSTAAATTNYKQIRRTHSERVSQRRRHAHGGAQLYVINEGESHQQTVAGGERLLRLRRLRRQRSRQNVSPLVQQQQQQHGDSSGTASVAQMESGDERTQRCCDESVASSPSSSRRLQMHAGPQPPMGADNSTNGE

SEQ ID NO: 139031 - protein, 129 aa, Heterodera glycines
MGSFPLLTICSMIGVVLFVVSPIQTQSYGFDQNQQQQGGPPMGMGGNGGMSGGGGMPGGGGMPGGGGMPGGGGMSGGGGMPGGGGMPGGGGMPGGGGMPGGGGMPGGMGGGGGGPGGMPGGMGGDAMPF

SEQ ID NO: 139032 - protein, 106 aa, Heterodera glycines
RFLKTPAIYPNQLNALKHYGTTLLDYLLTNGESNLSQKLVQIDGMPNLVKHFCQFLGYGLMKDADPSENDIKIELPAEWKIFCKKYMEKISRKISGYSEQLKSNCN

SEQ ID NO: 139033 - protein, 34 aa, Heterodera glycines
KIFMKMFNYIAFKFKIQIFLIIFIYESPKHLTLK

SEQ ID NO: 139034 - protein, 16 aa, Heterodera glycines
MAIVHSPPSLRKRFCE

SEQ ID NO: 139035 - protein, 174 aa, Heterodera glycines
MSSTRSRRSGIVDSGGLNPSTIHLLPMARVKKELEARGLDTKGSAADLAFRLQEYVRLAGGFVSKFDPSPASEPTTPLKKRKRKQLDVEVDENVAGFDRQEASSPVAAKTFRHFSWAIAPPTAPHPAKEAKKEEIIESGNEEERDEEEEAEKEQNDQIQIGRKIEETERQQKTK

SEQ ID NO: 139036 - protein, 155 aa, Heterodera glycines
GKITPNRRIRQTFVLAESAEKRHTLVRLLQLEKEQNEQLDRSKKLLSTMVFVNTRNDAEIVCNFLNSRGFSATTINGRRDQPTREKAVWDFRTGEFQIIVTTDVINLDLPCADSAEDAYYKYVQRIGRTGRIQQGMSTTFFDPATDMDLAALLVE

SEQ ID NO: 139037 - protein, 131 aa, Heterodera glycines
MSKTAKRTISKNGTDEEKLKWTWLFSRIKLDDELFLTFIKEQTKFEEICREEGEELWTKIGLLSKRKGKGTYDIGDTVEYLTKQYEGYLGILYLLKEKWQCDGITEKQKREKCEKFQKYVEIIFIINKIIS

SEQ ID NO: 139038 - protein, 25 aa, Heterodera glycines
MVSVGFPNLKLGGFLVRIFDKNSHN

SEQ ID NO: 139039 - protein, 45 aa, Heterodera glycines
MRRFGAGGPRNRFEADAVPMTDAIELNQKNYDRLLRIKLLNKIVY

SEQ ID NO: 139040 - protein, 242 aa, Heterodera glycines
MIKDSSQQQNVKLYIHSGCNCSMFIKSLNPHGPFTMVIVEKQCPSLPIDQAFSVGPTDRPSLPIDQTFSIGHTDRVPISVSFTALTDANINSMAVELLIASDDGNNRQIIRFDIGTDSDLTVHLASGMKNEFISKHTRLAKGSYELKVEIELHPYYYVIIMNGTKMGIKYWPKQWWNEFQWLGVNQIKVGVPFVEKFWASESRKFLGPQNAIPNMRGTKGIFQSVQISTELWAKSLEQFFTF

SEQ ID NO: 139041 - protein, 97 aa, Heterodera glycines
MPIRSGPAELEISVSNKKIKIESHFFYLAFENAVCTEYVTEKFWKALRNLMVPIVLSRKVMEEVGIPNGTFIAVDDFNSVKALADYLKINQREENAL

SEQ ID NO: 139042 - protein, 78 aa, Heterodera glycines
MVPIVLSRKVMEEVGIPNGTFIAVDDFNSVKALADYLKELQRDTDKYMRTKGPTLLNLTDRTGWHAFNVICRKRKCSI

SEQ ID NO: 139043 - protein, 144 aa, Heterodera glycines
MEKPFNRRFGAKPRFFSVGEKVYARHRLSQQWRAGHVTTCKGVMYDVEFVNGSTSRFHANQLIKRETDQMDTDPLDVFNEEFGLPNVAQQPNQRPNVAVLQLNIVDNAEPANDPPPVEQQPFSPIRPRRQYPQRNRRPPDRYSP

SEQ ID NO: 139044 - protein, 286 aa, Heterodera glycines
MCEKHQAWVKKYLAKNANQRKQVNYVRLGGLKINLVNQPKRLIEAPVNVDGNAIEFVMDPGAEITVLNKESHRLVGTRLSSCSEQAFYHDGSQCRLFGKGTATFSIGGRMTKGTFYVSDEGSLNLLGIDMLDALGLMDSFRTNLTDIELDDNSIELCTIATHRGNFEYQRLPFGVKSAPGIFQSIMDSMLAGCNCAIAYLDDVIVVSRSADEHQQHLANVFQRMENFGFRIKPEKCSFFQSQIKYLGFIVDKDGRRPDPAKIQAIAEMPVPTNVSELRSFLGMINH

SEQ ID NO: 139045 - protein, 98 aa, Heterodera glycines
MNRRWICNDVWMDIFPSFDHAQLGLKLALLSPRFNALVDKHFNGKSELTIWRPIEISKDKGPEPKLIVQMDDKYNKFMEFPLPDRPLPSKIRFKRLRI

SEQ ID NO: 139046 - protein, 192 aa, Heterodera glycines
MIDFMRHKKESTTTATTKMEDGGGSRGRAKSKHSTGSTAGGGLSVSAPNNRKKTPNQQQQKGNSEGGGEGRENGGKREEKGGEKGAAAEAEEKEKKVAVEHHQKQQQQKQEVQAVQQQQQKQILVGMEMKMDNSKNGETREEVEKEGNSTGEGGETEEKERKGKRKNSAEGREERGENEAEKREEQQQIDTF

SEQ ID NO: 139047 - protein, 169 aa, Heterodera glycines
VTIDDEMANQRGMGDFYDSDDETPPENKSELNDRQHNFGDELGGGQWDGNSEGNGERETRAHEAANGYAWTVNKVKWHKNLKNSLEIAHLSPKLNLTMKRFNSWASQLENELEGWKDGCPCDFLPNMSPISVFRRAFMLMSNVLRMQMTPLPSPLLPPGLRHSFTNIAC

SEQ ID NO: 139048 - protein, 95 aa, Heterodera glycines
YVNDFESVHDVLVVTVLPGIYLLFALILFMKSRIIKDGPPPMVHRKRRIFVQVVLISSVNAIASGIYVVMQFVPLSEFLLVAGQFYWILAHGKRN

SEQ ID NO: 139049 - protein, 79 aa, Heterodera glycines
TIAEVIQRRPKDNFLRKKRTPRGRSDSKSIASTFGSFPFPTDGTRAGKRSEVVFQRVPSLKIEIGAGKAMASDEDATAL

SEQ ID NO: 139050 - protein, 95 aa, Heterodera glycines; identical to SEQ ID NO: 133575

SEQ ID NO: 139051 - protein, 19 aa, Heterodera glycines
TAPNLLASQQSLLNLPDRT

SEQ ID NO: 139052 - protein, 46 aa, Heterodera glycines
LVRPLCSLSRALRRFFNFCWPWTGASRPFFKFVELIRALRARFLAC

SEQ ID NO: 139053 - protein, 34 aa, Heterodera glycines
KRARSARLRPRSSLNSPTNLETGAKRPSEASKLP

SEQ ID NO: 139054 - protein, 125 aa, Heterodera glycines
MIVLFLTIVVPFQQFLYLSNNYCTFSTVVVPLLITFVALLITFVPLLITVVPLLITFVALLITFVPLLITVVPLLITFVALLITFVPLLITVVPLLITFVALLITFVIFFYLKIFIMYFLNLQKN

SEQ ID NO: 139055 - protein, 41 aa, Heterodera glycines
MKRTRELNGVIGLVEQTFKHFVIIIIIITEIAGSGTTNESP

SEQ ID NO: 139056 - protein, 159 aa, Heterodera glycines
MPVPTNVSELRFLGMINHYQRFVKNIRFIQQPLDELLKQDKVWQWSADCQNAFEKRWAITLLGYDFEIEYQNTADFGQADILSRLIAKTPVLDNEVIIANIRESNETGVLNFVSKTLPLGTMIWPRPRQTIGDQKFHRIPPLRWTICAHFVPVTAFPKF

SEQ ID NO: 139057 - protein, 113 aa, Heterodera glycines
MTKIKEDIGEAFVWISVDETTDKMGRMIANLLQFSANIKKERVLFLVTDGAAYMKKAGRQLKVFYTNLLHVTCLCHALHRVAEKVRDEFAQVDKLISKTKQIFLKAPHRLSVY

SEQ ID NO: 139058 - protein, 179 aa, Heterodera glycines
EGSKSDVAMDAWPPQASYPCGNFSDTSCWKLYTLKDRATLSRSVFVLKIRIKAFAFLLYERFPSSLSSLGHLRYALTDVPPQSNSPPDTVIGAGRRARVARLNTKMDTRRTPVLPIKGIDESSGISLAPCGSHLCYTSHDSSQSQTRVKLNRVFFPAKFAKPVPLAVVSLDSRGQWESR

SEQ ID NO: 139059 - protein, 69 aa, Heterodera glycines
CATSFISESFARKANLLGNIDRSNCETIYVPIFGGAKVLGWANDVQIRIDELDYQFVYRLGVMEDKHLP

SEQ ID NO: 139060 - protein, 229 aa, Heterodera glycines
QLKSPTAFQLKPQQPSKPQAPPSGSPPRFEETEHQQPPPPPPPTSAAQIDPSRLIHTLDPPKIFFRTPPANQNPLTYVPNSVFILYETNMERFKVVFNEEIISHLSFSPQLGYVLGFENPQHVVSNEVAKYGFDLRGGISSFAVYSKGLTENMIIGNSLSSLLRVVSISGAIPGEYNEKIYDSPIFARVLPREINEIEIELRTMDKGRLVPFAYGTTMAVLIFKKVINF

SEQ ID NO: 139061 - protein, 153 aa, Heterodera glycines
DQFIQIATFLSSDRLYGLGENTHHELKHDFSIYKTWSAFSRDQGNEYYVPGSYNGYGVHPFYVGLEPSGKAHGVLILNSNGYGVHPFYVGLEPSGKAHGVLILNSNAQEYVTGPGPHFVYRTIGGQLELFFFPGPTAEEVIRQYQQIIGTPLF

SEQ ID NO: 139062 - protein, 73 aa, Heterodera glycines
LRIHQQQNYFHSALSDPTTVETLGTVVGTTVRRAKEGTVETVVLQMVMIREGISAGASEIWRGIIGAKFGKRA

SEQ ID NO: 139063 - protein, 168 aa, Heterodera glycines
MFTPQYPMYTESPSRLPQQLEATKETVAELAPADHQLPPNGTAIVSDDGGGIVVPTVSELTETTVTTTTVHHTQQRHAVETTEQQQQLVPNGAKPYQHQQQHQQEENEQNHDERQQQQQQPTVLTDEMPQHNAITQNGHAEPALNGELNGDMHHPNEQAQIFLKTHTY

SEQ ID NO: 139064 - protein, 52 aa, Heterodera glycines
MTEKMMVVPPEADRFLADFVDEINLDSNQGFFFDREIIVKPFPGFEYSFSNS

SEQ ID NO: 139065 - protein, 216 aa, Heterodera glycines
MAPLFHRFSSLFVFLMPFLSVVLLPSTVCTGSDSAAAPFDRKNYPKIDLRLFEWPIASHSGSSAEVSFIAVDCYTQLDRSFISTDAVLRLNNSLALRHRACLLRIPTGTRLTVTEMQTTNRKSYATVLAGASHYELPLRTEYIRKGQNQNFGPWHVPCQQAYVLFNSRGRKMEWVEFRLDDETEADKEMASADECLADEEEDEEEEEKGYRKKRAH

SEQ ID NO: 139066 - protein, 39 aa, Heterodera glycines
MGNYGQSEPKECRRVLMMPNGSISMIFPSPTTIKTHSFR

SEQ ID NO: 139067 - protein, 253 aa, Heterodera glycines
MLTIYISNFFSVSAKIRTLSDFHSRIVCQQQPPSSAEIVTTLRYFQQTLVGFLKELPAKRSELFEEFSAENTTVRTGLYPNLNYSGLFYGITNLLDAFPMLSSAHNGPFVMVNTILPYIISLYYRISQSDPPPRPDQMPLLLAAQLGVFPAENRRLVHLLCDCILPYSFGEGANGRVSVPAVLMLILHHPTDPSIHTMAVESLMRTLPDIYNGEKPDPSIHTMAVESLMRTLPDIYNGEKPNIVTNKFRQSDK

SEQ ID NO: 139068 - protein, 370 aa, Heterodera glycines
IGTLQMLTNMDRRLVHLLCDCILPYSFGEGANGRVSVPAVLMLILHHPTDPSIHTMAVIHTMAVESLMRTLPDIYNDLVTVIASGTSESRIVAANLLFHYWPLMNPAILHRRSIQYKIHVWSPPPCQNIGCAEHGKWSPPPCQNIGCAEHGKSTRLTFEPALCALLGDTSPPLTRLTFEPALCALLGDTSPPLALCDRCADSCQAEMPPFLCQPLPVLISATCQLKGCQSSSGCQSSSRIAVSTCFDEDCIRAHGHVPLRLCHECSVHLHAPPVRAHRCHFGPGTIWGTPLEHTMAEAVVKLLRETSAKSSSDGEAAKRPKWLRQLESGRELGREVDPLSDERRMLSRFGIWLMAALMPPSGGSNAGNGQ

SEQ ID NO: 139069 - protein, 101 aa, Heterodera glycines
MNRRLRKKIWICSDVWMDILPSFDHAQLGLKMALLSDRFDVLVDAHFDGKTELTIWKEISIKKDEGPTPKLSERIDGNFVEFPLPDRPLPTKIRFRDLWIE

SEQ ID NO: 139070 - protein, 50 aa, Heterodera glycines
MKGKAFELAQKWVSANYKLYQNNKNCGKKMWEKISADAARPGRGGEYNVQ

SEQ ID NO: 139071 - protein, 92 aa, Heterodera glycines; identical to SEQ ID NO: 125147

SEQ ID NO: 139072 - protein, 134 aa, Heterodera glycines
MQTNLRPARLNFHPSRPFAGTSSADGAAFLGPSEFDQSGTDQSGQNPPPLQRSDDSFIFDMLLNSFICPYFCQHFDPNLSDFEAITAESEKGKQLMATKGNCALSTDLLTKLCPEVKRSSDDLVANFKRMKETK

SEQ ID NO: 139073 - protein, 192 aa, Heterodera glycines
MGKKYSNKEWYKIEKKIAQKLGTNQREIYKWKREFGLIKDSYSEEEKLKILERFDQIYDQIKIKLKGKLDGKGTKCQKIIAKQLGISLMSIYKWKKQLNNVNSVDIQKTDDEKREIIEKYFKIKNEFMQNGKHSQKEWKEFRANIKQMIGKEQIINQFNKMKNEFLKANLKANNRKAEFKNCQVNGPTIQNN

SEQ ID NO: 139074 - protein, 161 aa, Heterodera glycines
MCAPHECIWDWASNQNYALNTLITGTTVATYIGIWIILLYRNQNAQNTNNSSDAWTRRILKALAFLVALQLAGHTLSSIGRLTIPQLQLSVTSKAVSTFLLSCLTNIVLAVNGPVLYKMNMEYRKAFQKVFKFLQPTNYATSIGTQQQQWAIRVATANVRN

SEQ ID NO: 139075 - protein, 130 aa, Heterodera glycines
MNQNETLFELYAEDGLPWALIALTAVRTFISTIGIICNLALVYVTIKTNSLNGPCNILIAFDAAACAWFEIGSWIGMFQILVGQQFVPIRLCCVYLLLPFITGVYASMSANLLIAFDRLLSICFPIWCLI

SEQ ID NO: 139076 - protein, 64 aa, Heterodera glycines
MSTRRTKRRFGLTRVAGHPYQTSSTASKKHLFCHGWQNMDGQRIDDGVLGKEIQYFCNCIKNAP

SEQ ID NO: 139077 - protein, 133 aa, Heterodera glycines
FRAESSKRKRLEGGGRKVPNRNFEEAVFQWVSELRQKKVRVTRNMIAAQAIKMSAAYEDMECFAASNGWLEKFMHRHKFSLRRPTTVAQKEPDAYKNIIINFILYIQQLIHKKNYTHVYAADETAVWLDPGGG

SEQ ID NO: 139078 - protein, 331 aa, Heterodera glycines
MEFGAMVNARSERADMTLSKEEVKCLIFITGLSDAHKELRQECLRQMEKARKSTPPRSMTLEALMEECRSIQSLQNSAAALSGPGQIHSVQVSARTGLNDALELNRHPLPRTDDIFHALRGSKVFSQLDLRDAYLQLELDEKSKSLKIMDQMTSGIPGVFAYLDDIIIASANITDHIESLSKLFSKIQDFGFRIRLEKWHFLQTELKFLGHIVSAKGIQPDPARSAAIREMPPPNDLSTLRSFLGALNYYGRFIKEMRVIRAPLDILLRKDVPWAWGNDQQNAFEKAKQILQSDLLLTHYTTPQNQLSLLRMLVSQELAQPSVTSSLMALN

SEQ ID NO: 139079 - protein, 30 aa, Heterodera glycines
TKELEQNLRDLPTCKLIFPSTSALQRNGAD

SEQ ID NO: 139080 - protein, 102 aa, Heterodera glycines
MATKTLPKCILDGNGMAKWDGIPSEGIKCQFENLCEQFDENPCGSNGICIPLNGTYTCNCTTPTYRFNRKAIFGQQCEAQRCQKPTSAEEQFVIQSSDPLHL

SEQ ID NO: 139081 - protein, 192 aa, Heterodera glycines
CEYSEKLLIATLLDPAYKGAFFKDAVIFERAKDMLLNEAERIAIKCVEFDTSELLAMPEIEASEDPFLAFGNHTTENDNSFMLPITPTPSPSLASAKAMAAGQVADYLNSQTVDCESHNFWANQIQTAKYPLLIPLVKKYHSAPCTSAESERMFSAAKLIVTDLRKNLAGETLKELLFLQQNLPLYGFKFEI

SEQ ID NO: 139082 - protein, 337 aa, Heterodera glycines
NGLRSFFNGLAPTMAREIPGYFCFFGAYELSRTMLRPDGSAKEEIGIARTALSGAFGGIVRLFDIYFLKQLMISQFKGSLDCDFSRRRRNRCGFYGTPQCDGLCSRCWRDFQLESKRQNDYQNNIKVLRQHQQHATGPSGAGGGSAAALSSAAAVTRKGSDARFNSLKTLVKKSPSVLSASTCGGPPSPDTVTAQEHLHQFLEANFAHVYAKELDKQCQVFIDNLFKSEFLPSDELSLLVQAFYQSIKESAVKFAAQMPPPAAATAGDGAATPCSTSDFMTEIENFVCTRAYPVLFGSRTEEEAEDLSLQTRIRSLHWVTNGYLETALSESSAPGAQ

SEQ ID NO: 139083 - protein, 59 aa, Heterodera glycines
MNDKSSATVPINSALTDTAHISHLKDGMIDFVAGTAGGVATVYTAQPLDTVKGLETDHT

SEQ ID NO: 139084 - protein, 68 aa, Heterodera glycines
FDQSGAYLAVGGSNVQIFQAKSWNNIAQFNAHSQPVTGVCFADDVKSVVSASMDKSVRVHAVPPVANE

SEQ ID NO: 139085 - protein, 42 aa, Heterodera glycines
FENFFKRGDPFVLQNFFEIKKHDNLLSGVLKVANHESDMYFD

SEQ ID NO: 139086 - protein, 177 aa, Heterodera glycines
MPISPPPPGVLLFLLLLPSHPFSLQIRIWNADDQSARNVIGIHDRPVTDVSLHPTGDYVLCSSEDSHWSLIDLNAGRPLIKVKSDDDDVPGICCGQFHPDGLIFGTGGKNSVVKIWDIKEQINVAQFPGHQEAVVAISFSENGYYLATGSTDGEVKIWDLRKLKNLKNLTLYDVKQA

SEQ ID NO: 139087 - protein, 52 aa, Heterodera glycines
MLMKDPGLRFDITQPFGGGDGAGSDRVHSHDAAPRHADPRKSDGPQKTFGNP

SEQ ID NO: 139088 - protein, 212 aa, Heterodera glycines
MVRADFVTKMVRHFEGAIVPTAIACFFVENSFGDKLQKSESVALTLYFIFALSNSTVAPSFNQSFWYKMAIPIQCRGRRLKQAYVSEQLREHFKLYNELMCQYQSQYPELLTGLKLTQQARHILLERSEQEQLVECLVCFERVALRRMVCCTAPIESPSTGGASHQHIAQESEGEVLLIELPSDSSRVQLLSNERESTTILLQFALTREPPE

SEQ ID NO: 139089 - protein, 86 aa, Heterodera glycines
MPPSNAEVVVEPNATTTKVKFTARQKVCPSTTAAKVVATQNAGCSSSSTAANPPPPSIRIPKGKTPKKIIKGKRIGVYQRKAMPWS

SEQ ID NO: 139090 - protein, 75 aa, Heterodera glycines
SLGVDGQAFPRVGPPFNAYFGAVKSGRQAFPCVGPPIVFASHFSLSLSFTFPNIWVLMGRPSLVLVPPSMLISEL

SEQ ID NO: 139091 - protein, 95 aa, Heterodera glycines
YRWFILRDYHLDVTGPMMIMVQKVTVLAFSLHDGSKKSEELSRILSKESLSKVPPILNFLAYTFQFQTVLTGPMVFYSEFMEFVSGENFSKALKK

SEQ ID NO: 139092 - protein, 24 aa, Heterodera glycines
KIPIFMTLDDKLTFPPLEEQTARK

SEQ ID NO: 139093 - protein, 22 aa, Heterodera glycines
MVNVIMVVVVVIKITKMLKNTK

SEQ ID NO: 139094 - protein, 146 aa, Heterodera glycines
NGVSKNRNYAQKAPQTILALPIPSTIAFIHPIMSAKIIRVPKIACDLSLAKNGVSKNRNYAQKASQTILAHPIPSTIAFIHPIMSAKIIRVPKIACDLSLAKNGVSKNRNYAQKASQTILALPIPSTIAFIHPIMSAKIIRVPKIA

SEQ ID NO: 139095 - protein, 326 aa, Heterodera glycines
ELKTCEQKKTNGLTINNAHEETKMEPIEEANLKIIDTDIGYCRYGKGPVNFLFICGGVGCYKKDYPECVLRAFDPCYKKDYPECVLRAFDPNFATIICIDPPGYGTSRPPDRKQEVNRCKMDAKYCLKLMETTLKLTPFVVLGWSEGGRTSIHVAGQGKGLVSHMVLLSSGSQVDMRGDLAFKGMRNTDQWMPAAMRNTDQWMPAAKAPYLEHYSNEFLKEQWAGLCDVVAKVYKDLGGSFPCDRVLNTLKIPVLIVNGNMDRFVLDPSLMSKKLENARIEIHAQGIEIHAQGGHDLHIKYPRWFALKVTSFVKESAKSDVKANRK

SEQ ID NO: 139096 - protein, 28 aa, Heterodera glycines
IPTEAKYYFVRWVVGFRKNDTVHQVDKL

SEQ ID NO: 139097 - protein, 41 aa, Heterodera glycines
MRAHLVSMHAKYGLHVCGEGEISFFNINLLTYCLLTNVREP

SEQ ID NO: 139098 - protein, 171 aa, Heterodera glycines
MPINEMILQLEIESANECQSNENLDGIIQEKFGGNVQKSRRKGKKDRLWRANEINDDKHWIILESKFDYIYIYIYMDALFLEFVKGLVTNFDKFFELPREYSKGLMQKYKGNLDVLYLMRENWHCEKIGKEFKENEMTECQKYRNYVNIYMNIYSGFMLKLYFQMHKWSSG

SEQ ID NO: 139099 - protein, 95 aa, Heterodera glycines
MIRLHEFVARNFLRQLPLLLSILLLFLRWLLVSLCRLLKLLRTDKGKMILSRIEKWRMKPVGSPRRMLIICCPIRTPKEQIQTVKGTHYILPLIL

SEQ ID NO: 139100 - protein, 92 aa, Heterodera glycines
MIGRAVRNRPFIFEGIFIFRVYPRKMAISFFEKFYTSQKRLRMRRRAVHNRHFISQRIFIFRGYPRKMAISFFDKFYTHTNALEHDREGGAQ

SEQ ID NO: 139101 - protein, 53 aa, Heterodera glycines
FEYPKRTLEKIDFFVFGAVPPSRCAQIYGETESFRNSFPIACTLILRWIFAPP

SEQ ID NO: 139102 - protein, 26 aa, Heterodera glycines
EVAIRKATNSINTKKVVDQREFSSLV

SEQ ID NO: 139103 - protein, 123 aa, Heterodera glycines
MVVYQRLFQVVRNAVPAWNPQTFISDFENSSIQAVNQVKKGGKSGHPKVSEIVRGIESEDLHWANVVRDWDDTPVNGIRGKGMKRKEIYVEQDENLLALYNTREQRHPYQYLRAVAYRMPDPI

SEQ ID NO: 139104 - protein, 85 aa, Heterodera glycines
MFADLLDSSADEEPTEKILDLSNENDLDNTRISHMLHNIAIDCNAPLPRDLLVAADIEGEQQGNPDENVAQSAEAIRNDYINRNF

SEQ ID NO: 139105 - protein, 173 aa, Heterodera glycines
MSFKRVNSAQPTAVPMAKKWDFRSIGPLNLLTTKLQNAKNITEFVINPDVERPDETLREAIDMMIKNSISKTEETMGRKVKMFGVALTAGLGHPIWLPYRPFPQNNADVVMEEINKLGQSGGEEGEEDKRTILLSESIKMKVTCVALPAGEGPRNVHKFDFGFKEKQRIKLHR

SEQ ID NO: 139106 - protein, 68 aa, Heterodera glycines
MHAFCARDIYHWPCQSKAKQQRWCFERIKGIESVPRLLEKYICNLSTILRSKLEMINFPIQTNFRCFN

SEQ ID NO: 139107 - protein, 93 aa, Heterodera glycines
SKSSESGEPPANGAEVAQSRKKRQAEEVTTEEPPSETNDAEGAEDHQSAAAGNGKAPKNKGKKNKSDSSDSSSSSSSSSESDEKKKLKKKNKH

SEQ ID NO: 139108 - protein, 165 aa, Heterodera glycines
MSAESPTTSQRRARSRKTKKRAASAGETKPLRRSARIAAQKAAKEKAAKQKARDGSTASTKSAGRGRPSRSPKKSGPKSRRSPAGRGGGRSQTPHKKKQPLKKKAPGPRSRTPGRRVKKPSTKKSPAPRRAKTSTKKRGRPAKKAEQAEPSDSGTVADSDRDDSE

SEQ ID NO: 139109 - protein, 51 aa, Heterodera glycines
MDTGKIPEIWKKFIVIPLFKKVLEDWYDSIYGKKISTVFMWTFGKLLIPFL

SEQ ID NO: 139110 - protein, 144 aa, Heterodera glycines
MKHCPENFNEFCRGMEDILSEWDCTEIQAFNELWEGVKRRAEALDEFAERLYGIVERAYPEGEKKPNDFKLSNQPPAQRTNTEAGTKLKVSNRPHISSSSCYVKGGKNEENPTENSELFLNSIVATLVLFAGAVSKQKSKCGRI

SEQ ID NO: 139111 - protein, 127 aa, Heterodera glycines
MPWTRASVMPEGTEYGRKWIKDLREPLKLAPVAQLVRARHGLLGSWVRVPPGELPFMFYMALLGGSPPHCRDHWTKESPSPSVKCQGEPEGPVFRGRRNVMPEGTECGRKWDKGPERTSKSSARSSV

SEQ ID NO: 139112 - protein, 79 aa, Heterodera glycines
MVFEYVEKRSLMDLPTDNPLCEFTAWKYFRDALKGLEYLHFQKIVHRDLKPSNLLLSDTENVKGTAGTPAFMAPEVNAK

SEQ ID NO: 139113 - protein, 229 aa, Heterodera glycines
SIPITGTQPISISITGTQPTSISIAGTQPTNISITGTQPTSITITGTQPTSIPITGTQPTSIPITGTQPTSIPITGTQPNIISITGTQPTSISITGTQPTNISMTGTQPTSIPITGTQPTNISITGTQPTSIPITGTQPTSISITGTQPTSISITGTQPTSISITGTQPTSISITGTQPTSIPITGTQPNIISITGTQPTSISITGTQPTSIPITGTRPTNISITGTQP

SEQ ID NO: 139114 - protein, 44 aa, Heterodera glycines
MDDDNRQNEKKMTADVVSIEKVMDDDDDELGIEPRERRRESQGD

SEQ ID NO: 139115 - protein, 164 aa, Heterodera glycines
QIPLSLFSLKFSSSESAYRCYSCASDNMKENFLTRSRGPPGRVREPRLFDSMCDSDTWVIREKSAIECQGACFKWQQTLNNSGVLSYATIRGCYERVAPLPPPTVRRPSPSTLCKHTQRALVCLDDSSVEESTCWCFGDFCNAATKMLIFKKMFVYFIIINLFQ

SEQ ID NO: 139116 - protein, 312 aa, Heterodera glycines
NVIQSSKDAAYLARHIGLRVGVPVHVPAVTVNRLCGSGFEAIAQGGQQILAGDSKVVLAGGTESMSQAPFAVRGARFGTQLGAKIEFEDVLWQGLTDAHANMPMGITAENLGAKYNVTREEADAYAIRSQNRWRLANNAGYFKSEIVPVKLQGKRGEEKLFDVDEHPRESTAEQMAKLKPVFKKDGLVNAGNASGVCDGAAAVVVADEESVSKYHLDPLVRLLGWHAVGCDPTIMGIGPVEAIRGLCKKTGIALDKVDIVEVNEAFAPQVLAVQKELGLESDRLNVHGGAIALGHPLGASGARITAHLTHEL

SEQ ID NO: 139117 - protein, 54 aa, Heterodera glycines
MYGNDLLARLKDETEGPGEKDFQYALETLLGSQREDSTTFKPKKIKAKKVGLPQ

SEQ ID NO: 139118 - protein, 75 aa, Heterodera glycines
MPIPMEFALPDHTRLSLVDFPLHLPLELLQIDAILQILTAIMLEYKVILQSRNCNAVSVCVMALVALLYPLEYVQ

SEQ ID NO: 139119 - protein, 19 aa, Heterodera glycines
NRTLTDDLMEKNPRRREFN

SEQ ID NO: 139120 - protein, 70 aa, Heterodera glycines
MKAEKSKVKMTIRRNIVNRNILLSECKSRERFTFQPFLANDFKKRFFVDLCTNSRALPLKMSVYCFNLAK

SEQ ID NO: 139121 - protein, 194 aa, Heterodera glycines
MSLGRNKSFAPGLLLIILPLISFNGQIAIASPIPNAKERNNEIQAQAYDPSAGKLAEFGARERRQNAMLCCCQMGAGGGPQMPPPMGPQMPPQMPLGPQMPPPMGQQMPLGPQLAPPMGSQMPPQMPLGPQMAPPMGPSLGPQMPPPMGQQMPLGPQLAPPMGPQMPPQMPLGPQMAPPMGPQMPPPPPGQANM

SEQ ID NO: 139122 - protein, 332 aa, Heterodera glycines
FICSDCWLLVFDFLAPSQLGLEIALISRRFDIYVDEHFKTRKWTLGEIRICYKIEENGTKQMHIHDADANPLPIPQNPLPNKIIGFRGIKIVYIDQNVVAFLRRFHRFFSICSTELGIITCNDHILEFVLLNIWPMLHDSIRAMYFNTITFRCLRQLAPALLSDSPSLRFVSFNDAILPVLPPDESANATDGQAVAKWLFTPHSDGMPKWFSCSVNSLDQWSSTLEQFKTAFSNASSSVTFRINFLLSSPIDSAVVPFDLINEVTVEKLTLQQEDEDVWLTRCPIGWDEMKWGNVQDELLNDDPLNAILFLIREDRFDDGLLDAASQGPSDH

SEQ ID NO: 139123 - protein, 285 aa, Heterodera glycines
MNRRWICGDVWMDILPSFDHAQLGLKMALLSDRFDVLVDAHFDRKSELTIWKAIEIRKDKGRNANENGPTPKFVVRIGDNDISLEELPIGPYIDYSVLAFLRSNKPIWDRMGTKLTLWPYRTEKDQSIWDVFVREIWPIFAPNIRHLGFHDGDYLDKLRSHTSPTILTDLDQLNAIDSGFLFPEGIADFDVLNPTAAQALTKWLHTPSKNGQPKNLYYFNSPRNLGWVNSFKEAFRRATTSISYKIRFNLYLEPMPIEPFELVNKRTKEKLTPDEGDRRIRRKCV

SEQ ID NO: 139124 - protein, 91 aa, Heterodera glycines
MPTEQFELVNGRTNEKLTLKQSKECNLVIWLLQRYPIGETSTAPVKWEDSVNPSANLNSIRFDLWSFDKSIGPLSPPTEEEKADQINENVV

SEQ ID NO: 139125 - protein, 68 aa, Heterodera glycines
MSSVDLDLYQPSRAKDVQTLYREYALLRETEPDCPSLDISDITLCVHCTVHPRGLFFGQTLEKVIESL

SEQ ID NO: 139126 - protein, 19 aa, Heterodera glycines
EPVNSCIGCKCRRCCTPNS

SEQ ID NO: 139127 - protein, 94 aa, Heterodera glycines
NTEEPSEWNKCIELLDRKKETDEKISQQVTLVANLGKAFDEGIQQNEGEEQREEKEKEEVEKEEEKEVRLEIEWNGLLVLEKKFFRFTIIGPKF

SEQ ID NO: 139128 - protein, 122 aa, Heterodera glycines
EKIFRSVLCPKSFWSLSQASRDHLEHFLPLPSISSAIKSSSVSVARRNCGAPLDELLSCAFTSDPNFCFGNPLAKFFARIRNGYFSSPEQVQLRDHRRVLYDHYIRHYQMNLLKTLLINSHV

SEQ ID NO: 139129 - protein, 16 aa, Heterodera glycines
EAIPEGFGLPINLGAS

SEQ ID NO: 139130 - protein, 21 aa, Heterodera glycines
MPTETTESNEKKENPEDISST

SEQ ID NO: 139131 - protein, 200 aa, Heterodera glycines
MTSRSAKRSLKKSDGLSGKESVSKAQQIEQFFGIDEAKCETAERTSKSPSAKRSRSSTNTAVQLLKKMAKHKKELNSSKETRREEDEREMENIPDTLDELNSRGTEDERGKGTESVQTVNELDELLDSETAKRIQSESEVTIRFCCPLLANVGSVSPIALHFSDVSSDVSFEQQLDKFAALFVSSKVRCAQRRRCLFYAN

SEQ ID NO: 139132 - protein, 120 aa, Heterodera glycines
MSVIFPFMFIVIPSSPCPPQGRKSRRRLDRHRHSQASIVSGMLGIFEATETGGGDDDGEDGGGDAGGGGEGEGGGAVANDQCPSVGTVAGQMPCLFGVHTKSTGRTRRIHRSWEGTGAAD

SEQ ID NO: 139133 - protein, 23 aa, Heterodera glycines
VIGIAINRIFGHNRNRRFNRNRI

SEQ ID NO: 139134 - protein, 32 aa, Heterodera glycines; identical to SEQ ID NO: 130522

SEQ ID NO: 139135 - protein, 110 aa, Heterodera glycines
VITTVDTKKPLLDFCAGYTDNFVGLIEIGRSDDDTNFFKLYEIGRRRDFDEEEEDQDEQNPEEEEDFSLGSSSPSSSSSSSNNSDTESHYPHENGSIRDIEEGAEDQDGQ

SEQ ID NO: 139136 - protein, 166 aa, Heterodera glycines
IFGNDECQRLNKEGSVKAFGEMTEEGSVKAFGEMTEQINAQLAQKGRPRISVSEAALGFIQVANEAMSRPIRRLTEAKGFDTSQHLLSCFGGAGGQHACAIAAKGFDTSQHLLSCFGGAGGQHACAIARTLGIGRVLVHRHHGVLSAYGLVLADVGNEQQEGFMNT

SEQ ID NO: 139137 - protein, 112 aa, Heterodera glycines
NRDFDVDAELADVDLSDNREKSKSKSEKMQRWAEEERRWETEFDEANTKSRTDGRQNYRQMGAKMPWVNGTERRQNGGDTSAGAATFAITPSPPSASSSVFRGGSATRARGG

SEQ ID NO: 139138 - protein, 58 aa, Heterodera glycines
MSDPQNITLDHLLFFTTFANEIINFYYITILYIHDFSKLRFHVIFNELSLNLDSVNPL

SEQ ID NO: 139139 - protein, 72 aa, Heterodera glycines
MSDPQNITLDHLLFFTTFANEIINFYYITILYIHDFSKLRFHVIFNELSLNLDSVNPIESVAGTWSQKKMHN

SEQ ID NO: 139140 - protein, 33 aa, Heterodera glycines
MPTAHWHWVTDSWPNAPIFGHLCNANMSSNGGA

SEQ ID NO: 139141 - protein, 30 aa, Heterodera glycines
MARFVHKNLDKSSARRQQINRQIIINLIIQ

SEQ ID NO: 139142 - protein, 69 aa, Heterodera glycines
MAWFNNTENICCNAIICVSIGIVTVIYTLIVGNDYINLSLLKAEEIFQIEQLLGGNLNDFVTYCERNVS

SEQ ID NO: 139143 - protein, 82 aa, Heterodera glycines
MCILGPKKRHVTGHVTEYFTMKCTARKMTPLSTKNADLPKKNAATLKMTPANPEGSGTHQKIVGPRAYVWSKCCNNFMKAAR

SEQ ID NO: 139144 - protein, 31 aa, Heterodera glycines
MSHECFQDRHRTNSALPYPTTVLHHGVNDQS

SEQ ID NO: 139145 - protein, 64 aa, Heterodera glycines
MTMQLFKRHFAIPFTIKNESVLLQKKIFVLLLQKYENKIFIFEVCIYFHYIFSTYLIIWNKNKI

SEQ ID NO: 139146 - protein, 149 aa, Heterodera glycines
MESDLDKNNVCQFQTTFPLHDYLNKINRDLEVEQKFKSERQLKRFINFAKTRSSPPINSDVHPISKISISMKNFPIGPYELFDFQNKSESVMIEAVQQDANETDQSSGIANMIEIIDPLKCSELCGVADELFIEKDEHQSFRRGSTKKN

SEQ ID NO: 139147 - protein, 230 aa, Heterodera glycines
MANVPGQVREYLSTDKPLDDRPLDIDEIESEVAALNRRTDSGMPPHSLRLKVGCVVVLLINKSDKEGLINGTRIVLEELGDDRLIGRVINSNAIGGQVRFFLERTRNVYEDKSPGGIKYERLQFPIKPAFAMTIQKGQGQTIRTVGIDLEREVFSHGQLYTAFSRATDGNNVRVHAPNREIDAQGRAKVLNISSWAHGFWRDANPIPICTMLGAKMVRSLDPGHGPVSPL

SEQ ID NO: 139148 - protein, 68 aa, Heterodera glycines
MISLTSSHVSMVRSENQTIEQLLVIAKELLEVRIDIVYQLFLALNEELRRKSEVLLRFSRARFRAHLQ

SEQ ID NO: 139149 - protein, 176 aa, Heterodera glycines
MLGRNGQLSQFGSKDLDRLVKEVIEPMASDGLRTICLAYKDYIADGSAQVEENQLAFGGEIDWDDESAVISDLTVVAIVGIQDPVRSEVPEAIAKCKHSFETLKALFKANLMYHFFCCLGQRSGIVVRMVTGDNINTARSIATSCGILKPGEDFLALEGKEFNDRIRDEDGEVCQE

SEQ ID NO: 139150 - protein, 55 aa, Heterodera glycines
MKFGGWIDDAQILLSYYLQHDHTEQVKLEQQASFDDICDRDVSMEHKKFSAALIT

SEQ ID NO: 139151 - protein, 111 aa, Heterodera glycines
YENEGCYNDEFNPFANVSQNYVEKREKQLDQTRQKPRLTLRQQQIKKDNEMWENNRLARSGVVTFSEELGDFFDNETDENRVSLLVHNIIPPFLDGRIAYTCQTQPVIPVI

SEQ ID NO: 139152 - protein, 38 aa, Heterodera glycines
MKRMIGQPSWICATPKKESDGFHTPAIKGKIFSNSMGI

SEQ ID NO: 139153 - protein, 31 aa, Heterodera glycines
MRIMRKAKCEKRNLGTSLVHMVKASNSLSTI

SEQ ID NO: 139154 - protein, 97 aa, Heterodera glycines
SLNIAGNVLSLAPIEGGSGEYVAIWNTADKEPTKKGTRQDIEFVLSAKDKTLSKNLQVKFYPHNDTHAGWGQKLDQITWHCSTNDIGHVFVLEEQTL

SEQ ID NO: 139155 - protein, 61 aa, Heterodera glycines
MGSFLYQMKSFYQMANEIQKDFDFDAYPGEQFDRQDGYEGLFGPDHFVQIEKLRPKAVRFD

SEQ ID NO: 139156 - protein, 60 aa, Heterodera glycines
FLSNIPAAKVVHPFASQDTCSKEGCCKCTGESRSGEANARGKAIDANKLHDERKEKSNFE

SEQ ID NO: 139157 - protein, 49 aa, Heterodera glycines
MYYQAWMEEQAQKLIDATTRAFTSQRMLAPGAPGFVPPPTGVPVMIVMF

SEQ ID NO: 139158 - protein, 101 aa, Heterodera glycines
HHHLHHSCGCCLIEVRSAADEANAPLAFTAMPDDCAAATAAIAAAVTAGVGMALKAAAVIDGIPCGNTGGVKKPAAEGITGGRTIDIGLTYGARGGLTEEV

SEQ ID NO: 139159 - protein, 120 aa, Heterodera glycines
MRRCAFSHPKPRFRRRHLRPSVNAAPIAAGTAHTNAAQVASEMLAGTAKYFRAACCRRCAPETVAVAAHATLCGTTGSHSNFAGPAQSARICAAIAARRTAAVFPSLLAVSGLRKSLPAH

SEQ ID NO: 139160 - protein, 64 aa, Heterodera glycines
GFSLPDALYQLTYIEYFENGTELGKWRTKMVIEFNLYNYWIKKLVDEQHEEIERIQSNFNYYTV

SEQ ID NO: 139161 - protein, 25 aa, Heterodera glycines
TCTCGVVVKLSTFHNFSPEFNSPLG

SEQ ID NO: 139162 - protein, 129 aa, Heterodera glycines
MTTPNLPYGAREGSGQFSTGTNFSPPPPPYDAGASSPFEQPHQQHQSPSPYGMMYSGGNVPSPPPPSSPYHQYQQQAPPQMSPPFQPPIGDPQQQFMYDPLLNTARHLGGQFAEQQKQKVHSFITHSTK

SEQ ID NO: 139163 - protein, 33 aa, Heterodera glycines
QFVMRPMSDTVGSLSEALQNEDPGIELVTFYNS

SEQ ID NO: 139164 - protein, 98 aa, Heterodera glycines
MAILSSTTTPSLCIGFDQSTTTTTTTAAATNTTGNSATPSYAAAATRSSCATPTTTTTTNHCLASKSTTTTTARLPSAAKRTKLSTQPPANGRRNFYL

SEQ ID NO: 139165 - protein, 57 aa, Heterodera glycines
RCAQIYGETESFGSSFPIACTLILRWIFAPHKCLSTPNGHLKKSIFLFHKYFFQKVL

SEQ ID NO: 139166 - protein, 131 aa, Heterodera glycines
MAQIQHVVDVVVVAAHSSCDHADELTDLLQQAKDGATVQAKYGAAVQAKDGAAVQAKDGAVVQAKDKAAVLPDTEKGIEAIASALAGLAKGLGDAKTAFGAAKNGSEGNRDEILGDPTNTKAFGRIYPKEK

SEQ ID NO: 139167 - protein, 90 aa, Heterodera glycines
IIFIQKIFFWVFGAVPLNRCAQIYGETESFGNSFPIACTLILRWIFAPHNCLSTPNGHLKKSIFLFSGQTPRTDAPRFMGRPNPSGVASL

SEQ ID NO: 139168 - protein, 80 aa, Heterodera glycines
MNPDLEIAQKFFLCKENKKDVATIFLELLKSQNLSPNLVFYQKRLKSLAFRALLTTKWRPFTKYAALNCACPLTRLNCEH

SEQ ID NO: 139169 - protein, 57 aa, Heterodera glycines
MTTSSTSSEKGDYEFHWKNPREIKQKWESFAKFGQSQAQATQVTEITGKNFDKWCTN

SEQ ID NO: 139170 - protein, 95 aa, Heterodera glycines; identical to SEQ ID NO: 124528

SEQ ID NO: 139171 - protein, 78 aa, Heterodera glycines
MSSEFHSMNRGTICKDEKPTEAERKRRENEGEEEEEKEKGTRTAKKKKPYKELTLEEKVELIRLAERCSNLSQASIAE

SEQ ID NO: 139172 - protein, 209 aa, Heterodera glycines
FQQKQLRSAQACAWAAKETEQVVMTQRWPGIRASRTWEEPSRRWTQLRGQCTGTHTSTPDFPVRTLPQAKGLRALMSRVFSNASTLVPRQGVPIHELIGLVNHGNTPLTRIPTPPPTLGSASPVLSSPQHLCLRPHLHKSINSPNFFNTQTSCMFIHFDSCQSLEKLRPRQRWHPSSSHHRSMPSTSASKHLNPDGRAPHSEIASFFQP

SEQ ID NO: 139173 - protein, 147 aa, Heterodera glycines
MAALNPLLARNVPAKNGDPAFFEICQQIWAILGQFLGYITDPALRGIESSDFRLFDQAGGTRNGMGNSMPAQVGLHPLHHSLPMKRLVSSLAHEGLHILEFQQGRQWPRAGTSTKHDHGPFFRAKCAEFDEISGGLIQPEMQEFDPL

SEQ ID NO: 139174 - protein, 177 aa, Heterodera glycines
MCSKCFKDMIKRKQETGNTAPSTTAAATTAANKTTETMPVDAVVAALAASGGGTTEQQRSTSSPENAITGLSASSGTTASTSHPGMLSCSAATTTTDATNNTHAAPSPAPGQQQEDTQQKKKPNRCGVCSKRVGLTGFECRCGGLFCGEHRYDSAHNCTFDYKTAGREELRAKHPQV

SEQ ID NO: 139175 - protein, 17 aa, Heterodera glycines
MDIDELKKMSPEQQNKV

SEQ ID NO: 139176 - protein, 188 aa, Heterodera glycines
MGYPRQEVVRALQAAFFDADRAVEYLCNGIPEGLSLQESNSDADNDAVNEEGELMESLENPQGLSFLAQSPQFQQLRDIVRTDPSMLPQIIQQIAAANPQLMEAIRNNQGAFLQMLNEGQPLGGGTDAGAGGEAAAGVQQEAAQRRVSIPVNAQDRLAITRDLAVNYILARMDESQNERAGAGQQGGQ

SEQ ID NO: 139177 - protein, 175 aa, Heterodera glycines
MTKKGGREEKGDGGTVAGKEDTGTVSVADEADGGTTTTAAGANDGRTTATIEDNNANATTVDNNSSETVAENNGGSAASVTNNSGSTIATVTTDHSGSTAGTDNSGSNATTCEQSTATPVQQQRTYDSNNSLRPVFIQGYDFQVSKTGRETLASLERRKQSLMSRKTICVRKLNM

SEQ ID NO: 139178 - protein, 116 aa, Heterodera glycines
  unsure (1)..(116): unsure at all Xaa locations
QGNAVVERSFRTXFNILAKYISSEEPDFDEFLECANFCYNTSIHSSTKETPFFLVFGRDPIFCIEQILNPNTEPENTSEVDNVKQKLVKSLRKAWESAAAVIKEAQLRSKVQYDKL

SEQ ID NO: 139179 - protein, 256 aa, Heterodera glycines
QGNAVVERSFRTFNILAKYISSEEPDFDEFLECANFCYNTSIHSSTKETPFFLVFGRDPIFCIEQILNPNTEPENTSEVDNVKQKLVKSLRKAWESAARSLKKLSYGQKYNNKLVRNQTVQIGDRVLLRNYAGKVKTSKKFQLPWKGLYLVIEINGVLITIVSCTSPQTNPRIVHINQIKKYFEYSGPPCTTKNLQKDEEQALKELESREQTNVPGYSHDSYQNISDNTVLIENAPALTPNPSPSSQSNNQVKEKE

SEQ ID NO: 139180 - protein, 317 aa, Heterodera glycines
MSYAAAFVNFDLGDMKKISLTDGHCLMAFQGSNDPFSNFFFSPFVYEGERYSCVEQAFVMKKVRTFELHGVAAELMRFIHKDDPTPNSPRWPDGHPRELKWFGREAEERATPATKRKWSENTQRSFIAFLVEQKFRQNRHLAALLLATNDMWIAEACKDRKWAVGYYKDDPFLCNYTPENGAFGRNWMGNILMSLRMRMLNEQQSVAGPSRQIEPPSAPVYLIAQELANGLIGAKIDFDNSFPHFVLLPNRLLSSGLGLGDFFTPGKLEADNRFTILASNVTEMTKERKLWINPNSSILAVQATVIDIKSKYLSLRF

SEQ ID NO: 139181 - protein, 117 aa, Heterodera glycines
MTFVGQDADPEVVITYFGMTSNLRLRYLLLMSITVAWTAKIEEFGLIQSFLSFVISVTFEARMVNLLSASNLPGVKKSPRPRPLDNKRFGSRTKCGKLLSKSILAPISPLASSCAMR

SEQ ID NO: 139182 - protein, 49 aa, Heterodera glycines
MNDCLCAKWGRGRRQRLFGPSDPIRAKGLRAAERLAKPKTAKTPWTSPI

SEQ ID NO: 139183 - protein, 92 aa, Heterodera glycines
MDEGTKRERTKTTNGVSAEEIKAQPLGTKLKAGRKGRDTAEMLLLKKTALIGFRRKYYRSFFCFQMTSSEEKEKNEAMNGRKTANFEKAATH

SEQ ID NO: 139184 - protein, 49 aa, Heterodera glycines
MLIKKGSNTKLIRSLLHGDLISPFWLGTRDFFNADPEKQYFKNEMGQHF

SEQ ID NO: 139185 - protein, 17 aa, Heterodera glycines
HKHLFDLFYHVHNLIKI

SEQ ID NO: 139186 - protein, 297 aa, Heterodera glycines
FLAVLSNYFQSFSLYEFTRLLNSQLQTSYLPNSTKKVELHQELLVLLWKCCEYYQKFLYYVLKSSDVLELLVPILFHQKFLYYVLKSSDVLELLVPILFHLNDSRTDPTRIGLIHMGVFLIRIGLIHMGVFLILLLSGERNFGVRLNKPFTSRPFTSRGLIDVPIFTGSHADLLIIVFHKLITSVFHKLITSGNHKLQSLFDCLLTIVVNVSPYLKSPYLKSLSMVTANKLVHLVEAFSTPWFIFTPWFIFSTPTNHHLIFFLLELFNNIIQYQFDGNSNLVYTIIRNSNLVYTIIR

SEQ ID NO: 139187 - protein, 336 aa, Heterodera glycines
MRTLDEKLKEIMNNGIAFGGKVMLWTGDFRQTLPIQKHATRAEMVNATIKRSEYWRLAKRYRLTKNMRALATEQEFAKDLLEIGSGKWNNENDEIILPEICISIGDLAEEIFGNCIVSENWNEMAKSAILAPKNVDVSEINNRVLEMLPGEEVVYTSIDLAQDENRQRADEYLDEYLNALNPSGFPRHKLRLKKNAIVLLMRNLNIEMGLCNGARMNVEQMQPNLIVCKILTGDKAGQTVYIPRITLCCSEEYPFDLHSHQFPLVLAFAMTINKAQGQTLEQVGIDLRKDVFSHGQLYVALSRARAWNKLRIRLDDGNLERKVKNVVYRELLDNSD

SEQ ID NO: 139188 - protein, 257 aa, Heterodera glycines
HNILTPQITFVAHSWFNILRFPIAIFAMIGSQAIQTAVSWFNILRFPIAIFAMIGSQAIQTAVSNRRLKHFLAAEEMEPLLRGRPTSAITIKNADFAWEKDRSLITIKNADFAWEKDRSLVLKDINLSVRKGTLFAIVGRTGSRTGSGKSSLLSAMLGELYRKSGENSLNGELYRKSGENSLNGSVAYVPQQAWIQNMTLENNVLFGHAWIQNMTLENNVLFGHEFDSDRYQSVLDVCALRQDLAVLPAGDQTEIGE

SEQ ID NO: 139189 - protein, 16 aa, Heterodera glycines
EAIPEGFDLPINLGAS

SEQ ID NO: 139190 - protein, 22 aa, Heterodera glycines
MHTCPSGAENIKVQTLTTSLKK

SEQ ID NO: 139191 - protein, 123 aa, Heterodera glycines
MPGKPELLLLEGRGPSTVVVHPRPSPATTPFPNDDFVDKSSSAEQRHKNLRVAPSTFTCHPIKTRLKPCRGLSSPSVFKATAAPSPSSQLFCFRVGQPMSDETILNATDSDWPFSKSETRNST

SEQ ID NO: 139192 - protein, 53 aa, Heterodera glycines
MLCSLRGVLPNFFKRHLSVAIQKNIPEEHDEGFVDVANTEILCKYVFINYQFG

SEQ ID NO: 139193 - protein, 20 aa, Heterodera glycines
MVCAVRSRAQSLKEFYAVRS

SEQ ID NO: 139194 - protein, 64 aa, Heterodera glycines
ESLGMAFKELFKRWCVTESDRSVNYRRFVAGNLLAGGLAGSVTFFFIYPLDFSRTRLAVDMGKG

SEQ ID NO: 139195 - protein, 38 aa, Heterodera glycines
MTKEKPKEQWEKQWADEPEKKAMKELEKTDKQFKENNR

SEQ ID NO: 139196 - protein, 117 aa, Heterodera glycines
AKRCPILYSSCLFCFVYSFCLSKCSAFIQSSFFVAIFGFSQLFKVAFSPSIVFLELFVGLFKFFHGFFLRFVCPLFFPLLLWLFLSHCFVSGGFVWTPFHSLYECPPPPPPIKVRFL

SEQ ID NO: 139197 - protein, 74 aa, Heterodera glycines
MKKQNRLKKWEGIVNKFMEEKGKYLRKKEPKGKKNIHHREIDEQIAETWGTNSRTIYRWKKNWDRLRILPMRTN

SEQ ID NO: 139198 - protein, 42 aa, Heterodera glycines
MDTRFVQWDIAVITFYRTVVNWDGLMLHLYDVLTANIFYLLK

SEQ ID NO: 139199 - protein, 99 aa, Heterodera glycines
  unsure (1)..(99): unsure at all Xaa locations
KSPANXQIATDKHADANANASQNTVVYGPIFPADYWQLPPALLAARLRRFSKADIVRSLRQNARRMGVDGGKLRAVMRHIEIMRREEAQLRNHRHYQLP

SEQ ID NO: 139200 - protein, 172 aa, Heterodera glycines
IQYMHPIRFLHEQIKKLNNVLGLRVLVYANVSEYLPITEAVGFRITVHDKWTVPFVDAFGYNAPTGTLSAFGVRMKKFFRLEHPYKKFFRLEHPYGHCREGGERAEWYIYNNYNYSIEGCHRSCTQREVVRVCGCADPMVPVVVRVCGCADPMVPVSEKINNFKFLWSYTKQ

SEQ ID NO: 139201 - protein, 156 aa, Heterodera glycines
MLDLECFTFLHRALESEVNPVIVFATNRGRSKIRNSDEIGFYGIPSDLIDRLLIVPTRPYSIEEMSLIVRIRADAEGVLLDPGALSRLCELGQKTSLRYVMQLLTPAKLLAHIGGRESVEIVDIDECVQLFMDSKTSTNLLKSKQSEGGDDDVEMS

SEQ ID NO: 139202 - protein, 146 aa, Heterodera glycines
VDSALAEQIPVVEKPIINYHKRAFAQRVTICEAINNWANIRSSVQVEDYSFMLYYANTRLQNDRSLIKNYAINFNRLYEPEYLFDMQKLKLQISANSKFDNSYAPLRRIFDHQMGKMKTKAMAKFVSSAFSCHQHLSMFSRSHSMA

SEQ ID NO: 139203 - protein, 27 aa, Heterodera glycines
MHSVFYLMFIFVFIHGSIYIWKNSLLI

SEQ ID NO: 139204 - protein, 15 aa, Heterodera glycines
MTEYASVAVFIERFL

SEQ ID NO: 139205 - protein, 96 aa, Heterodera glycines
MGSFWANLYKNGAKLVKSAGAVATKSLLCQLGQLDQVIVNTFANSLTQRFLFFGKSPIDYVEQNDPAMGHLLQNLYTIYQKLKLLKFLRNAIKWNF

SEQ ID NO: 139206 - protein, 55 aa, Heterodera glycines
MPLLYPYEKDGSEREKQNFNVPYFCLSIRDTFKTDCQQMSGCNRQCKFCITCTYS

SEQ ID NO: 139207 - protein, 33 aa, Heterodera glycines
LNIQIFLSAVHFHLELGLELYPGLDFSWIQVQV

SEQ ID NO: 139208 - protein, 278 aa, Heterodera glycines
SLFQSDLAKFKTTASAVCFDMDSTLIKEEETLDAYSSFFGLDLGGSAITEKAMGGQIGFRKKALALRLEMLRPTKAQYERFLNEFTPTLSDGVEQLVTVLRGYGVDLYIVTGGFVEVAKRVAQRLNIPNKNVFANRILFSADGCYEGFDKSQSGASPIGKAGVCQQSGASPIGKAGVCQLLKERNSYKLLVMVGDNSYKLLVMVGDGGTDMEARPPADLFVGYGGNQVREKVRLGSDWFVRDFRTLTDAIEEQVREKVRLGSDWFVRDFRTLTDAIEE

SEQ ID NO: 139209 - protein, 118 aa, Heterodera glycines
MRSLAALIQQLKNHLLYSSPNIGNPARCYVVIRARYFEKSLDLDLDSMFDLDLDFLDKNPGKYRSRKNPGLDPGPGRALVVIKKPSKRGQSLIIGVPTKKSVKNLSDIFSDCELKKMR

SEQ ID NO: 139210 - protein, 43 aa, Heterodera glycines
MRQMEELGQFLRERYAAANFLPQHFDRKEVNFRLNLKNGLIRV

SEQ ID NO: 139211 - protein, 62 aa, Heterodera glycines
MEKACKIWRDYIDFSALGKASGTLVYVLISILIGGDRFMKKYLVIDFSSEGRYILMELSSYQ

SEQ ID NO: 139212 - protein, 36 aa, Heterodera glycines; identical to SEQ ID NO: 130206

SEQ ID NO: 139213 - protein, 109 aa, Heterodera glycines
MTAAGARVDGAVQILSTLFLIANYAIVLPMFLLCWMMVVHWLRRSGLMPPPHQSPSTSQHPNRYGGLHTIFEDTVEQKAGHEKDVRQQQQRHTSAAAAAAADTVTTEAM

SEQ ID NO: 139214 - protein, 53 aa, Heterodera glycines
ISPALSIHFAMHQSTVAPSSAAAAQSLGCKIEPPKPRVDATRATDSDKHSTAK

SEQ ID NO: 139215 - protein, 42 aa, Heterodera glycines
NNVISNQLQTTPAIYPMRKIEIRSLFIPRGTSDLSHNVFTSI

SEQ ID NO: 139216 - protein, 254 aa, Heterodera glycines
KGFGILEFDWSKLWNGGRGFVLDCAMTEGLAYLGSFLFLSRHEPWLWHEEFALFSGKCPIYRTYETADRKWMAVGAVEPKTYETADRKWMAVGAVEPKFQQKLFEILGISTEKIDGMAKLTRLGISTEKIDGMAKLTREMENAFRGKTQREWAIIFEGEDACEDACVTPVLNMDEVGHYEQHKRRNAFLRGEVEGEAVWVPRAVPKRMETEKSQTKAKSERTEREKSQMRAKVSTANEMNGTMSSNAFLSQNAI

SEQ ID NO: 139217 - protein, 16 aa, Heterodera glycines
EAIPEGFGLPINLGAS

SEQ ID NO: 139218 - protein, 103 aa, Heterodera glycines
RVITMESCNRFSGVEHAAYLHYMRNSSVYFGPGCNNEILVIGRLILVIGRLVSRWNVPIIAHLSGDDALSDRTGPIIAHLSGDDALSDRTGRFWPFHSLIKSS

SEQ ID NO: 139219 - protein, 116 aa, Heterodera glycines
MRWRGKNLGNIVEELDKEGNDDGDQKNDQPDKRETMRKGEKGKDGRQKQSGDEIVEEKEKNDSEKGEAVKKDQFATTVETNLCSTMFQNVKIEVEVLRQIVFDPIGRVLAQTQVDN

SEQ ID NO: 139220 - protein, 66 aa, Heterodera glycines
IRKLLSTVDATIQFHGKTTVLENTIRDGGNVLLNIDDYLEKMRNLKEAIAFFATHPVYRNHEHIVR

SEQ ID NO: 139221 - protein, 41 aa, Heterodera glycines
MAKVQKIIKKWLAEKWAPGWCPVFPCPVSYLESRIRTKGEN

SEQ ID NO: 139222 - protein, 28 aa, Heterodera glycines
MITPEQHQKRLEFIKRKKMNSVGCFGLE

SEQ ID NO: 139223 - protein, 49 aa, Heterodera glycines
MFPTLKKTHRTHVRIDAPVRAGPKQNGLLPEKLEKELGGLFRPTSLCCA

SEQ ID NO: 139224 - protein, 66 aa, Heterodera glycines
MALPRAGARQLPPLTIGRGGVGNSEMATIMTDDGGTESTNHCRDGDEEPPQRRRRGPKLALDELDG

SEQ ID NO: 139225 - protein, 80 aa, Heterodera glycines
LFEYPKRTLEKIDFFVFGAVPPNRCAQIYGETESFRNSFPIACTLILRWIFAPHNCLSTPNGHLKKSIFLFHKYFFQKVL

SEQ ID NO: 139226 - protein, 148 aa, Heterodera glycines
MRTPPPLLCSAIRCLIWLHQQQQQRQNQFACTRTNFLGTIMPTSTICDGATTTTQGMAHRVPQPPTDRGRRKRTLPRRYCSESTSHGGAPPTAEPIKMPNNKRFIIDEAELELKYAWIRHYNPITALAGGPRMDWNNNDKNNEIVTKF

SEQ ID NO: 139227 - protein, 48 aa, Heterodera glycines
FVKKSNYHCILMILASSSKRLACQFLIRKVPHFAVTSSRKEYFVVLST

SEQ ID NO: 139228 - protein, 139 aa, Heterodera glycines
MCYNPKFLKFIKNLLSGGLSALFVSTIDSIFDTRPPPYRIIYQRELDEGQIAWVIAIAVDWRDVLDNWQCLETSLLPILESLGTDENELEKFVLTKIDGFLALRDEMERREHLVADGGEEDDGAESAAGEILQIKFKIP

SEQ ID NO: 139229 - protein, 66 aa, Heterodera glycines
MARTKQTARKTQSQKGFSSSSGSQHMQSQLHNLRKQLATKRPNPKRGIGYKELPPVKIAQKRHHKK

SEQ ID NO: 139230 - protein, 94 aa, Heterodera glycines
MIGTYGVPKSVSIMSIAWRKPLRAVFNWLMISSLPSERTSLILSAAWMASYSECLSCMLVVGTPINATEKIIGNIRKYSAIFEYFMKMIVNVSR

SEQ ID NO: 139231 - protein, 39 aa, Heterodera glycines
HQKDPEVSWRNDATEGVLGKLTTTMGPCFCKGTAYLIHS

SEQ ID NO: 139232 - protein, 42 aa, Heterodera glycines
LDDSTGPTSSIDLPTERIWSHRMRDTGNLEAQIASMMVSMGH

SEQ ID NO: 139233 - protein, 55 aa, Heterodera glycines
QDLAVNYGNTVRTSTNEVVQFTFGDDGLDPAYMEAKDGRPLDFQHMLAQVRNTNN

SEQ ID NO: 139234 - protein, 179 aa, Heterodera glycines
MKLCLFLSVLIAFLIVLIEIGAEKKKLEQSFEEIFGEKWEEKEEENLEEENNQNENDQKKREIIEKFYKIKEKIKQNEKIYTRKEWNKIEQKIGKKLGTNRQYIYKWIKELNLQKYKCHKSKTDEQKIEIIQKFNSMKNEYKQKGRKYSKKEWKKNLQKFIRKLELTKEELTNGRNNLE

SEQ ID NO: 139235 - protein, 66 aa, Heterodera glycines
MIVLQSQITASITVTSRLTVFIAKFSNTAKTDEKNELDEEEDEVVDEDGEREEEEVYFVGVPKEMP

SEQ ID NO: 139236 - protein, 81 aa, Heterodera glycines
MHAFCARAIYHRACQSKAKQQRCCFERIKGIGYFEEVSNEHEAISLQNLISGKYMSIEFIFRKCPQTLQKKICNLSTNFEN

SEQ ID NO: 139237 - protein, 63 aa, Heterodera glycines
MRRQWANKFARLASISRKTLRSNKAGTASHEVGHSVIIWLLGVRQFLKANKVSQKLSNDNKNI

SEQ ID NO: 139238 - protein, 121 aa, Heterodera glycines
MLIGMLFILSVQSLMLLTVLRCRYFLSQRELHAMALHVAQKSRQDYPTIQIVVTNGSVLSSAAAAAENGFVAPPQGNGVVGNSAGTEMANGHATTAQNGQQQQNGGQQDEPQDQPILKGIV

SEQ ID NO: 139239 - protein, 82 aa, Heterodera glycines
MPFGFEERLFLFPVNFAITSLMLWSKWALKFKNNSSVDKVNVYGIVRSFRANPAESILLAVPMRSSKIEAVAVALAFADYAK

SEQ ID NO: 139240 - protein, 146 aa, Heterodera glycines
MPEELVALSPGTRVSGRWTIIKKLGAGAFGAVYLCQDRDGRTMAALKTEPIDAQRPLLYMEAHVLLSLNELRSNSGRHFCRCLDLGRDEQPDADSGQTMEFNYVVAHTGAKGTPPASEGRQSTHQSLRTSNATTAAGMTLSRGSTC

SEQ ID NO: 139241 - protein, 247 aa, Heterodera glycines
MTKPQQVLVLDPNNELSFKGPFTEYPFTEYVNANLTLSNPSRKDVYFKVKTTAPKFYCVRPNSGVIKVNKHTQSFVAIKWTEIKANDKTQINVMLQPVESPETLETVDQFWKTVDPTLVMDSKLRVVFQRPFGFGDENNRDETNATGLNFNKTGEPKNEQPTQTPKSTKTEKYLKTSKKLLIFVSKTWLKNFSSTKIGNFARSFFNAKCTKRFGPRSAQHFWLNLHPFAILFAVLALMVGLIVGKLM

SEQ ID NO: 139242 - protein, 489 aa, Heterodera glycines
MRKKRSGVHTPNSICEKEQKKPKIGNESAEVCHFQAEKFVGEYCTVHTRPSLTVKALSFNSSIGRLCVIRQNESTVSQQFPAQLSLVEFYNADNLPLIFLEKSIPVNDRFETLVWVDNWAVFGGLGGRLTALSPFTSKFGVSGFFKSWVDFFGSVKRVQLCVSDILVMTRAGENHQFVAGNTSGELLVVNNRDFDEEGKCTNKVPTFSTVQTIKLSTDEHITAIGCSNNKTLTPQMMAVGKVNGLSLFLYESEWKKHKEIDIPRTKESANVVWSLIFVWLHPIPFQVNGGHVTKICVDSADTRLVALTVAGTFCFDLTKLTHENGQMGEDGLISLELPQKAHPYDCVFYDKCKIVIIMADLNKHVIIYDLNSNSILFTIGNAELGLVSNEWVAYLHVNMRGTVVATTNKARLRLLSIEESKIRLFVDESAESNEHEIAKSSDSRIEPFWLEDRSDLSTNCLNSRFVLVKHVEENVSTRIPCHLRFFGKN

SEQ ID NO: 139243 - protein, 108 aa, Heterodera glycines
MPLHGNFKDIVAEVKFTNRIEMVWICSNTKKKMLAYSYEVPFQNASKLIMDKLMRWYHSENPDKQFSLVPLPFENVGRMREALNKELDANYDGCRDFVGINIIVVLFN

SEQ ID NO: 139244 - protein, 144 aa, Heterodera glycines
MELINQFWRDDSEKQFEDYQIPESPPYWSSGFLSIQYAIDKAFIELVRFNIYIFENGLIVSLSFFTVCPIKKIYRDFTFLRAFKAKGDDALANVSLRLHRLPIPSYMNKQMATITVPLFLTMLLFVFAFSMLKDIAVERESGIM

SEQ ID NO: 139245 - protein, 36 aa, Heterodera glycines
MINRRGLNEYMECYKRNIFTKECACNDIYQILWDST

SEQ ID NO: 139246 - protein, 246 aa, Heterodera glycines
VPLLITVVPLLIAVVPLLITVEPLLIAVEPLLIAVVPLLITVEPLLITLLITVVPLLITVVPLLIAVVPLLITVEPLLITLLITVVPLLITVVPLLIAVVPLLITVVPLLIAVEPLLITVVPLLIAVEPLLIAVVPLLITVEPLLITLLITVVPLLITVVPLLIAVVPLLITVVPLLIAVVPLLITVVPLLIAVEPLLIAVVPLLITVVPLLITVVPLLITVVSLLITVVSLLITVVPLLITVVSL

SEQ ID NO: 139247 - protein, 105 aa, Heterodera glycines
MDQNMDKKCQNICCKPPKIPKKKKNFRMGVKSPNGQVSFFKNEIKYLGVIIDQSGRRPDPTKSQPLLKCAFLQMSANCAHIWAWSIITRNLYEISDSFDSPWMNC

SEQ ID NO: 139248 - protein, 22 aa, Heterodera glycines
MLSNGPMCRYASDLPLALAKNN

SEQ ID NO: 139249 - protein, 55 aa, Heterodera glycines
MNTQILCTPLSEDSTQSATSTATSSRATRPSDVRNQTNIRDDGQQHRPRTSFFQN

SEQ ID NO: 139250 - protein, 189 aa, Heterodera glycines
MDTREVEGRLFEIKLIREGKMGEVIRETQADVAIVFDKGLEKMGKEAGGHNAKQQIFRKMNPLQIKFTDTKVGHRTKFLLFFLRLYRKMIGQIGAPYQGSAELYAVTVGTAGPKMDIKLGRSKTKLAYLKQIKEKVKRTDREALLILMSMAKDEIMAYFGGYLNINAFKQHKLVNKILMLGNSEKYFPN

SEQ ID NO: 139251 - protein, 30 aa, Heterodera glycines; identical to SEQ ID NO: 126994

SEQ ID NO: 139252 - protein, 103 aa, Heterodera glycines
MACDVASKNAKLLSGRVLQKSNGPPKTLCDNVLSSVPIPTKLVDPLAYVGMLAKRALGSALKISETPTKCGGRPSDGLFCSSFWEDFFSSVKTVSAFVGFTKQ

SEQ ID NO: 139253 - protein, 17 aa, Heterodera glycines
MLKNQLAAIPPKKEHFQ

SEQ ID NO: 139254 - protein, 248 aa, Heterodera glycines
RSYSNRLMATPNRHRLTATPNRHRLTATPNRHRLTATPNRHRLTATPNRHRLTATPNRHRLMVTPGRHRLTATPGRHRLTATPSRHRLTATPSRHRLTATPSRHRLTATPSRHRLTATPSRHRLTAKPGRHRLMATPSRHRLTVTPSRHRLTAKPSRHRLTATPSRHQLTVTPSRHRLTAKPSRHRLTATPSRHRLTATPSRHRLTATPSRHRLAATPSRHQLTVTPSRHRLTAKPSASANGTPSRHR

SEQ ID NO: 139255 - protein, 113 aa, Heterodera glycines
MCQKRDGGEHSKMKKKPEDAHFLLLPPSDFGVGKHDNESAKKNKMDKERMDNRAKTFAKEQKPKNTKKRANEWDAEKANKATNKLMRKMAEEKTKMANAMLYPTKGKKDAMYR

SEQ ID NO: 139256 - protein, 57 aa, Heterodera glycines
QHTMELERIISKSGKVYEQLDAAFSRNNMPRKSIKQHQESCKHGLSPVFEKFETGTS

SEQ ID NO: 139257 - protein, 172 aa, Heterodera glycines
MFFIGIDRMIGIIFGEMHSKCKIRLYLATITIICCTFSLGSCLTFYQNIELNGDQMITGTYADFFMGSSQYSLICLFLIVITIFIYLFVGLIIRIKSAGLPSADQINYRTFRSLCCIIAVNIGGYFICLFFLTLIKPLIPSPITAWFAHFLTSIPMNIGAASNAPILYVTRY

SEQ ID NO: 139258 - protein, 70 aa, Heterodera glycines
MNDNSTNNNTFYLAFKDVHPSWSLIGCALIFGIIAVIGIIFNSSVIGVTFLTKCVKLISIKSWKSIINYF

SEQ ID NO: 139259 - protein, 125 aa, Heterodera glycines
NGDEDTKKYKGKTVTNETERYEGVRHCRYVDEILPNSPWYVSVDFLKRYKIDFIAHDALPYSAKDEEDLYEKFRRADMFVVSLKRGDYDWVGKEDIIRYDNGLPQNFAIEILKKELNNSSFFEIF

SEQ ID NO: 139260 - protein, 73 aa, Heterodera glycines
GGRCAIDLLFLREFLNLYSIPEKWLSLFLMKFITSQKRLRMRRRAVHNRHFISQRIFIFRGYPRKMAISFFDK

SEQ ID NO: 139261 - protein, 90 aa, Heterodera glycines
WQKVLNEEEEAEGTQPGTEPTNQYIQTTFIHRDANSWRENRTHKNEQPMPPQMMTASVPVPLCIALNACGIGTPAEAERAQWHGLKLPFW

SEQ ID NO: 139262 - protein, 30 aa, Heterodera glycines; identical to SEQ ID NO: 126994

SEQ ID NO: 139263 - protein, 49 aa, Heterodera glycines
KSLKFFQRRLSAPPDPSPYYPNFLIFFGNARRKKGCNCPKKKIKNCIIT

SEQ ID NO: 139264 - protein, 55 aa, Heterodera glycines
MGAQKKKYRDADARILRLVQRYNDINNNIALKMITIMPMPMSIPKTLTIFSLNLY

SEQ ID NO: 139265 - protein, 65 aa, Heterodera glycines
MTTTDEKQLQVVVAGNEKKQNKKSEVVAANEKKQIKKSEVDFPVGCFEALSTNPDTISANSVSLT

SEQ ID NO: 139266 - protein, 48 aa, Heterodera glycines
MAQFPKSLFRCSFSQSVNYIIVKMTFKAMSRTRRVFLPSYCDKYMAIA

SEQ ID NO: 139267 - protein, 25 aa, Heterodera glycines
REKKIMFFSGTLYLLVHISFFRTVC

SEQ ID NO: 139268 - protein, 40 aa, Heterodera glycines
MLQAPTAPIDASKFVAYVHERRKKRILFKGEFLVNFYLFF

SEQ ID NO: 139269 - protein, 177 aa, Heterodera glycines
MSTSKRGTITRTVFRDSYKLIPIKLASFVKTFGLSIEGVENKKYFPHGFNKAENYGNVLDNLPPIESYHPGSMLPDDRKALESWYAENRETRFDLREVIADYCKTDVQILAHGLIKMRELFTQKTGADITDSITIPSACMRFFVTLAIWEMNALLSFPTWDTRSEGSKAPLRGNISR

SEQ ID NO: 139270 - protein, 95 aa, Heterodera glycines
MDDRSDAFIRPTAEAQRRKIAAPMPSAVMGCRHVNGQLNLANYCDDFWPLNVFRSIAFEVSNRKEKKGKGQLSSEEFFTDLLIFTHFPCFCPFTA

SEQ ID NO: 139271 - protein, 29 aa, Heterodera glycines
MTSSPSAIAPAFHPLIHPPPSEAGRKITQ

SEQ ID NO: 139272 - protein, 26 aa, Heterodera glycines
SSSYGPLIQTRYRMLVTNLSSRCSWQ

SEQ ID NO: 139273 - protein, 767 aa, Heterodera glycines
MQQPVPMRAVPQFLHPPPNAPEIGVGPIHDGQQPLPLRALPQFAQPPPNVPAVRVQPIQQPIPLRDVPLFVNPPPNVPIIHVQPMPQPLPLRDMPQIHHSPRNVTSIWIKLWLLFLSLWVFLQGIHVRQIQREYAVPQFAHPPPNVPYHPPENVPVMLGLVSHISGCFSASATTATTAPAERRATIRPPAAKRTGLFYALEIARTYQLIGKSITENKFRYLMKTEKKQREMAMELMEKAGISTDDKTFGTQHLEAVQKYWDREFPDMFRIVAFEMKTGLRPIFKGEGVRKNEVGVIREGDHWDGIKSASWFFGVRYFCVSCEVTYDRPERHRMECKERCKKCCRMGFGFPCTDVCDEIHCGECNLKFYNPECFEAHKKAACNEYKKCDKCGEVYQTRSKHVCGEKFCKLCKVCHPGRQCFIKKIQVRPQKAYRIVAYDLETTVDGGEHRPNLVSAARTCNICAGEERECEICEGPSKITWSVADGFDPMSEFVVWIMGFQRFETIAFAHYAGRFDSHFVLSELTKKEIATELMMADLKIYQIKAGRVYFRDFWMLSQNKLADLPKTLGLKTAAKLYFPHKYNKNENFGKRLSNLPPLEDYCPDNMKEEEAVKLEAWHNENFQKEFELGEQLKTYCENDVEILMESILKFRRLFLGITGDLDVMKDSVTIAGVVMKIYRAKFLKDRHIPIMPEECDVKEELKKNKEMKKFFESVPDKGPINPRDAYAGGRTMPFCLYAKTTEEIEISMFDIISLYPLLIMVKICLLFC

SEQ ID NO: 139274 - protein, 83 aa, Heterodera glycines
TFIFEGIFKFILYPRKMSISFFEKFYTSQKRLRMRRRAVHNRHFISQRIFIFRGYPRKMAISFFDKFYTHTNALEHDREGGAQ

SEQ ID NO: 139275 - protein, 88 aa, Heterodera glycines; identical to SEQ ID NO: 124691

SEQ ID NO: 139276 - protein, 287 aa, Heterodera glycines
MQIGYGRAPAAAAAAGNSQRNNNNNKDDSGGGGGGGSGNDRRSEAENNASNPEADDDDEKGGATADQLYEEKQHYVHRLERFALQRHVTEFVLNGQHERPDEALRDAFERIIKRAIRNAEQQQQQNEQQSRNQEEEQPQDGGGAAQQNPRRRVTKIGIFLDGNGLTDPIVLPIRPPEQNTADTLMGELEKLGQSDGDEDVHGGGMSKRSLLLSEPVQIVITCIAPPVGAAPRFHHYQHWGYNERQLIRIRNVGDHFCLFHALIAARSYTDHDLTKMIATQQQCQQGD

SEQ ID NO: 139277 - protein, 47 aa, Heterodera glycines
MADTSALYNTSDIGERKWLLDLLMEESDPDSGGEEHITEQDLKEIVK

SEQ ID NO: 139278 - protein, 103 aa, Heterodera glycines
MASKKPQELGVAMRSLGQNPTEQEILEMINEVDIDGNGQIEFPEFCVMMKRMMKETDSEMIREAFRVFDKDGNGVITAQEFRYFMVHMGMQFSEQEVDEMVGI

SEQ ID NO: 139279 - protein, 434 aa, Heterodera glycines
MVTIRRDVSIFAPYTAHERFIVIGEREYLNLGVKNELKLTEEDVQIVNEKGNKDVQIVNEKGNKVYFIRAPGNYSISFKRINVLNNLAHLSGELGITLQVPILAHLSGELGITLQVPILEGPAGIRFDVPYTMVPETGLLIRFDVPYTMVPETGLLNQQCDEFSGIVERDKRQYCRYCDLCGLTDQIENRLTRTDSDGHRFLPASGEEAPFSPRCEKIDARTYEFRRTINLPGRRELEQKARQKISGVDAEIRKRLNKGRGRFQVFLNLISADQPPITQKAWFDGSEQCRCCGRDKDPNCRSVLSFLYCNVEDCKSAYAQQCLHNSARIVACYTVEFNYRMTTRRDEVQMFLRENNYPDQENNYPDQDAPGTAPPSPATISANEPYPMSLLSFHPHTVPLFQVSQMETRLTHLRRYCTIFWNEKLCCSHCPGIC

SEQ ID NO: 139280 - protein, 75 aa, Heterodera glycines
MAAPKWPRQNGRAKMDAPKWTRQNGRAKMAAPKKLAPKKLAPKKLAPKWADCEISTKKSRDDCEINRDITKKRTN

SEQ ID NO: 139281 - protein, 84 aa, Heterodera glycines
MSSNANEQSDEIFATITIHDHHQKQRNEQRQIDIRLMRAEEVQACAEIIRDAYLGSTAQTRDGMEFRLPVSGIFGVRIPISEKF

SEQ ID NO: 139282 - protein, 437 aa, Heterodera glycines
MTEHNFEQIRRTNSSIIHEGNVQFANEMDENEIRRRLLKVMMRQDGSADLARHGNQNIGHGENERPLFDEAQRPAIPRRTPPNPHSLMQSGNQIHQRHNSQNIATINHRPNGFEDNERPVPNPGLIFDGMMAQAIRSMDGFSYTMTLNTIPNLDGSRGSDSVNAFFKQFDIANEEWPEQKRVRALRSKCFGKAERAFNSAVAENRHDYQLIRTSIIRQLDDTDAKQLTAFDQLIKGVWLRPNEGIDQLGERVSRLVRCAYPGLSEQLYDEYSAMHFIRALPNSELAMTLEMTRKPGATFDEFIAQAARAEAVQNAARNSWRNSQNNGCFQNQRRHIVCYNSGRVGHTSRNCYSQPTHQTHQFSKNCNLRSTPPPLLNQQNDEPPKKGNLLVGAINLEHRPEIEKFFGKATNESDKGRFLEESPAAGKILATKVSGVG

SEQ ID NO: 139283 - protein, 124 aa, Heterodera glycines
DHLAHKQNEQKELWVKVDELEQRQTADSEQWNTAKEGILVKIDERSSQTGSGTGFSGIRSGDFLEIGIDWIMRDRIRNPVVFENTSPVWSDRFAVASSGVKASETADRTQRTDGESGRDGKGKK

SEQ ID NO: 139284 - protein, 19 aa, Heterodera glycines
EPVNSCIGCKCRRCCTPNS

SEQ ID NO: 139285 - protein, 195 aa, Heterodera glycines
MRDNGWTLRHVESPGGEYKHGNFLLDGMLERIGEDKNLAIEVNGCYWHACPHCFPEDDAIVGGGETAGAIRARDEKRIRQIARDFEVEIVWECQLGRMLEVDPPMKAFFDNTPDSGPIDFHDAFFGGRTGPEWLGASIIPDKEGQAGRTIKVKDFNSLYPSRNMFTNYPVGHPKVIQMDKGRHWTAKDTLWTTTA

SEQ ID NO: 139286 - protein, 146 aa, Heterodera glycines
MPPQSKERHHEVNIDDANVHRKYMLMRGTGHYNLFYYNCKHWAEEFVINILAKTRNKDEKCGCLQFHFRAKSIEAHRNSRDYVNLVRFECTNCRRENMIISILYTEVGKGTRYGVLVMIQAELWGPISNSNWPVADEGHLIMLCFL

SEQ ID NO: 139287 - protein, 53 aa, Heterodera glycines
MHMVSLLLISTIPMLLLIVFTAVIGARVIDGTTAMDLLAGDSELKQSQSKQFA

SEQ ID NO: 139288 - protein, 92 aa, Heterodera glycines; identical to SEQ ID NO: 129555

SEQ ID NO: 139289 - protein, 85 aa, Heterodera glycines
MIGRAVRNRPFIFEGIFKFILYPRKMAISFFEKFYTSQKRLRMRRRAVHNRHFISQRIFIFRGYPRKMAISFFDKILYTYKCSRA

SEQ ID NO: 139290 - protein, 358 aa, Heterodera glycines
QIGICSVFYVFCANHIKEIFKFVDFEFPSFTYPKYIWMFSIFVPMVLITFVRSLRAIAVLSSIGNVFCIAALTFIFQYLFRAKHQNLSDFPSNTYLFRAKHQNLSDFPSNTNFDGVMAACGAVLYSYEGQAMVLPLENRLKKPVLPLENRLKKPSQMVGFFGILSVGMTVVTAVYSASGVLGYITYGSQVKGSITQNLPQNEIFVIVRLLFTLVMFVIVRLLFTLVMFFGFAIQMYVVVEMLWPEFVKFLRNSNFGVNNENDHKNMVGIELLFLLIGLAVPELENIIPLVGATAGMLLALIFPALLDLLVFLPIHLQRHRIRQTFWLLLDNWTLVTIGVFGLIAGLRANLRNIFTPAE

SEQ ID NO: 139291 - protein, 55 aa, Heterodera glycines
MGQEKGQNMFRPRDILADICKQNSAGHYNCQCGEGATFVDGKCQIVAACQVNEQN

SEQ ID NO: 139292 - protein, 94 aa, Heterodera glycines
MMLYSSPKTEKYHCKNFYFDGFLNNLIQKTQKTAEKRQKQSKEWDDGEKMEIIKKYDEMIQEYKDKKGFGGESKIKIECAIAKQLGTSRAMVFE

SEQ ID NO: 139293 - protein, 57 aa, Heterodera glycines
VNPKKNGQCQRQTAPFDVRFDGVENGENELVQIRLRHRRRRTTALLHAFVVLFACLN

SEQ ID NO: 139294 - protein, 95 aa, Heterodera glycines
ENKKIDFFSVCWGLIHYGSKNPTQIKVQAIGSYPGGFGLPINLGASVRGDCPENKKIDFFKCPFGVLKQLWGAKIQRRIKVQAIGKLLPKDSVSP

SEQ ID NO: 139295 - protein, 101 aa, Heterodera glycines
MSEYEVVVEYLPDKKFGKKYIMVKRTDILATLKHKIREAYTKAYPTKMPFSIVQLVKKFKCAEKCGQEMRVEDVEQWYDDADAEKTMDKCGIGEGSIVFMF

SEQ ID NO: 139296 - protein, 109 aa, Heterodera glycines
MPLPVPHFSELKSAKECVGGFGIWLFQFAGLEKNRENFPKPGGWVGYMVYQMYYGQKCVSEHFIGKHGAVRQGFSLPVDKVGTTRQFCHSLIGHGIGQTVRHFFAEFRL

SEQ ID NO: 139297 - protein, 229 aa, Heterodera glycines
MSVRKCRSANVGPQKSVRKCRSAKVGPQMSVRKSRSANVGPQKVGPQMSVRKSRSAKVGPQMSVRKSRSAKVGPQMSVRKSRSAKVGPQMSVRKSRSAKVGPQMSVRKSRSAKVGPQMSVRKSRSAKVGPQKSVRKCRSAKVGPQKSVRKSRSAKVGPQKSVRKSRSAKVGPQKSVRKSRSAKVGPQKSVRKSRSAKVGPQMSVRKSRSAKVGPQMSANHFEFSFFKMF

SEQ ID NO: 139298 - protein, 121 aa, Heterodera glycines
MDLLFRLYAKDKDTQPIWNAFAAEIWPIFAPNIRHLKFNGDLENLRRHISPTILSDLNQLNSINSDTLGPTAIGDDGPNATDGQALSKWLHTPTKDGQPKQLSFWHFSECGTTKLLNDFKE

SEQ ID NO: 139299 - protein, 49 aa, Heterodera glycines; identical to SEQ ID NO: 130195

SEQ ID NO: 139300 - protein, 38 aa, Heterodera glycines; identical to SEQ ID NO: 129423

SEQ ID NO: 139301 - protein, 126 aa, Heterodera glycines
NELNYNLNIGFLLKDCTFFTKKDILRLYKRFHALNPEKVPGNMQGNQASIVKLTFEEVGKIPELKENPFSRRICEVFSEDGCGNLTFDDFLDMFSVFSEMAPLQLKLKYAFRILRFCLWHVFCDFQ

SEQ ID NO: 139302 - protein, 142 aa, Heterodera glycines
MPGAPSDVLWFFDAEEQKINPRWDSNPRPQLSVLCSNQLATQASSPLLSSLSYLRRRITLLISFTAVLAQGERVTAFITIGFIFLQFIAKPLTSLTLNMKKFPLLSMCQVDDGDFGMALLYPKLVSSARHFGANWRRSSGFW

SEQ ID NO: 139303 - protein, 97 aa, Heterodera glycines
MEQYGWPQFAGEEEKIRQAVQFPNKKHVDLKTAKQITFGTKKWTENENNWSNMIEQNGELERARSVVQLVEQQWHTVFLPTKNRHRHMLYNSDAIHF

SEQ ID NO: 139304 - protein, 87 aa, Heterodera glycines
MASLLSLAKVFPSVAPFGYFIDFYFDNLALLELARRTVDQSNDSYYRLAGSAIVEAPHVENGTITKWDVVYAPKRRFAVDMAGFAVK

SEQ ID NO: 139305 - protein, 93 aa, Heterodera glycines
MCQNMLLILFVLLLLHCVSVVRLDLRLRLPIALEQWEIGHWHESNWLISREQIGQWQKQGEITLSIFGSQSLQRIARVRQKGAQRKRTERAEK

SEQ ID NO: 139306 - protein, 74 aa, Heterodera glycines
MPMPLVRLAFPRSVFLLALFCRFASAEFRPHFSQWLAQRFGEDVRNNLESNHGYTFSELYGTTYANGDQGNPLQ

SEQ ID NO: 139307 - protein, 120 aa, Heterodera glycines
MIHSFVGLFLCPFSSFSLCSLLPDACNSLEALASKYAESDFPLLLPLSDLFPTDQPIALVPMANFPLLEGYWKAQAQIQADDGNAMEEEEDEQNEQHILTHFGTENWHFVSLGNDLHEDL

SEQ ID NO: 139308 - protein, 58 aa, Heterodera glycines
MTVIAFILPWVQAKANKMKYRKMSKKFMRHERELARLRFECRMCGGLEDSSGTIACFK

SEQ ID NO: 139309 - protein, 65 aa, Heterodera glycines
MSLFKKSGQNLVGYLQIRTNLTNQDTFILSDLNPPNQDKSDKSGQIAPLSPIINFDNFGEENAKL

SEQ ID NO: 139310 - protein, 60 aa, Heterodera glycines
MRNWWREWIPDENSSRIRGPTWRKSWYKSGSVYTKVSTKRATHVLRKCDQFQIIMINNMN

SEQ ID NO: 139311 - protein, 79 aa, Heterodera glycines
CFNNQIRSNKHQNNNNNQTTIFCCSVIHQQIHNFFNCVNPCIANCAKKKKNLRTDHNFAFYLAAFVSKMLSPDQLPDEV

SEQ ID NO: 139312 - protein, 118 aa, Heterodera glycines
MVINYCKMIKGELADVLTSFDHEIDQASVHRGKQIIDKLTGALYLGELIRRILAQLVMDRLLFSGTLVEALDRPDTFPTKYISEILGDNSGVFKNCRRICDELEVPSHGSNDYLIMRE

SEQ ID NO: 139313 - protein, 112 aa, Heterodera glycines
SLVKLPKQFFSCLSPFFATETNGRQLTTKNCRKCAKEILWSFFLLRRRFWVISFSRGAPGTTERKGSRGKGGQCQRGKVGKWTCRAVTRREFNSRNIYCICFCYHPFCNYFF

SEQ ID NO: 139314 - protein, 53 aa, Heterodera glycines
SAASNCTRRKWSFVWSIFASGLLHVVLLTPPHSPPPPTIYLIIIITIVFLSHS

SEQ ID NO: 139315 - protein, 70 aa, Heterodera glycines
MRAFVSHCGFNSVNEAVQFGVPILAIPLLGDQLYNAIMARVKGIAVQLDIGQLNREGAEQLLVDGLDKAN

SEQ ID NO: 139316 - protein, 21 aa, Heterodera glycines
MAISFFSWGFDRKLGTNICLL

SEQ ID NO: 139317 - protein, 19 aa, Heterodera glycines
TFSFSSLALPNTHTIFEML

SEQ ID NO: 139318 - protein, 19 aa, Heterodera glycines
TFAFSSLALPNTHTIFEML

SEQ ID NO: 139319 - protein, 19 aa, Heterodera glycines
TFAFSSLALPNTHTIFEML

SEQ ID NO: 139320 - protein, 19 aa, Heterodera glycines
TFAFSSLALPNTHTIFEML

SEQ ID NO: 139321 - protein, 19 aa, Heterodera glycines
TFSFSSLALPNTHTIFEML

SEQ ID NO: 139322 - protein, 19 aa, Heterodera glycines
TFAFSSLALPNTHTIFEML

SEQ ID NO: 139323 - protein, 43 aa, Heterodera glycines
MQFLFTKITIFIFVSVAFCAKDSKKAGELAVALFKFIYNNEKL

SEQ ID NO: 139324 - protein, 45 aa, Heterodera glycines
MTKFCAVPLLTANGGGNDFKLQVDTKNGGYGLGNRIFIVWTHKMN

SEQ ID NO: 139325 - protein, 59 aa, Heterodera glycines
RPAFASTPIGWALQMTKFCAVPLLTANGGGNGEAFECDDEQQNLAAAAGDNGVKNLVAV

SEQ ID NO: 139326 - protein, 121 aa, Heterodera glycines
MADEIQQKIVQGIGPDFFSVTSDGWSQITKSPALLSVTVHHINQQFVRADFVLDVIPMTNHTGADIAEEIGNALRTNGLNPEKIICLVRDNAKNMIRATNICLSWQDSFPKFGLGVLFFVQ

SEQ ID NO: 139327 - protein, 77 aa, Heterodera glycines
MEILLEVILGSSVEEMTEVLKVYSKQYGGNLSEDIQKIGEKAQGKNSKGKNDTEEAKAVREILGDRLQNLKERAAIK

SEQ ID NO: 139328 - protein, 63 aa, Heterodera glycines
MKIEKSLIYTESYVAGLSSVGVRNIGRATVKLGNPIQTNWSARLTKTHPKKGSMAFIFVSEYL

SEQ ID NO: 139329 - protein, 33 aa, Heterodera glycines
MARKDFRFPTFLGSEFRLPKFLMKSRKFFNFFF

SEQ ID NO: 139330 - protein, 20 aa, Heterodera glycines
MSQSFRRRREGETFDGPTEN

SEQ ID NO: 139331 - protein, 60 aa, Heterodera glycines
MNVNKEEERLEKKVTKWAIMLTSEDKVSMGIPQYGILEKVLTWNRNSAILPGPFCNITGF

SEQ ID NO: 139332 - protein, 42 aa, Heterodera glycines; identical to SEQ ID NO: 128558

SEQ ID NO: 139333 - protein, 187 aa, Heterodera glycines
MLTKPTTAKPQQQASQHRHPPSSTWLSNGQQQQQQHHQPPQQGTPPPPTAGRAAPGGKAAAGAENGNSRKTSANPALLPKMSTTSSTAAAAVPPGPKSSSSSSTAAAVAGGRPRPPPTQRTTSRDSASAAPDRKVSKQSSGSRGTARSAVVSKRPELRRAVLLANAEEHSHPDGLFKVVNQSESLIK

SEQ ID NO: 139334 - protein, 94 aa, Heterodera glycines
  unsure (1)..(94): unsure at all Xaa locations
FCVGFLLPHKCLSTSNGHLKKSIFLFSGQSPRARCAQIYGETESFRNSFPIACTIILRWIFAPHNCLSTPNGHLKKSIYFCFRGSPPEPMPPDX

SEQ ID NO: 139335 - protein, 104 aa, Heterodera glycines
MEICEERQNDHQKIDQKFTGTICKTPFSAVDEGTETISNEQHIRNCKEKEEIVNKFRQMKREFAAAKDKRPYEEINREIAKELGVSIRTISLWQRELGVDDVTT

SEQ ID NO: 139336 - protein, 43 aa, Heterodera glycines
CFAVPRTGRQWIALNLQEIRLAICGCKKLLGNELFFEVSQTPY

SEQ ID NO: 139337 - protein, 296 aa, Heterodera glycines
MRRRRRRRRGQQQQQQNNNNDDEDDDDNDGNEEGDDDHGHDADNEEEEEVGTNRSVRLCFFDAETSQDLPLQLRTKVVQKHVPMLIIAEIICEACINEGISVHSGVGQYANGCVCSPPAGPRGRRWCSPPFLNAPGDDSALPANVHYNPRRLFFHSFDDATNNDPVDDFINFLIGSGPHGVKTICLSHNGGKYDIHLILEALHRRNLPPKRICTTGLKIFSMTLKGNHQRHVIFKDSLNYFFCELDALPRTFGLNAEVATAKPFFPYLFIRRENLHQRLRGLPAKEFYQPDHMKAS

SEQ ID NO: 139338 - protein, 74 aa, Heterodera glycines
MQKAPRHEQIEHEQRMVRKGQQEANRHLQPKKRQQKEIQEVPHSTTEEQQRETKRQQIERQQNDEQRAINQQTR

SEQ ID NO: 139339 - protein, 18 aa, Heterodera glycines
YREAIPEGFGLPINLGAS

SEQ ID NO: 139340 - protein, 93 aa, Heterodera glycines
MSLPVPWLMKVFSVVANHSAVRQMSVGHVFGSIILQLATYASPTQVVLPMSRSVGCPMAIWPNDRFACHPSSDVWPFRSLQFEMKEGIALIYL

SEQ ID NO: 139341 - protein, 57 aa, Heterodera glycines
MYTKNVKYNSFFGFYTIKREVAISSKYHEIMKNEFPCVKFLLCSNNHKPPVVVVSVS

SEQ ID NO: 139342 - protein, 42 aa, Heterodera glycines
TVGVNSVWPTPSQQCSKSYNFFLCWPNFTIMVSFESPRCLED

SEQ ID NO: 139343 - protein, 152 aa, Heterodera glycines
MALLNSVTSVRCRTAEVSLAAIITLIIRVISLYSLNNHHSFVYLICQCQSVSALLQIRECRIGRIDEGALGGLFTVGSVQLQSNQIVRLSPGWSSGMDNVGKLVFTYNTVREPMVSPECLRHDGAQRFEFADNTLHCSCALQWMINAPEEEQ

SEQ ID NO: 139344 - protein, 284 aa, Heterodera glycines
LYKLCKIDPQFNIIETQKLLRKLPNKNGTSPDNISYKTLKNCHPSLATVITDLFRISLDSGSLPDIWKESIVFPLFKKGDKFNPENYRPISITCSLCRVMERILSQNIYNFLLKNNKISEYQFGFVRNRSTTSQLNSCGRLDAIINGKNADCIYIDFQKAFDSVPHNLLLYKLEKIGIRGKLLMWIKSFLSNRTFRVKIGDALSSNKVGSGVPQGSVLGPLLFLIYINDLPDALPSGVKIKLYADDVKLYISDTEIMHKALHNLSEWANKCRKKSFSSKNLYYI

SEQ ID NO: 139345 - protein, 77 aa, Heterodera glycines
MAEFTENLEQKNRRGAKGFYVDPALELRFLSAGDRNFELIRRYRFPDEEIDFISSLVKDDLQPKHGNKGNPIPVKLQ

SEQ ID NO: 139346 - protein, 135 aa, Heterodera glycines
EKKKLEEKTFDEIFGEKWEQKEEENGNNQNKNEQKKREIIEKFNKIKEKIKQKGGKYSKNEWDKINSKIAKTLGTNRQYIYEWIKELRLYKWHNKLKTDEQKIECVQKFITMKNEYKQKGRKYSKKQWNKNYAEM

SEQ ID NO: 139347 - protein, 181 aa, Heterodera glycines
MTGGFTIVLFDSSYRGGDSSIGEGFGGVFCLGGGGGGFGTVFAGFSLDAGVVFTGEGCFTAGGGELGLTSGGGVFVLVVVVVVVVVGGEAVLDGGGEGGEAVLAGGGGEAVLAGGGGEAVLAGGGEGGEGVLAGGGEGGEGVLAGGGGEGVLAGGGETVLAGVGVVTDLAVGVGGATGAIG

SEQ ID NO: 139348 - protein, 254 aa, Heterodera glycines
PLPSSVLEPILDRGNYDPRSAPAFVEGRPVEVRVGIHVQSIANFQLATMDYDMDMWLRMSWRDPRLAQNLSTPVLINDELFLRRIWRPDAFFVRIWRPDAFFVNARDALFHRVTRLNFYAFVFPSGEVFMEARLYLKPSQLVLCKYPHDSQTLRLRISSIASTYGSVRFRWFSAPSNAIRVHGQLQLPDLYIDGLQSGECRSARKTGNFSCLEARFLMNFSCLEARFLMKRSIGYHLWQTYVPTAREGGGGGGK

SEQ ID NO: 139349 - protein, 221 aa, Heterodera glycines
GGGGTVREETKGIKFVFVQRLSKTRTGSVESLIATAFLSPLIASPHSLSVLPLIACVLFSWISVWLPEEFVEGRVFVALTVFLTLSAESSSAKETLPKVSYVKAIDVWFGFTAVFVFTMLQALLVIGLEHMSGRARKTVVEQRKTVVEQAGELSAPKAIILMMDCRRYHRMARSLDDFFKVMYPVIFVVFLIVMYPVIFVVFLIIYIFVVIEGEEQKCLQQ

SEQ ID NO: 139350 - protein, 102 aa, Heterodera glycines
MADEASEYTDEEYTYEYEAKWGGEIGGHGKGTDEEEPEANENAAPAPVEELPKDEPKKAGEDAAAKKKETSPPKSLKKEGSPPKSPKKEASPKKEASPDKSP

SEQ ID NO: 139351 - protein, 146 aa, Heterodera glycines
MKSEGIIPIQAGTNKYASQRGMTGFGRPRDVVDKVKSENLAEITDEEKLASLKGSTWLQSGTNKFASQKGMTGIGTPRDVNYRTKGTGGAGEVPEDKARLTDGDMGKGGNGKERKPFKGIVPLQSGTNKLASQAGMTGMGMPRIID

SEQ ID NO: 139352 - protein, 64 aa, Heterodera glycines
MAGFGNKACFDLFMPYGGHSLVARCKDCVKYSCEQKCVYSIEGCQRCIRGNCANIGMANSFGTF

SEQ ID NO: 139353 - protein, 16 aa, Heterodera glycines
EAIPEGFGLPINLGAS

SEQ ID NO: 139354 - protein, 95 aa, Heterodera glycines; identical to SEQ ID NO: 130684

SEQ ID NO: 139355 - protein, 127 aa, Heterodera glycines
PSLPFQFGIPSHSGPAVGGVVGLTMPRYCLFGDSVNTASRMESNGKDKIVGDKTSIHISSSSNRFLTSVIEPSGEVIIKGKGVMETFLLGRIGEVGKGVMETFLLGRIGEVHLPKGTSVAEMRLMGK

SEQ ID NO: 139356 - protein, 136 aa, Heterodera glycines
MVSSHLFCIGNFMVVFLVMFLVLSFLLSNHNNGGKPEINEQFLVRLISLSNQNNGGKPEIKLNSFWFGSFLLSNQNNCGKPEIKLNMVSSHLFSIGNFMVVFLVMFLVLSFLLSNHNNCGKPEIKLNSFWLGSFFV

SEQ ID NO: 139357 - protein, 421 aa, Heterodera glycines
MSNSFFVFLPSNVTDYPDNQPNKFRVRLPKPLHFNGSWVCGLHSISYPYSWSTIGTLDEQWIDIHFTDIGVPEEDKHRIVRVPVPRSSHNRVEQLRDFLTTTLRNHANAKLKPLPREEEADRNRTKPLYSPPPAKRSIKDVNDLSLFPSPPRVDEPEKPPKSPPAHVPPTEPVTPPPASPPRVDEPEKPPKSPPAHVPPTEPVTPPPASPPRVDEPEELPLPLPAHVPPTKPITAPPDHKLESPPPTVKPSSSPPDTTLPSSTPVATQPPAPIPQPTPPKPSAPPPASTPPKPSAPPPTPTAPKPSAPPPAATPPKPASPPPPVPTPPKPASPPPPVSTPKTASPQKPPKTKLAPPPPPAQTQPSPVKTTPASKILTAKTIPRPPPPKQKTSPPEIPTRPSISPTLESPPRIDESNRTIVK

SEQ ID NO: 139358 - protein, 69 aa, Heterodera glycines
NDANFFGIHVYRYGKNENKCALNSDVSADRSILIQHHQRVALAHHHQHYSSSGHRLIKFDAHCCGPVPY

SEQ ID NO: 139359 - protein, 84 aa, Heterodera glycines
MSERVGLHLPGICSEYVPSAIESFNASEFEGVEIEGPIGVNITALLAAGVNLTELAEKLRNDTEVDQILSRTQDINRSVVAQHN

SEQ ID NO: 139360 - protein, 126 aa, Heterodera glycines
MNKTVFLILFGFAIGQANSDCCCLSNEEKQQLNAARKTIEKAFRDTLRLNTEARDFAAASHRAITEAEKIKVRHPEAPSMKTWFGRLLEGVRKVQGISEKINEEKKKIGHIRKEMDKCLDRKDVLI

SEQ ID NO: 139361 - protein, 112 aa, Heterodera glycines
  unsure (1)..(112): unsure at all Xaa locations
KIRLKCQISTRKCRLRFAFHFCCSFSALSFGXRCFLPFKGLFRPLSVSSPFSPLRLPKGSPVSRSSSEVAKSVRFDPFLMAKKCRSFADAQSQIVANLFANYDPNQRPPVRG

SEQ ID NO: 139362 - protein, 33 aa, Heterodera glycines
MPSTRQDAEIFENEMNRWRMEQKAWNLMIGQKR

SEQ ID NO: 139363 - protein, 63 aa, Heterodera glycines
MEVFKKRTIIGQNSARDSNADINGIDFTIIVVRPQPWANSHSRLYWPNYRFYSDQENVLKLRP

SEQ ID NO: 139364 - protein, 30 aa, Heterodera glycines
SYKFYEIFWHYKKIMAIFLSSSIFRAPGFL

SEQ ID NO: 139365 - protein, 137 aa, Heterodera glycines
MWATTNAEEYYGVPLGSLRNGTLGISGNVWLANSSAIQITDFKLDKNQKHETLFAFASPDAKIEAVKSLYKVITDDNGEEALTPMSGKKKHLGAISETAEEPQQRLVVMAPAGKSINDFGQFGVVNGKTMVCLFGTN

SEQ ID NO: 139366 - protein, 80 aa, Heterodera glycines
MDWICTDHFVCSVRVKRSLSALLIIHLSLCTFILSNTFCTSIIWAFFWCLPKAKYFVFQKGVLSSKYYITPLKPEKWANF

SEQ ID NO: 139367 - protein, 161 aa, Heterodera glycines
TEEILPTVPPVPGIDLDDYCKQIQQRFGNPKNGDTIRRLCFDGTNRQPKFIVPTIEYCLKTGQSIDGLALVCALWCRYCYGTDQKGQAVEPNDPAWPQLQAIASRARDNDEPTVWLSMEHIYGSVGQSDAFRVVFAKTLRHLWQFGTESALKRYLGNKASQ

SEQ ID NO: 139368 - protein, 243 aa, Heterodera glycines
MSDKRGLLRQILGEAEITVTTSGLTISGPRLSTPRFLPFDESGRCRSCKATEVEVDTMVTKEGVTIWCTRIDKVQFVPFDVVYELPGHCFFRLKNKSRVFNLPYGDLPSESCEIPLIQHVDEERDLKRKAKAALELVEAGLIADSTVQDGARLKKAKTAMKVISDILLSEPVGDDQKKTVEVAVVDKQPQEQQPAPVQEKPVTAPAVEQNTVEVKTEEEKKDDLGDIDKTLDEFFASLKAATT

SEQ ID NO: 139369 - protein, 124 aa, Heterodera glycines
MAQLKKARHEYLELVKVFMDELEEADLFEEQNVARVCIHEAGHTLILWFLRGSEKFLEICVVPDPNGDYDGYTASEPRAESTRSQIMAEIACYYGGKLAEELFCEKSIGHSDDMRQAKKLKKWR

SEQ ID NO: 139370 - protein, 918 aa, Heterodera glycines
MYPVENQGRGLPHIHLLLTLAEQDKLINGEDVEKKGISARIPDKELEPDMFDLVKRFMIHGPCGNLNPNCPCMEEFVDKNGMSGRKCSKGYPKAFQEETVVLENGLAGYARPNDGRIVEVFANGRRHVLDNRWVVPHNQYLLKMFKCHINLEKVNSVSSVKYLHKYVHKPPDRARRELEEKNDHDEVKEFIDARYVCPQEAVWRIFELPMYDRSHCIMSLPVHLQGEHICYFDENMEEEEIRERIANGSELMAYFELNKTNVLAKTLFYHQIPEKFCFKKGKWTERKTYFNTIGRMVKVSPAEPERYHLRLLLLNVKGACSYDDLKSVFDTNGNAKVCETFSAACLERGLIRNDEEWKRALEEAESFEMPWKLRAFFALILVHCNPAKPEALWNMFKDSLSEDFSRNFRKEVAYAKAYREIALSIMKAGKTLADFPTMEQINVDDDVEQVFDLAEELDLGQRNYALMYDEQRNVCDAILHRIWNPVNEPAFYFLSGPGGTGKTHVNKTIVHMLRGQKKKVCTMAFTGIAATLLPAGRTLHNRFGLTLDMSNSSISPRSKAWQELKETDLFVCDEAPMINKRAMSTLDEKLKEIMNNGIAFGGKVMLWTGDFRQTLPIQKHATRAEMVSSTIKRSAYWRLAKRYKLTKNMRALATEQEFARDLLEIGSGKWNNENDEIILPEDCISNGDLAEEIFGQCIVLENWNEMAKSAILAPKNIDVSEMNNKVLEMLPGEEVVYTSIDLAQDENRQRPDDYLDEYLNALNPSGFPRHKLRLKKNAIVLLMRNLNIEMGLCNGARMKVEQMQPNLIVCEILTGDKAGQTVYIPRITLCCSEDYPFDLHRHQFPLVLAFAMTINKAQGQTLEQVGIDLRKDVFSHGQLYVALSRARAWNKLRIRLDDGNLERKVKNVVYRELLDNSD

SEQ ID NO: 139371 - protein, 156 aa, Heterodera glycines
MKIFVNDKEAWEDLIGFVSTDKQQIIDTKIIFEKIKNSPILSNENEQNLATMFVHLNAGTAIITKIIKSNSFTTATTTLMATNRRRKRMDNNNNNQNNNNGYNNVYEMLRQAQLIHGRRRVADNQPTRVDCVVVVIILVGCALLLDSLSQYVVFQF

SEQ ID NO: 139372 - protein, 107 aa, Heterodera glycines
SLLNFLEPEQFANSEAFLHQFGQCQTEEQVQKLQEILKPMMLRRLKEDVEKELQPKEETIIEVQLSNIQKKYYRAVLERNFTHLMKGSTPSLISLNNTMMQLRKCCK

SEQ ID NO: 139373 - protein, 62 aa, Heterodera glycines
GSIFSLDFHPSGCKLATAGQDPSGAGLLIVWDLGFLNCPPDSKEFNCSQLPLTRIPHTSCTL

SEQ ID NO: 139374 - protein, 92 aa, Heterodera glycines; identical to SEQ ID NO: 125147

SEQ ID NO: 139375 - protein, 250 aa, Heterodera glycines
VFRVKRHYSNDSEESKNNDKKGHIVRRSLPTLFSNRVIPTRTVIGFSNLAYIEMLSDPREGFVFSVPDFLHVEVDFTVKRTDDIGIDPYRRALDLGFNSFNAFLHSEHMKKYIEIDSTGNVLSYHAILTPELLLTIDHIQRERQTFLSMKRIYPSRRTNGFNQSEEMGPLQFLKERMQKRELQAQMGGQTQEEETQSETVQEPSFVMNEGQYGIEEEFFEEIGENEQLGLDRIKWVQNDSDEEGEETLIF

SEQ ID NO: 139376 - protein, 176 aa, Heterodera glycines
MGNEPQNQNISELIDKIKTLRQEIQKYSFMVLEVRRNEVLLKKKNENLVIQLQRSESARNDLLRSNELLEQKLATQSVETDELKRQINSLIESCATATSNCFRNSPFNSPIGRRQKPPLFSKQKVIVGLSPPTPLPKPIQKTTTLTQSALNASICFAIPGFVQLAAKNEFIVCSEP

SEQ ID NO: 139377 - protein, 132 aa, Heterodera glycines
LFFSFLQIKIGINFQFLIRFNPYDRAPMRTLKIADDQSKDTVLFYTAYQRDTVLFYTAYQRFAQLANHSDNQVTLTLRPGTVLFIDNFRVMHGRKAFQGERGERVMCGCYLNRDVFLAKARPKLSPEFYRNV

SEQ ID NO: 139378 - protein, 232 aa, Heterodera glycines
EREGGRERERERGGGEERGSRNTRRSDQFSRTANATERNDDVKTADEEERHPSVEGGTGEREGEGYTNKNENVCISTTESRHRSVNKIQFENGHCQRHFTSQMRRSEKERRRNERKQEGKAAKTLSAILFAFIITWTPYNVIVCLEAFYPNIVCLEAFYPNSVPSYLFTLSYFLSYVNSTINPLCYLSYVNSTINPLCYALCNARFRMTYLRIIKCKWRHSPIGRQMYAADG

SEQ ID NO: 139379 - protein, 20 aa, Heterodera glycines
TDQKRTKLCRDTERKRNNLF

SEQ ID NO: 139380 - protein, 53 aa, Heterodera glycines
FEYPKRTLEKIDFFVFGAVPPNRCAQIYGETESFGNSFPIASTLILRWIFAPP

SEQ ID NO: 139381 - protein, 59 aa, Heterodera glycines
MLSEPNFLSPANLEALLMFRVNPQRYNERVKQCVKESNVALESDYRDIPNDGGGRRASI

SEQ ID NO: 139382 - protein, 108 aa, Heterodera glycines
MSDRRREAEEKMAKAIFISADCWLSVFDLLSPRKLGLGVALISHRFDFYVDEHFKTRKWALKFIGIGSKIGKNGTKEMEITNYNRKALPIPQIQMPRKVTGFERIIIK

SEQ ID NO: 139383 - protein, 27 aa, Heterodera glycines
MSRFSNNQAIENTYGYRMKYTLKIWLV

SEQ ID NO: 139384 - protein, 83 aa, Heterodera glycines
MTEEQNEPLEILYTLTAVCVNSRRMWTGIKRCALLKLGYLKLQLGTEQGCDLSQKRREQEFGESCHTSGTEAIVFFELPIDKI

SEQ ID NO: 139385 - protein, 1181 aa, Heterodera glycines
MNSMVLDNKIGEGEEVPNLNVIREDDPVNEFLGFLHYDQKLGHHIAKAYNETVFCAAKNQIPKRVVDQILQLTFSLAIRITLCVIIFPFQIIRIDAQTKKHFWDEIKANSAIEPQFIAMRKIIRIWIITYDFDVHRVKKVGNSFEHEVTFAAATVICTNCINNGEWKNSLEGKQCAICGPNRTITFSPFDYKETTVDQKIVTQQTLREFVQWLLFEQNKKYPTVAFAHFGGRYDMTMIIKEVIAQGVHDPQIIKQGNRLYELKIKDNEHAPLTIFHDSYNLMPIKLSGLIKSFGLKIQDKQHFPHMFNKSSNYENVLTNLPPREEYCPNQKKKTDLQKFNEWYNTNYDQHFDLKEKLPEYCCNDVKILTHALVELRREFKQLTQREGNHGGIDILWQAMTIASACVKNFALNHLRSNSLAIVPEKGYTPQQNQSALANKFLDWYSHINNVHVQTASSRYGEYMFKREGQVYQVDGYIKGTNGQRDKIIEVNGCLWHGCEECFDDMDEETRMPNGKTLGELRIREQRKHEILRRYVDLEVVWEHEINKQMKKDKEMREYFENWKDCSPIKIREAFHGGRTGPMKLIHTAKPGQKISYKDFTSLYPFTNFSTKYPLGHPKIISFTTNEQTVNWRSPTDNPYKGLLKVLLQPPDNNVKITVMPIKFDERLLFPLCEKCAKVISNKYPKGLKDDNYSCPHFNTNDRAFVSTCTHLELNASLEAGYTVRKLFHVLQYDQWSDNVFKSYVSEMMALKIHATGYPSWCNNEEEKRKYIDECWRKFGIKIEDNKMKADPGKRYIAKLCLNSLWGRFSMRNLLSKAIIDNDECLIRQYSDDKKIELIDVELMDEDNDVYMLTYKPKEEFVDENKYSNVVISLFTTSMARLYLYEALKKVADAPGCEILYYDTDSVIYVHPEDNDPLPTGKGHLGELTDEKPDHDILEFISAGCKNYGLKLRRKDNGEIEYDLKIRGFTLDEQTVQKIHYDSVKDQILRYGTEDPADPIIVTYPHFIRPNLIKGKVYTHSFTKQYQPIFTKGHPSEMKVDELLIIAMSSLVRECLDWGPKAKPDFLVSSKKALQSVVAKDPEIHSSEKTAHEKEAEKTVRKSKYEYNLLDHQRFFWKLARPKFAVMNFLCPTCRRINYKHKDQFKLMGEDEFHFTQVMCQGCVKYNMMQTDIYIKHTKNPH

SEQ ID NO: 139386 - protein, 544 aa, Heterodera glycines
MYKNLLKPDAGEINVDNAKNKLSSLLKQRKLDSGTKNLLYNQELRRFLKLRKEIEDKPVKVELTDGSLMVFNPRHREKDRKIPTQIVKEDDEEELDETGSIPTFEDPYATAEESDAEPTTTTTPKSRPLFRPLRIGTSKFRQKQKSFIDRKQQKIMSIINNDPEKFGVGSRGHILRADGTAYLKSNIKQALERILRRSPENAPSPIGQERLYEEAQKYDSSITRKDVEHFLEGDRTYTLHKPRRVRFKKSRTVPAGFMTDVQVDLADFQKLSRENNGFNYILLGIDVLSKRVFATPVKSKNFKHMREAFDKLISQMPMVPHRIFSDRGTEFENREIHKYFQEKNIQKHKAHTSTVKAALAERCIRTLKQRLYRYFSQSHTIKWVDVLPKIVNALNNSKSRITGMKPVDINPDNAQKIWKKVYGNEFSRKTYRRPRFKEGDHVRLAKYKSSFEKSYLPNYSDEIFQVYDIKKANPYRFGIKDDKEEPFDTRFYAEDLAKTRKDAETTYRIERVLKTRTRSGHKEHLVKFYGYKEPEWIKDNDIER

SEQ ID NO: 139387 - protein, 127 aa, Heterodera glycines
MTFQSLGLNPPAFQSLRLNSQAFQSLGLNSPAFQTMGLKSPAFQTLGLNPPAFQSLGLNSPAFQSRGLKSPAFQTLGLNPPTFNDIPISGTQSTSISISETQFSGIPNNGTQISRIPNTGTQPTNFQ

SEQ ID NO: 139388 - protein, 204 aa, Heterodera glycines
MQSPNLPPVKVFEDDLDENERKLREQINKLKEELEKTEEKKKVIEKRRMEQMKLARVDEVVLEDEEDEEEEEPTSKKSRLNPTATKEIVQKIINEELVANDLVMIDPRGINDRNGPEDVIESRRIEDGIRAKNRSVNEKAMREFVMTKTSLDHAKEIRTRAMNEVKYAEKPTDPSRLLRGEIRAAKWTFAKSKRRQFRLKGNDW

SEQ ID NO: 139389 - protein, 95 aa, Heterodera glycines; identical to SEQ ID NO: 128210

SEQ ID NO: 139390 - protein, 40 aa, Heterodera glycines
RPIWQVKQRLLTSQKVRCRDETNQHCLPRGTRHGPPKEWI

SEQ ID NO: 139391 - protein, 58 aa, Heterodera glycines
MTAQRNIWAFTFCASLQRMELMDPSKGFYDKIEDKVTLAIDLTVGEEKGTKKRKLTDE

SEQ ID NO: 139392 - protein, 176 aa, Heterodera glycines
MDALLSDLNQTLNRHKNNAEVAHFVQNLESILAENPTDPPVEYLDFDSENSSDSTSNSDNEELFVESPNRDPRQQKYPIETQRKIVQLLDEGTSYNQIKHLYRKIKSNNEIARIRKYVASGGSKPEKISVIDRHVFERFYEARSRNEAMHDIDLATLGLLKAREIGLQDFKVKKLT

SEQ ID NO: 139393 - protein, 23 aa, Heterodera glycines
FLKFYCLFASLGFFQKMFTNHLL

SEQ ID NO: 139394 - protein, 84 aa, Heterodera glycines
MTNFCSVFQVWDCAWASDAHLFATCSRDKTLKVWRICAAVEHQQQQHDEELEEVKQIANFVGPAPQTAVDIAPRKIRDRLYENH

SEQ ID NO: 139395 - protein, 141 aa, Heterodera glycines
MLPWDNNVLTFFKHAQALEEARAGGPMRRCGGNYKYAYYKCTNCEYRTRIQKIQGEEESGMFKKLECTNIESDQKTPRPTSLVCAKDWNAQPLRVWSRRLSAKKTLPEPGARCGGVGGIGSMHITNATSTTYTYYVCVING

SEQ ID NO: 139396 - protein, 62 aa, Heterodera glycines
MGFESDNQVHMYTFYEDSPSMGLIASTEIQPNNAKSQELADWVKGQIEGKFAAKIVHELELE

SEQ ID NO: 139397 - protein, 45 aa, Heterodera glycines
MHQSLAFKIIAILAGILALFGPIDCRATHGTCVHQGRQYREGEEW

SEQ ID NO: 139398 - protein, 106 aa, Heterodera glycines
MFVPIHLTDGRVISLPIDSQSTAFELCEMLCQQICLKDAFGFGLFLAVGRRFIRSLGVGSECVIDAIASLETKSEKNWRIFFKKELFRAHQSESDDPLAIELTFRQ

SEQ ID NO: 139399 - protein, 262 aa, Heterodera glycines
MEVDEHDDIMIIEPQTSGQAVDAILTQAQVAGENQADMLGLVSESCIPQEPIAQADDVIFVRPKTPPRRSLRVQKRLSASVSRSPSPAPKRPPPANSLGMATPITRRCSAFHKGWQCAAAAAKHFPEYCDSGKLGDKKCADCGAHLFSHEDSNICCRKGRVVLPMLNPHPDELKELIVGNKQSREGKEFVRHMSRYNNLFQFASVSAGNKPSPAGGPMAVILNGEFHRRISSMQAGNTQIPGFGQLYILDPSRGYGTTPKHP

SEQ ID NO: 139400 - protein, 102 aa, Heterodera glycines
KERRVAKTSVGKRMVLKQRQMNGSENNNNAYQNREVEIMRSQKRNIAMPPIAEETSLVHRSEILQRLDHQMRKNPNFENRIKSMLRVWTDDMSSPAIGTSIL

SEQ ID NO: 139401 - protein, 46 aa, Heterodera glycines
FAQAVGGRAKSTADEAGRGGGVGEEVQGGQGEEPAADPAEAGPAKG

SEQ ID NO: 139402 - protein, 68 aa, Heterodera glycines
MVIRRGTMVMRRGTMVIRRGTMVIRRGTMVIRRGTMVMRRGTMVIRRGTMVIRRGTMVIRRGTMVIRR

SEQ ID NO: 139403 - protein, 205 aa, Heterodera glycines
HHCTSSNHHCTSSNHHCTSSNHHCTSSNHHCTSSHHHCTSSNHHCTSSNHHCTSSNHHCTSSHHHCTSSNHHCTSSNHRCTSSTRGKRLRARTSLTKFKKRARSSRLTFNFCTSSNHCCTSSNHSCTSSNHSCTSSNHSCTSSNHSCTSSNHSCTSSNHCCTSSDHSCISSNQSCTSSIYFCTSFNHRCTSSDQCCTSNHFCICS

SEQ ID NO: 139404 - protein, 101 aa, Heterodera glycines
TDTKVILRGTTLVRRGTTVIKRGTKVNGRGTTLIRRDTTVIRRGTTVIRRGTTVIRRGTTVIRRGTTVIRRGTTVIRRGTTVIRRGTTVIRRGTKIECNLL

SEQ ID NO: 139405 - protein, 170 aa, Heterodera glycines
MDGLSLDIVLQSVGRVEEKWVGRIAVAVINGLTYLKEQFNILHRDVKPSNILVNSQGEIKLCDFGVSCMLIDSMANSFVGTRSYMAPERLTGARYSVQSDVWSFGLSLVELVIGRYPIPAPSRREYAKLFGVHPNDVKMEKNGTEEEQTADDLTPKTMAIFELLDYIVNR

SEQ ID NO: 139406 - protein, 133 aa, Heterodera glycines
QKFEQNNNTEEEKEENGRGGEEGENGGRGEEANDGEENEEKEEEEDEQEESIVEEEEEEEEGEEDGREAFLEELEGTMDEEEEEEEEKEEEFVGEENEVEEKEEEEEEEFLDELEGERDEEEGALGGKKSRIL

SEQ ID NO: 139407 - protein, 127 aa, Heterodera glycines
MPKIKSKSASFREWIRRIGGTDFYSTTGKIIYCQLCEQQIPCTQFAHLKQHNETVKHKAKLERNKGGQQQQFLTTPNNVPNQFNLDLCEAFVSANIPFQKLENEKFKFFLGNAPSLHTSKKLLAVDF

SEQ ID NO: 139408 - protein, 57 aa, Heterodera glycines
RKELKKRISALKFFHLDVTFRHWKSLFWGFVTKIVKNHYFGVLSLFFHYFDIFWKIL

SEQ ID NO: 139409 - protein, 36 aa, Heterodera glycines
MTKPDTLAERMNLLLSTGLGADVYFLVGEADAKEAN

SEQ ID NO: 139410 - protein, 68 aa, Heterodera glycines; identical to SEQ ID NO: 131735

SEQ ID NO: 139411 - protein, 25 aa, Heterodera glycines
KRAPPSDIPIFPFHNWPKATVLIDT

SEQ ID NO: 139412 - protein, 347 aa, Heterodera glycines
MYNPQGIITLAQHKVEELEALADIDWRLHSCFNLSCVHFSLPDPPTSIAKNTDAAIEEFFFGDDDLNLPPGQPNPRPQPNTPPPLNSDQQKVFDAVLLAIQSNPRDSTVPRRFFIYGDGGTGKTFLFGQIIRRLRKAPYTYKVLATASTGCAAILLPYGKTAHSTFRLGREVSLDKLPSIPLESFFARRIREAQLIIIDEITMLHNTVIEVIDRVCKEMAIRQHKDLLFGGKTVIFSGDFKQSLPVVPHEGLTAQVTACFQTSPLFGQFTTMKLTINQRLGQGQQAYLQMCRQIGLGETGEHFWIPPQFLVKSKEELIDYVYPNFQQLLGNDKELLNRLILAPHIDT

SEQ ID NO: 139413 - protein, 85 aa, Heterodera glycines
SLRSVANIVLCHPTENVPAKAAPATRPRATHCQPGHSSENGTVQPTKTSSLISSKNGCAEAEEEQCLFVEHFGPIPQYSETDEKE

SEQ ID NO: 139414 - protein, 176 aa, Heterodera glycines
PAANCAAAPTNRQTLAAALAHPPVGHSSRRRRRPVANMDNTLDGLVAKRAEQMPTPMKRRYQSETEAIELPDDEQETKRMETRMETDPDVCTRMCSVCGYQGKWVSEMIRHKRVHTAERPFKCKYCNPFKCKYCNRTSKWKADLIRHVAKTHGIRVVKYSRTKAFELGKTPTDADA

SEQ ID NO: 139415 - protein, 178 aa, Heterodera glycines
MQKLVFPLVNLYKDNCLQLMHEKLKNQQLDTWAQLKNAILKEKEAREQKMKELMSQKTNKISTKRPKERVNKNIYKVLDVDQTLIVQGIDYHYFYRFDANAISCRHCPYRRPAQKNLKPTSTLKSHLKTHHLTVLEQYRRSNDILKEDSGKEQKEEGGGTIKTEAKQWESSIKTESLG

SEQ ID NO: 139416 - protein, 129 aa, Heterodera glycines
MGLCNGARMKVEQMQPNLIVCKILTGDKAGQTVYIPRITLCCSEDYPFDLHRHQFPLVLAFAMTINKAQGQTLEQVGIDLRKDVFSHGQLYVALSRARAWNKLRIRLDDGNLERKVKNVVYRELLDNSD

SEQ ID NO: 139417 - protein, 18 aa, Heterodera glycines
EAIPEGFGLPINLGASSV

SEQ ID NO: 139418 - protein, 139 aa, Heterodera glycines
MALSLLVPMLAQCCGGTRMAAFTSGDNSPNEPPIRVYPCGAGPTGSRFRVVPAKFTGSHKISPTKVFLYEMIILRVRLGPLDPSLDRSMTFRAGPVPVMEEIAKVQPGSKNSKAVSPSIDEQLLLDQLVDSTDAKPLIR

SEQ ID NO: 139419 - protein, 104 aa, Heterodera glycines
QYETDELIARNLLLQALLQAVKSKKCDLKHMGTILYCASQNQDNRKCCSHLNLSDAKLGVGERCLRFCDPGGEAGISSIARSDVTCLFNWNVLMYCHHSGIKMV

SEQ ID NO: 139420 - protein, 213 aa, Heterodera glycines
VDKSLHQSLSFQIQSQLRNPRKMRLFSICLLLLPLLLLLLLPPPFANAFEEEEEEDNEMRAQGQLSDEVIVANANDDGGPNSEQDEEQNQMRAQRPTPLPWQPTQWPTKPPQYPPGRPWPGSSNGKGWGNKPWYGNGNYGKGGGGGGRPNHRSGAIMLQPATPRWRTPPPFFPTRPTRWTKFPTYRPRPRPTRRPLMPNFVPQNVIPGMPSSY

SEQ ID NO: 139421 - protein, 203 aa, Heterodera glycines
FLGLFFNSKNPNIKFLLFVKIRINFFQFLGARADERLLGKASNVPVGPAPPNPLFSTVNQFMLQWTRRLRDRGTPISDYELEIRERGTKLMAGHTNQGGGKHEVIGVKRQHIYEFRVAAVNAAGQGEWSKNSVPIAATPSSCKPLITKGLFACDMTVLVGEQAKLLVPYAAKPWPKFVWSKNGEAMDVCADPRAEEKISGKTR

SEQ ID NO: 139422 - protein, 109 aa, Heterodera glycines
MSKQISSAGTWPKQLAAKLCAIYDFPVAVPCCNGFTSLVLALRSANIGPGADVLMPSITFVAVSNAVLNVGANPVFVDSADEWDYNPSWSLLLRAATQKTRHEKILETF

SEQ ID NO: 139423 - protein, 145 aa, Heterodera glycines
MSELCHLPNRYRKIYRNCAVSCTSVGTRSSVRQHATKPFDASCSCAPLSAVGFSLRLGTVEAVVVPNGSSTVCWKGLDTTAMSRQNSMPRELHVDELPVDELHVDELHVDELPVDELHVDELHVDELHVDELHVDELPVDELPME

SEQ ID NO: 139424 - protein, 147 aa, Heterodera glycines
MAPSDRPTNNSVSDKQASAVIDWELFSANAILDGSESITKSSNLSNMYKPVPSENSKVTIASAFGLPGAPSVSKCHADFLYFFPNEIVQHHELAATTITSVVAPVVLLCTVGVVVAIGVVVIGVGICAVTVVSLVPTSAMPNWNCWC

SEQ ID NO: 139425 - protein, 47 aa, Heterodera glycines
MKFGEFVNVKTVAFSQYSFFKILLSTVISETTICVIGTPSAALIRST

SEQ ID NO: 139426 - protein, 182 aa, Heterodera glycines
MFFVRFGPRGAQEKNRLLPKNPIPSSNNVNPSNDHHQQQFINNTISPQNVEHIVHVERIKAADGVPITQIVVSEITERIYAVRDKLGIMRCHFYTCENATVLTLTNSPNFIYRLAEDAWNGFLYYATTAGDVFTTPMLPLDASQNYSLSITRRLAELPAVNSLEVDLAEQKLITVSRTGQLI

SEQ ID NO: 139427 - protein, 27 aa, Heterodera glycines
TQTQGGIELETPFLVTNSQTTKTKKPT

SEQ ID NO: 139428 - protein, 194 aa, Heterodera glycines
TLLVESGANVNLGDSEGVTPIMITSRFGRVEPVHFLLSHGANVEQMDYSGMRFALLDAAADGHLEVCRLLVDDWAADVNQQAIDGTTPLMGACSFGHFEITVFLIEHGADIDHADMDGYNALMWAVKYEKAGVARHLLAIGANADQVGIDGKRAIDLAQEGRRAEMIDLFRTTANNEQREDGNAQQDEQPPQQQ

SEQ ID NO: 139429 - protein, 265 aa, Heterodera glycines
DLDGQILHGRNLDYGWTQLLKSHHIVVDYVRDGRVQFTGIQFILYSGLLTGQRPHAFTLSLNARYSGGPWDNLLMSGGPWDNLLMALITRFRHPIAFELRKVLETVDNYQEAVDKLSRITTVAPSYLIVGGKGDGAIISRDRFGVADRFGVADVFFLDYLHHRWFLVETNSDPWERMTDKRRTKAAQCLRRVGQRFITKAAQCLRRVGQRFISPIALSSRVLAIPPVRNEQTIFTTVMQTIFTTVMSAEQPNLIYNFTKVWPNAE

SEQ ID NO: 139430 - protein, 127 aa, Heterodera glycines
NLKQNELCTFQAFTCDNNNSRCRRVTKRRKAKGRNGRGINGRGKRTERQRHQQQQQRRSTDQTDQKPHPTRCHVRQHWLVHLAHSTAVQKERVDDRGRAVCRTVHQLLLPVSAALVVARAQMPRLFG

SEQ ID NO: 139431 - protein, 94 aa, Heterodera glycines
FEYPKRTLEKIDFFVFGAVPPSRCAQIYGETESFRNSFPIACTLILRWIFAPHNCLSTPNGHLKKSIFLFSGQSPRTDAPRFMGRPNPSGVASL

SEQ ID NO: 139432 - protein, 84 aa, Heterodera glycines
MMADFRRRTEAEEEAILRCVVKEQKDGQSGDQQQLDEQQLRQKGANVDYMEMGGEEEDGLSNGGGRKMLKMESSSPVNNSKACG

SEQ ID NO: 139433 - protein, 16 aa, Heterodera glycines
EAIPEGFGLPINLGAS

SEQ ID NO: 139434 - protein, 84 aa, Heterodera glycines
MIYLFPFSFKGNLSRIILPHLNFDLLGIEFYVKFPTNLLFTIAFSSNAPFLYMFSTDHQKAFRSQFKRIFGKNESKHLIVAFAN

SEQ ID NO: 139435 - protein, 81 aa, Heterodera glycines
MRSFFFASLALVLICASTTVSKPHPTPAPSAKTNEKGCYQVCFVVVCINICPKAKVGIFLFIKLWVQNLCAKIIQFNCQER

SEQ ID NO: 139436 - protein, 128 aa, Heterodera glycines
MLDLLCKVLLSQLGVSVEVLAESVITVAETIRANYANQEFFAQSTVADQDGVRPALLILLLSMTSERQPFRLRLAVFYCFLCYLYDNEKGKVKVSQFIGLFATFIIFYQIIDMLLPQNDNRSSEEEGN

SEQ ID NO: 139437 - protein, 64 aa, Heterodera glycines
VNNVTAVLDAMLRIKLSVVPGPLLSVFVQNIAKLYTFQLCKLEADDDWDGIETLDNLLTSKLPE

SEQ ID NO: 139438 - protein, 121 aa, Heterodera glycines
CMCRTPSPRSARVYLCKRFKCNAHELHVLFKSLEKRRDIVEHLRSVQLRTAHLRPSVRNFPVRCNDLSILDTHSAPAYRGYLGITVFLFVLFVGNKKFKGPDALLHKAWHPLAPPQLAVRR

SEQ ID NO: 139439 - protein, 155 aa, Heterodera glycines
TEQGTAESENESNTSSGSVKLLENDAELDSNNTSNTNEIASNVNLRAANVSDVPTTSEQIVSVPDASQNVSTENDEISLNNLTTVLPTEETVTVTTTVSTTTAAPTTTTITTTTATSTTTTVAKQQTSRKPVKFAMSEDDHPHVFLLGDECKVDN

SEQ ID NO: 139440 - protein, 205 aa, Heterodera glycines
RERKEAATTTGQRRTDATHSAAGRPTSAQPTKKQRTSQARRTRHRHKATQQPDTGGHTGSTERETTAPTQGSTPKAWDARQLPRKAGQRPQASTNDRGPTADGGKRGGQREPNRTAGRRRRGTTRGKSQQQEHPQRPRHDESPAQATARKPEPDSTPTEAGTPTAPEEHEKAQTRAATGGENKGQGRMQSERMTRPYKEFLVHGQ

SEQ ID NO: 139441 - protein, 65 aa, Heterodera glycines
MAFRDPKNLRNRNSDPKNVGTRNFVPSLLSPSQASPAITGRRRIFVAISSAVGAGAAPISGEGGR

SEQ ID NO: 139442 - protein, 235 aa, Heterodera glycines
MKGRPVPLQSVMDCSKQLCAFSELAVAEHFPTFLRPSDAVAYLESYVRTFELARHMKLGTEVFLCTRRGEWILPLLQSDGQKPWDWPFSSRWHFWGRRWVPKCLRNFCWEMSAQSVSPDCSQNNGIGRPMHRLLSANLTFGAEQLCPLLASGRIRIRPNILSLSDSNLVEFADRTVEQHVDALVICTGAAVFPRAQRTHATANSLFDEGRIGETPLCRVHGNAKDTKAHTDGTRH

SEQ ID NO: 139443 - protein, 24 aa, Heterodera glycines
MPISQFMDESQRESRQNSHFYVYN

SEQ ID NO: 139444 - protein, 97 aa, Heterodera glycines
MPPLILREWKPYMREFDGCYETNGQRSGDCPLTDHSDASFGGDFFHAEDEFTLSHIPFLGDAEDDTSFCAELMKTFQDGIHGTVKGCGEFVGPPICL

SEQ ID NO: 139445 - protein, 88 aa, Heterodera glycines
MTFRLVVNIPGTEVDKGDVLSEYVGSGPPQDTGLHRYVYLIYQQKNTIKDTEHGHLTNRSGDNRGGWKTEKFAKKHELGDPVAGNFYQ

SEQ ID NO: 139446 - protein, 61 aa, Heterodera glycines
MWQNQKGSERRNGDGKRKGIRATAGPKGPHNGKGKGGHSSRRGQGGHSHRQRAAKAGCSER

SEQ ID NO: 139447 - protein, 71 aa, Heterodera glycines; identical to SEQ ID NO: 124984

SEQ ID NO: 139448 - protein, 95 aa, Heterodera glycines
LFEYPKRTLEKIDFFVFGAVPPNRCAQIYGETESFWSSFPIACTLILRWIFAPHNCLSTPNGHLKKSIFLFSGQSPRTDAPRFMGRPNPSGIASL

SEQ ID NO: 139449 - protein, 37 aa, Heterodera glycines
MKTLNVSHNLFSGCALFDMVLLHQKVIHEELGCFKIP

SEQ ID NO: 139450 - protein, 49 aa, Heterodera glycines
MVFTKPDMVERFFPDPKEAHTVEAIRKVQAMSWALGDDENEAKEIKKAN

SEQ ID NO: 139451 - protein, 42 aa, Heterodera glycines
MNYTEDNLDEDTKKKIESLLDDRFCANLTIIPKNCDFYILFG

SEQ ID NO: 139452 - protein, 52 aa, Heterodera glycines
MGGIFRFIWILCLYHQLNAIGLLEVAEHECAHLAINEIGEIYFQFLNLNLEN

SEQ ID NO: 139453 - protein, 230 aa, Heterodera glycines
MQVTDCGKHFLIKFKQKFLPREIRWSDYQFLVMQLAVGGDLLSFLQKCGPVSETTCHNWMLQIVAALDYLHRKGIAHRDLKLENVLLCENGVIKVTDYGFSKQSSDLSSTFCGSRSYSSPEILLGIAYDMFKSDIWSLGVAAFIMITNTMPFHEDLPNQQIVDSQRKRRYKYPSWLNITKQCRTAIDALLTYQPAFRPNIFECAKLEWFAQDSASLWCGGRRAGVGVMGQ

SEQ ID NO: 139454 - protein, 124 aa, Heterodera glycines
EIREWRVQEIKKKFRQLKCRYCPTATKVTLIDRLSDCGLKTIEATSFVSPKWVPQMADHAEVISRCKKFAGVSYPVLVPNLAGLHNAIKNGNVREIAVFCAASDAFTRQRPNKNIQINTKKRTK

SEQ ID NO: 139455 - protein, 83 aa, Heterodera glycines
MKPKFLFAIIFAFFIGFSIFEGTSSYEWDSDNLANNVQTFAEFMDDLYEDYKEKGKMDIPWLNKSKLYTENGYSEKQKRKGSI

SEQ ID NO: 139456 - protein, 103 aa, Heterodera glycines
MKKFFGGSKAKPAPKQQLAGFEFNPFLIDQGILMSQAPAPSLRTRNARGDTREGLVVNRRSGRKEWGRGIGIGLILKWWLLLPSCPCFTQSFCHCLPLCPRGL

SEQ ID NO: 139457 - protein, 81 aa, Heterodera glycines
MYIVRHFGVAREWKKIGIEIGLIGISRVFFGFNLRPTCLGKSTRTLKIACEEWNICGLFIFVVFVSSCPNNATAIPLHRLD

SEQ ID NO: 139458 - protein, 36 aa, Heterodera glycines
MGCTGDSEEAAAAMSASLSIGQKRVCRRWMSQRTIR

SEQ ID NO: 139459 - protein, 69 aa, Heterodera glycines
MPPYSNAILCIHKLPSINLLFICGQCSTPFLSLSFVLAKFLPFFTKMVQNLGKCMAAEQMNTVASDPNK

SEQ ID NO: 139460 - protein, 85 aa, Heterodera glycines
MVEMGTEIQTSRNELKAFQEEVDKAKNITLEHVEKNDLKKAKKSADVAKGIARQAKTKYTSTLEGYNDKSEKGFSGIVIGLMRRS

SEQ ID NO: 139461 - protein, 25 aa, Heterodera glycines
TCTCGVVVKLSTFHNFSPGFNSPLG

SEQ ID NO: 139462 - protein, 25 aa, Heterodera glycines
TCTCGVVVKLSTFHNFSPGFNSPLG

SEQ ID NO: 139463 - protein, 185 aa, Heterodera glycines
HYLFFSKYTCHQLGSGALVVQLPQPSLVETMRLLLWDCDLLLWDCDDRSVYSFFIEVSTDQCKWMKVADVNERSCRSWQTVHFIRCRSWQTVHFIRQPVVFIRIVGTSNSANEVFHCVTSNSANEVFHCVHFECPAMETDSVSEENGSPDCDVSSQRPLKTTFPPSIGVPSSSSILASSQNALDS

SEQ ID NO: 139464 - protein, 262 aa, Heterodera glycines
MAGPDSRFILEFFNREAKEIGVTQELLNNSQQSDQLIQAYYFLCDLIFENVGTTKENECEVATDLTRARPKMIIRTQQHSNLVFNKLFDGSNEFLYSDLLQPDPRRTKMHIAQLIRLYTTKCDIAKELSAVDNHIDECKKLFAQEEENRKRLDNNIVNSPERIIEELSNMEVEVEDIRRKNDQAVDEKELAKQLKEKKDDIRQHQQEIKRKDRSFIILTDTYDDSVAKLFKNLSLVEQKVQVSRSNLLSLFNESEIFGPFNQ

SEQ ID NO: 139465 - protein, 87 aa, Heterodera glycines
MCAPIETQTAAREIIIPSFYNVANFPGVIGAIDCTHVRIIPPASAHEKDYFNRKGYPSINVQECANIDHGSSCAAQHCNRSQFARFS

SEQ ID NO: 139466 - protein, 107 aa, Heterodera glycines
MARERCLIQILEFSPPLRVAQCQERHRTFLLQQQLAVDLEERKIALDLMRTTEEKKRNTIHGSRSMDHPIRSLCIRILIHGFFDPRISDSWITIRGSDPDLYAYGYG

SEQ ID NO: 139467 - protein, 296 aa, Heterodera glycines
MSDEEEEKEQQRGEKEQKRTAAVGGRRGEGGAATGQSPQQQHQAALTRMSSDPQELIMEEYFGMDERHFRSRAGTVDTEMNGANTNGEEDDVMDIGDDELIENKEFEQLTEEEKALLSPEMLSQKEDKYQRRLVSMLPVYYPGISGCRSVAEYECLNKISEGTFGVVYRAQNKRTDEIVALNRLKMEKEHQGFPITSLREIHMLLKCGAHPNIVNVRIGDFGLAREFGDPIKPYTPVVVTLWYRAPELLLGTKWPAKSEQNRRPIRDVGAGGGRAQQQPPPRPTGGFTLRFDAPKF

SEQ ID NO: 139468 - protein, 58 aa, Heterodera glycines
MTLKTNPKVFYNNAKNKTEEFVICADEAESEECAGKYWALFDLSGPFSTEHLPNDPKK

SEQ ID NO: 139469 - protein, 137 aa, Heterodera glycines
QASAEHYQKRIRLSLLINARVLVSLKTAIDLDDALFALDRAQLDPAELGGTVPLADKLQMSIDDLRQFHRSEGARVVILVLSNDEQQRLNADEHQSRRIIKGLDRLSASLFILHFAPRGAPPSAGPLSAQFNGSALG

SEQ ID NO: 139470 - protein, 458 aa, Heterodera glycines
MVSIGGNVQQINAVKTVFDQCLLMNTHASMLYGVYPLHTSAHILNQKIFSILVTGMFSTELSKRSHSSESLEYTFFVIKILAFVHQLKDKKSAKNKIEICWKVLSDSGETMTSNESIDVLKPILAEFEDQFGGTNKMPKNYQNLIQSYGKFLMEFLHLDEKFRSEFYERTAEREKLMNIFLIVDKEKTFLDNQFWKHFDVHSTENNVEEGSSNSEIKFMKKYKECPNVKQPNFLENSEIANEDKEAHALMKSYIDLMKNAQNVQTNGQMNKLTENLETNAAVWVSKEQINELLKFDESINDKSEEFIEKISQYKMEWYKMATKNGQNVDNYKLLFSFYKFLNTLIEDDELKLNKNWNLHKLILRVLPICAKNTCALSDEKMAAEFKQKMKNSQNWNDQIHFHALTQLINKFDEFTHVLCYGSGEISNNLMRERLSLIVPEKAFGAIEAFHPEIMGYRK

SEQ ID NO: 139471 - protein, 496 aa, Heterodera glycines
MSDDRKFDLNVAEGWDNIFPNLLNIDAMNINHEKKNEYKKWIGQLHKNAIIKLSREDNVFAQQLRKEYSSSENVLFRRFLVDLVGESKNDEEIWKTIQVDKSDEIVTENKFNNLNLIENLSPKKGTKEKIVEKSKCKNKKPKKKNKNTENIKKNENTSKIEDAIECENEIEPEQISEIRNKANSNEEIDHIFWGKSPNNSQTKFDGIKLANFEDENFVAKIFTQIFENFQKNPDNFVGLFSSAQLLHFGIYANEICNRIKLINQLKEALPEIGIDHIENIENEWDQLKSVDLSSLKNCNKLITTLFLLLKQIVAKMDKFEVPNEQIVNSNEENFVKHLLIRQKFAKFIVEQYEKHNWSNLSQENKIGIMKAIFVDENIDDELIEKYLLESIKMFIMNYEKFNSQIKMDKNIFEISKPNQFMEQNAKLYFEISKGWQEIDYDEKTSKTVKKFNKFKNVIEQNGYSDDDLTAKFKKTIELKSMFEQWVINRGYFIFKI

SEQ ID NO: 139472 - protein, 203 aa, Heterodera glycines
MTATFFHHLRQMAPSILNECPSLRFVNFYAGDLFAEFPCDDSAAASDGQAFAKWLFTPLQNNVPKVFKCDSHNDDSLATKLDVFKLTFSSASSPVNFIVSIWFDASPLPIPVVPFSITNKSTGEQLMLKEIDDKSRRFLLIRCPIVRDADKWAKWEKEALGWHIRDQCNQMRINITGSDKIGDGLLNGLLGLSEWKLRNGRSV

SEQ ID NO: 139473 - protein, 71 aa, Heterodera glycines
MANEKGNFECENKEIKRSFESAVYNAFAEDILMGHLNALSNLLKPKKGEEKPIQMGKAEEQQKDGTNNWCK

SEQ ID NO: 139474 - protein, 99 aa, Heterodera glycines
QSDNAHLWQCHCYRCHLHHQTDLVQVAFEAFSQQSWDQRSRFVSPQKCRPSCAIRPDVVQPCQSLHFPAQFGLPNSASPFCDCRPSHCSLHLFIRHVYY

SEQ ID NO: 139475 - protein, 203 aa, Heterodera glycines
VPVIIISLIRCDSSQVPPTSSDSATSPPLSSASHFQQQQHSPFWARRAAGRNGRFGRCLPASYSIIGTLPITALRVPLYRTVFSVVRFYSFWRTCTSFHRIVTMIEVIYFGGRSPRGLPDFQKRLFVQYLWRNAKPSDKARVQREFDPRRQRLLKYVTDTAARKRFKSFWQSTLLNLLMLERNGGKSEAKIKVGQSRQNGTNK

SEQ ID NO: 139476 - protein, 29 aa, Heterodera glycines
SDDLKAKRAHKQQKKQWERRKSTGKISSL

SEQ ID NO: 139477 - protein, 179 aa, Heterodera glycines
MALNSSAFQSLGLNPPTFQSMGLNSSAFQSLGLNPPTFQSTGLNPPTFQSTGLNPPTFQSVGLNPPAFQSLGLNSSAFQSLGLNPPTFQSMGLNSSAFQSLGLNPPAFQSLGLNSSAFQSLGLNPPTFQSMGLNRPAFNHWDSILLHFNHWDSTLQHFNRRDSIIRLSNRWDSTHQHSN

SEQ ID NO: 139478 - protein, 183 aa, Heterodera glycines
MKLFPLLLLIILFLIVKIGAEKKKLQQKSFGEIFGEKWQEKEEEKRNEQKKREIIEKYYKIKEKIKQKGRKYPTKEWDKINSKIAKKLGTNRNYIQKWIKELGLNQKKFYKSKSDEEKRQIIQKFIKMKNEFKQKRKYSAKEWHQNYAEICKKIGVGHDTIKKWKNQCGISCKITEKEKTGKN

SEQ ID NO: 139479 - protein, 18 aa, Heterodera glycines
MRIMRKAKCEKRNLGPSL

SEQ ID NO: 139480 - protein, 26 aa, Heterodera glycines
MAFFVEFYSSWCGHCIEYKPHFVRFA

SEQ ID NO: 139481 - protein, 175 aa, Heterodera glycines
MANSNHNQLQQGQSALGNNVFCTDGTHNIQFLNGCVTQIGQPLPPLCLIVVSIDHRPEQQTPAGLLSVTNVVLRNADGHRIEASGWQTQAGVLASLSIGTAYWFMNCMARSRYQRLDCWYRIGVDGRNATIIPHPIHQQTTNARPNESVGLRHSIASILGEQIQVFTNQLKLCII

SEQ ID NO: 139482 - protein, 28 aa, Heterodera glycines
IFFVCVSNIVRLFDRARQEKATVGTKFA

SEQ ID NO: 139483 - protein, 91 aa, Heterodera glycines
TAKLVPTVAFSCLALSNNLTIFETQQKKFLTKKWLSLFSHFFTAKLVPTVAFFCLALSNIFFLIFLPQTWYQQLPSLVWPYQTILRYLKRK

SEQ ID NO: 139484 - protein, 116 aa, Heterodera glycines
MSAAEFSAKLRELTASKSTDVERMSKDFEEICSIREKCNDGKKRRLKIRLGPDVLVNRSLYELAVDPHSRCTEISWTSKTKRFSSYTIPSDGASSNLIPSDGVKLALSAQVITKYA

SEQ ID NO: 139485 - protein, 254 aa, Heterodera glycines
MHRPHNLKEAEGEVQKAIYFDPSVFTFIGLFNNRLPQSCTAMLDISNENVHILRHIMHSIWPTFKDAVSALRLTPCSFRLLRRFAPTMLCCCPGLQSIGFNSDILPEFPADDSAMVSDGQALAKWLFTPRRDNVPNNLLIEFANPVVVKSQWSAVEAIKTQFLAATSRVSFKLTLLNRQSADSSETVVPIVPFEPLHNAATGEQLTLEQQDANIYCIERLPIGGDKHDWVTHMLGELNKKNHFNLFFDESGVSL

SEQ ID NO: 139486 - protein, 217 aa, Heterodera glycines
MHKQLFNIKLFYKEIDAVRTAMVYGLEKRFFDLRFKRCIAISTFLDPRFKDRLVMEDAEVFRERVRPWLFEEASIAFNQIENEENDLIATTSIESPPAKRNESFFAQMEEIANFAQEKTQIASQSDINSEFNELLSFDRAPINSDPFEWWKKHGPKLPMLSKLAMKYLSAPATSVPSEQTFKVARDVYDYRRSRLKPKTAEMLIFLNKAIPMLDYKY

SEQ ID NO: 139487 - protein, 74 aa, Heterodera glycines
SDPFEWWKKHGPKLPMLSKLAMKYLSAPATSVPSEQTFKVARDVYDYRRSRLKPKTAEMLIFLNKAIPMLDYKY

SEQ ID NO: 139488 - protein, 106 aa, Heterodera glycines
WPYFFQQRPMAQPKMAIKKRFSCTLCTKSFDWFSDLKRDMRVHTGEKPFVVKFCDKAFARKHHLDCHQRIHTGDRPYKCDHCGKRFSDGSAMKRHQRIHTGEKPYG

SEQ ID NO: 139489 - protein, 71 aa, Heterodera glycines
SSGYREATPEGFGLPINLGASVRGDCPENKNKSIFSSVRLGYSNNYGGAKIQRRIKVQAIGKLFRKDSVSP

SEQ ID NO: 139490 - protein, 80 aa, Heterodera glycines
GAHDEIEEGKEEEKKEEGADEEKKEEGEEEEKKGEGEEEEKKEEGEEEEKKEEGEEEEKKEEGEEEEKKGEGEEEEKKKS

SEQ ID NO: 139491 - protein, 122 aa, Heterodera glycines
MERKTVGRTVTRDTATTSAKDMNMVGYGGGAYGDYGKGYARRKGRLHTAAKSTNCNSRANTVDLSTSTATESITTTVRQSNAIKFASENANAYQQQKKVYSPYKARYYTRQFCRYTAASSPR

SEQ ID NO: 139492 - protein, 54 aa, Heterodera glycines
MSDEEFEEIERIVLGLDEPDTDLYDRVAYLDMVKQHQQEQRRKLAMLREVERYF

SEQ ID NO: 139493 - protein, 95 aa, Heterodera glycines; identical to SEQ ID NO: 128262

SEQ ID NO: 139494 - protein, 24 aa, Heterodera glycines
RTLSTAVRQRSSKIYSMPQILLAG

SEQ ID NO: 139495 - protein, 24 aa, Heterodera glycines
RTLSTAVRQRSSKIYSMPQILWAG

SEQ ID NO: 139496 - protein, 33 aa, Heterodera glycines
VSSAVLLHIYLYFNLSSINLFICSSLRHFGDRT

SEQ ID NO: 139497 - protein, 504 aa, Heterodera glycines
LNKEQFNCLMLLTALKSHNDSALRKDFVEAFSGRGEITYDGVVEDLINFQATIVEAKAIEAPTNWRNVNAVNRPVKQNNSPKMQVAKVPEKRQANKCWRCGAADHWGSECRSNVKVCNNGGSNVKVCNNGGRPKENGCELVIYNGMVNPKNDADSLRTKIRFNQKPIAFALDTGSDVNVVDEDSHLEAGSPPIKCTEIGRAFDGTPIRFIGKGFGTFEFGGILIANEPFYVAKRGSLNLLAAKQWTNLDLDGIKQRISEHVINSCRATDQIGKHILELRKEFPGVCEDALGHCIKEKAQLKLKEGVAPIYRKARPVPHHSKEVIERELDRLEGLGIIRKVEHLDWAAPILVVKKADGNARLCIDYSTGLNDALIDYQHPLPIPEDIFATLKGQFFSQIDLKDAYFQVELDDESKKLCGLSTHKGNFAMERLPFGVKAAPSIFQSIMDKMLAGLNFATAYLDDIIVASRSFTDHIQHLKDVFSRLQSYGFRVKMTKCTFFQRKLS

SEQ ID NO: 139498 - protein, 76 aa, Heterodera glycines
MPLIVLLIAFLISDVTFAMENEKNGKPSAPADGKAPSPSSEPPQNESSFETPKAPLKGDDEDSSPKCPGAPLKATQ

SEQ ID NO: 139499 - protein, 224 aa, Heterodera glycines
KEEVKKPEEKRQKEAEEEKRIEEQEKRRKAEEEKTEEKKPKEAEEEKRMEEEEKRRMDGEEKRRKAEEEKPEEKKRKKAEEKKRTMNEEHKKRMDGEEKRRKVEEEKPEEKNPKEAGEEKRMDEEERRRKAEEEKPEEKKPKEAEEEKRMEEEEKRRMDGEEKRRKETEEQRRNEEKKRKKAEEKKRLDEEEKRRMDGEEKRRKEVEEEKQKDEEEMRQKAKEE

SEQ ID NO: 139500 - protein, 25 aa, Heterodera glycines
NCRKPCMDNFFSLRWLPTDPTVPFG

SEQ ID NO: 139501 - protein, 53 aa, Heterodera glycines
MKVTRKKANDANGWGHGKTEGHSLSVLTFFMSFPCYLLFFPSAALTSLIRLIV

SEQ ID NO: 139502 - protein, 222 aa, Heterodera glycines
SSAFQLLPGGCVLCSECALSAVFALRFPSVCLLGDFIVVNCTQSAACANVPAVVRLQAKCRFCWQLEQSEIMCEACANVPAVVRLQAKCRFCWQLEQSEIMCEERKNCSTNELTLYMIKCWEKPNAIYAGRRHFFKNVRTHWTSGHSWRKALFLSFTLGGFGVDRFYLGYRKSAIGKLFYLGYRKSAIGKLFSFGGLGVWTLLDIVLIDFGYIQPADESLYI

SEQ ID NO: 139503 - protein, 207 aa, Heterodera glycines
MPGKTSFYTFGSRLPAQQMICRVIAAAEEGKDECQTTLLLDPGSHVDGADTELIQQLEPQPIDKRPLTVQVFGGKKQRIRSATYRLRLKRTDGKLESIEVSEVPQICTPIRTELIESGATPDSDPRTITQTTQPQIMIGIRKFWDYVVGFRKIESGAHVIDTVFGQVLCGEGTQASSGATPAASILTTMPCGNIHQTRTNKRQQIGE

SEQ ID NO: 139504 - protein, 71 aa, Heterodera glycines
MSASHSQKNPELNMKCMCYGQPVGPLERSLNLQPICLLNGRLTSYTHRAREDEKLDNSKMTVFNSTYFKGK

SEQ ID NO: 139505 - protein, 189 aa, Heterodera glycines
MKLLFYSLLFTVLLLFADYAFGYGKQPKTGLERRPQWGLELNSKADGKLGQNKFWDRYGRPASHGIWHGSVALLTRNGHEWARAKQQFGRIGHGGGFNGQPGKGTRENEMEKYKQEQAEKQKKKGGGSTDRKINNYSFTFIYFFANIALFRRPRLRPPHFAFRLAQMPNSLALSNAQSLCPPFPTEIQN

SEQ ID NO: 139506 - protein, 47 aa, Heterodera glycines
LILHSDWHKCQIRWHFQMRNHFALRFQQKFKIELTSEKVHKRDAEYS

SEQ ID NO: 139507 - protein, 55 aa, Heterodera glycines
MGMNIMLLNAINVDLPNRSAFVTGGRSKPFVTEERYTNRWATVLKIETLQEYHGI

SEQ ID NO: 139508 - protein, 89 aa, Heterodera glycines
MNVFILLFSIISMAYSLDNGLARTPPMGWMSWTKFYCQTDCAKHPFSCINEQLYMDMADRLAEDGFREVGYQFVHIDDCAEKADSQGRI

SEQ ID NO: 139509 - protein, 95 aa, Heterodera glycines
MNRRWICSDVWMDILPSFDHAQLGLKMALLSDRFDALVDMHFDGKSELTIWKEISINKDEGPTPKLSERIDGKRVAFPLPDRPLPTKIRFRDLWI

SEQ ID NO: 139510 - protein, 46 aa, Heterodera glycines
MNLKTMTQVSSKKKIEELRICVKDAKRKRSIGCQILLTLMDKTLKV

SEQ ID NO: 139511 - protein, 19 aa, Heterodera glycines
FGREILFFETKLKTYITYI

SEQ ID NO: 139512 - protein, 23 aa, Heterodera glycines
MYSMIYISDTIVSKNEYGKKEYT

SEQ ID NO: 139513 - protein, 33 aa, Heterodera glycines
FSIFEKESCIERFSRDVHTNDDDDDDNNDDDDD

SEQ ID NO: 139514 - protein, 260 aa, Heterodera glycines
MTAKQLIKAMKRNYLALQKAVEIVRSTKETAKISLNHIDAQISIISIGNLFFNVFVRLRSPKIENVKAFQSSLCVQNCPDGAKMDKYSAFLNSNKENKELCSKIVGELTAKDGEDKSANRRHNWISSICEKDLAKASAAKATKNAFPTTHWLNSLIYAATEIEVASVNGQFYNDSRQTIDKIFDGDPLSKNDKVSPFIDSGRLSDKKAINGHQNKAKEFEWLPHSKHKYFSSKAYDKSLSLALPSLLIFLQICFIIYYVY

SEQ ID NO: 139515 - protein, 113 aa, Heterodera glycines
MDKHRLFKSLSAIMLFVVGSYFFICVFVLLASSMPSQPFFTFHVFPSILALLTCVAASSNAPLLFIFSKDYRLAFRKQFAEWPLIGKWLNRIGNVQVNVVRNVNMNVSSTIPL

SEQ ID NO: 139516 - protein, 71 aa, Heterodera glycines
MTSKSQFRKWKNMAKESQIRLLTNDCVQKGAVEEQTGQRKKPPEKRGKEQLHGEHSMAKPSKCPKLTITNN

SEQ ID NO: 139517 - protein, 16 aa, Heterodera glycines
MIISKNMKDRIELTQK

SEQ ID NO: 139518 - protein, 33 aa, Heterodera glycines
MHPKRMAKFCSTITSLPTIDLKKEKKSICQVTI

SEQ ID NO: 139519 - protein, 26 aa, Heterodera glycines
AIVATKRKKKKKKKKRIKATEMSSAD

SEQ ID NO: 139520 - protein, 107 aa, Heterodera glycines
MGSLTYSDGDDDEAPVQGTHSASLRSAPLFNFVNAAPFGVHGWLAHFGKPYIGTTQFEIDRGAEAFEPNADVGAMGYSEALITNFNKMINFPKKNPIQTILFYYRIW

SEQ ID NO: 139521 - protein, 80 aa, Heterodera glycines
AFLRATNSSVNFIIHFELFEPKPIEPFELVNEQTKEKLTLSKESENNWVMKRCQIGQIVQWKDEKLNNVSIILSGVNCIG

SEQ ID NO: 139522 - protein, 71 aa, Heterodera glycines
MFISGTFSCDAFYNDAFFADAFSTDAFSTDRFSGHEADFTIIMNLFLFFAIFHATFLPLTYFYWGINSRAV

SEQ ID NO: 139523 - protein, 15 aa, Heterodera glycines
MIIRIAHSMEKSMVF

SEQ ID NO: 139524 - protein, 203 aa, Heterodera glycines
MADKTTINLILQRLEVIERKVNNNNNAVPVQLNEQLQSIVDRLCDIERKIDTANNTNCNATDSEDKERKRSLVLIGLPESTKEKPTERAKEDADMVSNVLDALDVEVCPQMVYRMGRRNDGKRRGSRLVKVVLPASTFQRFALAQWGRRRNVLRAKNEEWDRLLVRPSLTKEEQKAEHEARVKKREEYEQKRDGVTIRGQKNN

SEQ ID NO: 139525 - protein, 63 aa, Heterodera glycines
MVQLDKLTAILGEKVPSLSDEAANWPMLRRADAINFRLEQWANATCSKLYLAISVGGNENKIK

SEQ ID NO: 139526 - protein, 165 aa, Heterodera glycines
MPFRRDEYGGQWNSEETVSINPWFYEDEEAEDADAAKQISPLTMAGVVLAYLALGAILLPLFKGQFDFVNGLFYSYLCFTAIEYGHLIPENDAFIPFVLLYMCVGLAISTIALDIGSNYVKKLYYLGKRATSIAHASFFYGGKQLRGQAIGISEDALEKVDLDRM

SEQ ID NO: 139527 - protein, 201 aa, Heterodera glycines
MGRPREQLVGEQEEILGHASAVQEFHPLMRKLNERQKVSAKLLLGNECCLIYQNAPPGVGKTYVASIVAAILLSINENVKIAIVTSANLPLAKLAQELDEVLGSDEMEESGSIAFFSGYAKEKYREMVEKLKRHILVSKLTSEEIQSKLEERSEENHDKRDVREYRQNYELRPRLTQERKMASLYAPSGELENCFRYGIYG

SEQ ID NO: 139528 - protein, 283 aa, Heterodera glycines
MPVQITNEQSQYPQQQPQQLPQSPSSDSDQKEQLQPVPVSTQEETSQQVQPASPVAEPSEAAEAATEVPAPSGSAATGYGGAESPAAAGDRLQEVQEEPNAADELSATTNEVQKPNKTMNLDNFDFSQQEEKSKTDRTEQKAKHQQTTAEQSPIGAEATAANASAKTNNENADLFVEPIDVSQLQLTNDTECNSEELRRIITNVGDIVRIIDEDEGKGYFAQTVAFITDDYTNQFAMVIWLLPKLSRNSFPKPFEFNADRFQHGFAEERPVPIKACKKIPISK

SEQ ID NO: 139529 - protein, 123 aa, Heterodera glycines
MANRQSNVLAPDECSNLTRNTRSIVRHFEAFVRKFGEEPFDEFERKGFWKMLTVKDFSGDTMIIVTVHPHPNSEITDNAKTKLREFFLPSDPFRDEAAQFNVTSFYWQEQANAGDERIYEHVA

SEQ ID NO: 139530 - protein, 49 aa, Heterodera glycines
CRFVCSHMAEPLALDPYRKYRNVHMLIPCYFLFCTNELKIFVLFSRINR

SEQ ID NO: 139531 - protein, 212 aa, Heterodera glycines
GGGEGPPPPPPPPVVLDVCCGAGTVSNSFLVSYKKIEKICCVGICVGIELNREAVRDARKNASENGFDANCVYIDGEAEKIFKELEANCVYIDGEAEKIFKELEYHMPFGCPLNSYHMPFGCPLNSSQIFGVIDPPRAGVSDKVIIGCRRLNSLRTLCYVSCDPKAATKNLIDLCRPPSRKFDGDPFRIVDIQPVDLFPQTEHVEWVIKLKR

SEQ ID NO: 139532 - protein, 238 aa, Heterodera glycines
MSAKIIRVPKIACDLSLEKNGVSKNRNYAQKASQTILALPIPSTIAFIHPIMSAKIIRVPKIACDLRLAKNGVSKNRNYAQKAFQPILALPIPSTIAFIHPIMNAKIIRVPKIACDLSLEKMVVPKIACDLSLAKNGVSKNRNYAQKASQTILALPIPSTIAFIHPIMSAKIIRVPKIACDLSLAKNGLSKNRNYAQKASQTILALPIPSTIAFIHPIMSAEIIRVPKIACDLSLEKM

SEQ ID NO: 139533 - protein, 102 aa, Heterodera glycines
MHDANAHWVEGDCVFIANATTTRMIIPRGNNGGFEEVPVPTVAQPSYVLGFRGTIHFNGTLSDNALAFFRHALPPPTTLYRFSVLDEFYRANGLLSPFKTTE

SEQ ID NO: 139534 - protein, 48 aa, Heterodera glycines
HPHVQANVWQGTDPGVEKRTNRRLRTLNYCTYGTAGSVRRRTIAPFDG

SEQ ID NO: 139535 - protein, 46 aa, Heterodera glycines
MYGATPRAIEYAEKATCFVSSDEMEFDLPNVGSFQRAEKSFAGNAI

SEQ ID NO: 139536 - protein, 44 aa, Heterodera glycines
MAGPGRLPNFLGVRNAVMENGLRNRNRRGRLKRVSLKKKAQIPR

SEQ ID NO: 139537 - protein, 44 aa, Heterodera glycines
IITFVPLLITIVPLLITFLPLLITFILLLSLLYLFKSHLYLFIK

SEQ ID NO: 139538 - protein, 296 aa, Heterodera glycines
MTPNLLAFCLCPIPQIKCQFFVCLITNLNSDQPSDKSSGDQFLGRLFLRRPFRLCAHYAWRFVTACVDVSVWQCATCLDVWMIFSVIFIFMTLVELSIICQLNRWERERQIGSKVLGHWLNQIRKTRKQTGRASDYSGGSGADGSGAGGGIRKRFLLSPLKRITHSPSPSPPPRAQIQNALSISRSATATDLPSKEKSPPSPILGRQMCNNNNNNNNNITAATGGGEMIRVSSVSRWATFREGFAGAGGGDTRTAGSEEAKAPLFEDNLAPAEEAEPVQLEARMVHPFGPSGPQMD

SEQ ID NO: 139539 - protein, 25 aa, Heterodera glycines
LFPLSYLVFNLTYCIYYLGKIGRPL

SEQ ID NO: 139540 - protein, 168 aa, Heterodera glycines
MSIGIFAAQLRLRAKQIFCISPSTINTCGAINTVCFDKTGTLTEDGIDKELNGDPLDLVLFRKTGWIMDEPTESAVVDETSMYDMLQPTVVRSPPLHSAVESDVELAIIRQFTFSSSLQRMAVVVHNPNEDSHIHHLYCKGAPEKIASLCVPETVPNDFQTYVDNYAQ

SEQ ID NO: 139541 - protein, 44 aa, Heterodera glycines
MRRIVMIVFKFVKDWTTQNQSVINNRSRWTNATETIKMEINFNY

SEQ ID NO: 139542 - protein, 104 aa, Heterodera glycines
MWWFHEIPTPPPPQFLPTQQGRLKMRYQGHDYYKKFEGANGQVYWNCVRFPQRLGACKGKAQVVNGIVRQRIRTTIRLTIIRLPRNDPKCDNTQETVDRTQPKN

SEQ ID NO: 139543 - protein, 72 aa, Heterodera glycines
MDGTAAVPGTSQQPPFGTATDMAHFSNALQLRQLQLLQLQKQQQAAQVAKNLSFLVQQQQTVRSGEIGYFTQ

SEQ ID NO: 139544 - protein, 86 aa, Heterodera glycines
MNPKNFVPFGLKSKKMRPNSLKLTLPWTHLTSGLTHRICSAMNRNRSSLFGLKFFAKGWNPIAMNGLNWTKIFLPKLLVMNGGCYD

SEQ ID NO: 139545 - protein, 187 aa, Heterodera glycines
MPNQKDGVTGGKRIEQELAVFDLPFYIVALAFFLKAFFRLYDLLVFVPFKLFADPELEKERSRLSDAWQNLGQSGTVSNWLYLFIHAFMFELRLHRGHNCMGTRDILNVVEEQQPDGKAFQKLALGKCNWMNYEHVDEVIVEVASGLSNLGIVQGQKVVIFSETRKEWMISAIACFKLGLPSALYYK

SEQ ID NO: 139546 - protein, 56 aa, Heterodera glycines
MNYITKNERAKIFGQKGKQQINVESANGTLRFSEGLCLLKSGTLIRCPSRAMSRPS

SEQ ID NO: 139547 - protein, 22 aa, Heterodera glycines
MAIYFFEKFSMQQTLSNMKRSA

SEQ ID NO: 139548 - protein, 40 aa, Heterodera glycines; identical to SEQ ID NO: 130849

SEQ ID NO: 139549 - protein, 29 aa, Heterodera glycines
MAISFFEKFSMQQTLSNMKRSAKNGYLFF

SEQ ID NO: 139550 - protein, 29 aa, Heterodera glycines
MAIYFFEKCSMQQTLSNMKRSAKNGYLFF

SEQ ID NO: 139551 - protein, 93 aa, Heterodera glycines
MDGGLLANNPSLELLDEISKENALAKQHNEPQYELECFVSLGTGKAPTEPVGTTSLEIGTELIGAIKNLAGILMDQASHSPGKKYGFPYNWNP

SEQ ID NO: 139552 - protein, 59 aa, Heterodera glycines
MMILANGAGPNATDSAAMLPLAHVLEKKKTGTKSEESTVKKPECVDVEEAIRNECSKWH

SEQ ID NO: 139553 - protein, 190 aa, Heterodera glycines
MLIEMESLMYGEGLQAGGHEKNFVQKNFNWVIGTSTGAIVYYRNIRWPKTFPTCQIRNFTSDLNEYNPYKTNIWLAARYSSAAPTYFESRDKFMDGGLLANNPSLELLDEISKENALAKQHNEPQYELECFVSLGTGKAPTEPVGTTSLEIGIIGAIKNLAGILMDQPQQQPAPMSIYERFNKEVCEKNP

SEQ ID NO: 139554 - protein, 59 aa, Heterodera glycines
MMILANGADPNATDSAAMSPLAHVLEKKKTGTKSEESTVKKPDVWMLRKQFGRSGSKWH

SEQ ID NO: 139555 - protein, 89 aa, Heterodera glycines
LLANNPSLELLDEISKENALAKQHNEPQYELECFLSLGTGKAPTEPVGTTSLEIGTELIGAIKNLAGILMDQASHSPGKKYGFPYNWNP

SEQ ID NO: 139556 - protein, 49 aa, Heterodera glycines
MMILANGAGPNATDSAAMSPLAHVLEPQQQPAPMSIYERFNKEVCEKNP

SEQ ID NO: 139557 - protein, 239 aa, Heterodera glycines
MMILANGADPNATDSAAMSPLAHVLEKKKTGTKSEESTVKKPECVDVEEAIWKEWQQMALKTRRNEQRKTPRRTGMGVRALSLDGGGIRGIVLVQMLIEMESLMYGEGLQAGGHEKNFVQKNFNWIIGTSTGAIVALALVSGTSLIDALRLYLRLKDSVFGARAQLIGYNAQNLETFLQAQLFTTATYVGQKPPRLVKFRNFTSDLNEYNPYKTNIWLAARYSSAAPTYFESRDKFMDG

SEQ ID NO: 139558 - protein, 44 aa, Heterodera glycines
MNVKLSDGKGSFADRVLLMERLCPMVNKMGVAANKSNLIMQPLE

SEQ ID NO: 139559 - protein, 132 aa, Heterodera glycines
MSPPASNLASPYPSSAQPTRRQRKDRPQLSDSCPDHLLPQFCQSVRANPPAPCIGPEWPLAERGGENQPHGPNRSDHGPNSVGQTVVADQCSAVPRPQPPEGPSVGGDAFAHRKADAFLCQSVENCVIKMAK

SEQ ID NO: 139560 - protein, 415 aa, Heterodera glycines
KFFPLYRLHEATQSDEALFNRLVPKNKEGKRPLCDAQKRRLQRLGLPAVEDAEQLSTDQRRQFARLNLDRDQIYLGRVVDLNDRMLRRVEIGHGPQEQKHKRTTEYAITVSSELMAILAQCMGLADLRERIGKIVVANDRDMNPITADDLCVAGALAVLMKDTVKPNLMQTLEGTPVFVHSGPFANIAHGNNSSILADQVALKLVGSDGFVITEAGFGADIGMEKFFNIKCRTSGLCRTSGLWPNAVVIVTVRALKMHGGGPPVVPGNPLNPLPFEYLNPNLELVAKGCDTNLRKQIENAQLFGVPVLICVNKFGTDSDDELGLVVDKARQFGAEAEVSDHWARGGAGAIKLAETLIKVCQRMPPPAKFLYSLEESIEQKCRIIATKIYGAKDIEFSDEAKRKAEQFKCQGFAGL

SEQ ID NO: 139561 - protein, 133 aa, Heterodera glycines
MENGKRQSEQSQRMEATKTEEKKPLKQIMFLDDYEQVQGEEEGNEMANGREGQRREGGKEGEEEEKEEEAFEEEENEEEEEMFFFKPSGGHALSKDKRTRKWAIPKGHSVLRVPQGYFPNPPNWRLLTKKALF

SEQ ID NO: 139562 - protein, 86 aa, Heterodera glycines
KNRFILFFGAVPPNRCAQIYGETESFGNSFPIACTLILRWIFAPHNCLSTPNGHLKKSIFLFSGQSPRTDAPRFMGRPNPSGIASL

SEQ ID NO: 139563 - protein, 124 aa, Heterodera glycines
MVFTGIDRLIGIAFLEFYDNLKKRLYLALLTILSVVYGVCFSASVYQNAIMEGDELTTGSYGDFLKNKSILNTISFMLISMSFIIYVCLGIVVHLKASGKKRKEKAYGPLVGNEIADTSLHCIQ

SEQ ID NO: 139564 - protein, 79 aa, Heterodera glycines
MAKYCLKKQSKRLTCKKKFKIQRKVREHSRKLKKMSKESERKKKTEKQISVPSKCPFKEEILMEAEQKRTEAKVSPKKH

SEQ ID NO: 139565 - protein, 272 aa, Heterodera glycines
MSNEEENVEEQREFSPQQQQQGELRYFHEGFTYVKDRLSADGTKEGREDTDEADSHGDGTGPMTQSATAIVKVEAGDSLTNAILGILPQQSADDAEAGSTGNGPMHSAEHHQHETDQQQQMISSGTGAASVEGNAIAAGVRRHSLLGPIPIRSQQQQSVEGQQSTIGQPMVRNLPPATVRTANFAQNHPQQSLVNSQHPTVANNCHSEQHFAGRKRRAFPPPPQSSALPLNGFSNCVGEDGETVELRLKRLKCELIEVGAAANCERNTTKWH

SEQ ID NO: 139566 - protein, 291 aa, Heterodera glycines
MSDLPTGTVTVAVILSVISLSAILVGVPLMLNDLVNLQLEFGLKSQAHLDMSNVLWRDIMKEVATIGQWDKREQKQTIRKRRQCAKGGQLTTRNKCRSDGSGNIGGGGASSPSATCPQGARGAPGVPGAPGEPGQSGQDGQPGTGQDGQPGTSGFSGFPEDFAQQCPTCPIGPPPIGPPGPPGYKGRRGFRGEKGPIGTHLNSPMASFNFNFKGPPGSPGRDGHPGEQLMNGLSRVRGNCTVFLSGDEGPEGEIGLHGDLGEPGPRGPPGETGIGYAKGEPGPKGEHGQPG

SEQ ID NO: 139567 - protein, 405 aa, Heterodera glycines
AFFNECVDMNHFLWEFQRDPTSRPITAAIFAVVYSLIVLVGVSGNICVLLSIGRTRSLQTVSNLFIFALSCSDIVVCCVSATFTPYTAFTKVWVFGVALCSLANFTAGTGTSLCFSIFVLAAISVDRFLLIRFPLNNQLRHNHALLIIPILCLILCLFAMFVSFPMIFTQKLLRMEGYCGEFCVEDWGTNELYREIYGTLLLIVQFFVPLLIITICYIGIVQFFVPLLIITICYIGISVRLNRVSRISSDQKTDQWAMWLRHRQSMADRRRQRTNRMFQWAMWLRHRQSMADRRRQRTNRMFILMYVFADFSWIWFILFNLLRDLGLLPYFIREQEFLYGIITHAIAMTSTIWNPILYALLNFQLRSAIWNPILYALLNFQLRSAFLRLVPDGTRRNGRMEGGGK

SEQ ID NO: 139568 - protein, 30 aa, Heterodera glycines
KGMLLLSQRSTDGAVRGQRSKRPIRSRSRP

SEQ ID NO: 139569 - protein, 51 aa, Heterodera glycines
MPKIKSKCEWMREKIFYLFKGNEQMPKKGGTASRIDFGNCPRQYHWQSATQ

SEQ ID NO: 139570 - protein, 104 aa, Heterodera glycines
LRWIFAPHNCLSTPNGHLKKSIFFVFGAVPPNRCAQIYGETESFGNSFPIACTLILRWIFAPHNCLSTPNGHLKKSIFLFSGQSPRTDAPRFMGRPNPSGVASL

SEQ ID NO: 139571 - protein, 236 aa, Heterodera glycines
MALLSDRFDVLVDTHFDGKSELTIWKAIAIRKDKGPKPKLSVQIDDKFVDFPLPDHSLPSKIRFKELRINYIDHSVLTFIRSNKPIWDRRGTKLDLDVPSDNPTDVQPIWDVFVRQIWPIFATNIRQLGFEDGNHLDNLLRRTSPTLLTDLDQLISIDCGYLCPDGIADDGPNGIADQALTKWLHTPTKNGQPKRLYRYNYFGPQNLEWVNNFKEVARHIFLLISLIKKSKMDFLA

SEQ ID NO: 139572 - protein, 82 aa, Heterodera glycines
MRTLIASLSTDKLVNLLNIEYAPEGTDKQLTPLMLATVLGDAQMAQIFLEKGADPHRMCLKKINTDDNLISELREEGEKMDK

SEQ ID NO: 139573 - protein, 34 aa, Heterodera glycines
MAALQQRIALEKAINQEKSPFITLIFFNFYTAFC

SEQ ID NO: 139574 - protein, 74 aa, Heterodera glycines
MKEQKMRTNIDNEKEKRKRRGKARRKNKRTNERTNERTSLFCCGSNFAVIVMEKGKWLEAKSEAPQGNYLKKDP

SEQ ID NO: 139575 - protein, 89 aa, Heterodera glycines
MFNDDQATFVFMNPAHSQEQLVAERDLVKEMLQQALVRHHGPTVGQGRLGARAGGQAANSATKCAFVGHVQAFGGLQTDHSVRLLVLPL

SEQ ID NO: 139576 - protein, 78 aa, Heterodera glycines
MSSARNELQAKATEMAMRINNAKAVKEERKRMASTKPESLVRRRWRLRSSGSTTTSPAEIWPRLTRLARKSWRVRRPC

SEQ ID NO: 139577 - protein, 78 aa, Heterodera glycines
NKKIDFFKCPFGVLNHLWGAKIQRRIKVQAIGKLFPKEFGLPIKSGRIGAGGLPRKQKNRFFSSVRLGYSNNYGEQKS

SEQ ID NO: 139578 - protein, 256 aa, Heterodera glycines
MEPRKRSSNFSIDHILSAPKKPRQGFLINELLGVVHFLGSVQQGEGTSKEAKDYVKKLDNSIEHMAKFHYVKVKSKFTITDLPSTPEALLAGIFQHCIDEAIVESRERNIEPTHLGCMISSPMLEGGDIPIPIRQMTNNTLDTILNQFKKVAQSKQQKNVSLWGEPFTVTITTLDRNGLPSKRRVKGGARRPVKTAVHHRINDQCLIKIRNNDNHFCLFYALQATMVDKTCNWTRWKFLDYLHDRHEKQGQLHHDT

SEQ ID NO: 139579 - protein, 47 aa, Heterodera glycines
MATEIMALFGLTDSAWLDSRHFTRRCCRIGVNLFTCRMIFTKLDSEW

SEQ ID NO: 139580 - protein, 138 aa, Heterodera glycines
MFYARHFVSLVLILALSIDGVNGGPKREKGRTGNSSIGSSNLSANPFHYGQQPTDNRQSMPSSGSYWRDLISQVEGSAAGNAFNSSSNFAAPQPPTGGNQQDEVLDVEPINTFYPSAGGHGFAQGRSSKGSKRKGGRH

SEQ ID NO: 139581 - protein, 46 aa, Heterodera glycines
MCARVGKKSDHWRGEDAEENHNVIEFLTANSKDMILRKSVRHFYAF

SEQ ID NO: 139582 - protein, 21 aa, Heterodera glycines
MRTRPIWQVKQRLLTSQKKGF

SEQ ID NO: 139583 - protein, 103 aa, Heterodera glycines
MSNNPLQPTTSLTDTNELHLLEMLTFEEEEEEASQGRIIASASQNEDQTRNLSRETCTNEFGVKSVASASKIEGECTGLMEGNGAGNSETNKNINENIASASQ

SEQ ID NO: 139584 - protein, 52 aa, Heterodera glycines
CASALCRHTSFSARIFAISSSCSSSSLALLLLLLRLMSLKYCAGPSRQSSNS

SEQ ID NO: 139585 - protein, 187 aa, Heterodera glycines
MINLWKLFGTGFRFTEISGPRIPMINLWKLFGSGFRFTEILGTSDSNDQFMEIFGTRFRLTEILGPRIPMINLWKIFGTGFRFTEIWGPGIPMINLWKIFGTGFRFTEILGPRIPMNNLWKFLAPDFDLRKFGGLGFQLQFMENFWNGISIYGNLGASDSNYNLWKIFGTGFRFTEILGPRIPMINL

SEQ ID NO: 139586 - protein, 72 aa, Heterodera glycines
MILKKEKKTKSHKENEEEEEEEEEEESSSSSSSNEVSDQQSNDGSDAQSGPNEYGQLRLNNLKQCHNKCYDL

SEQ ID NO: 139587 - protein, 88 aa, Heterodera glycines
MTTNFLIVLQTLDSKSSNKGAQTSILSESCARRCDILKYVDRRYRVQAHGIGGSQKMVGRIFACQVQVDDNVFACPFEVMSDRDVDIL

SEQ ID NO: 139588 - protein, 211 aa, Heterodera glycines
MSVMPNNDQQKQNLDTKTSQENGQLSDSHETAVIKAPSGGNRKVPKNCWKKVNIDLEYNTSREISRRRQLAWRGERRGGETYGRRDQPKEQRKGSARVAEESSARKDEAAEKRDRNEAQKETAGEAEDGRAEGGGDEETARKRTTAPTGGTKTKNGPNEDGAETGTDQQQQQSRDYWYSDEMSNGYYYQHSGSHGWKKTGTDQPQQQPRDY

SEQ ID NO: 139589 - protein, 64 aa, Heterodera glycines
AGQTPLASQCHPPQIPRRNSFQLITIRNIVEGLRNASEPISTSQEKLSRYPCEDEAKTLLCCAL

SEQ ID NO: 139590 - protein, 20 aa, Heterodera glycines
DYFLKHLVDWGIIRDCGINR

SEQ ID NO: 139591 - protein, 241 aa, Heterodera glycines
FQSLALNPPAFQSLGLNPPTFQSLVLNPTAFQSLGLNPPAFQSLALNPPAFQSLGLNSAFQSLGLNPPAFQSLGLNPPAFQSLGLNPPTFQSLVLNPTAFQSLGLNPTAFQSLGLNSPAFQSLEPKSFQSLALNPPAFQSLGLNPPTFQSLGLNPTAFQSLGLNPTAFQSLGLNPPAFQSLGLNPPAFQSLALNPPAFQSLALNPPAFQSLGLNPLAFQSLGLNPPAFQSLGLNPPAFQSL

SEQ ID NO: 139592 - protein, 81 aa, Heterodera glycines
MVLHSQLRGVHIAKLAWPPRGVQSPYLSKAMAAIEENRSLSLYALAVGTALAAALWFGRGRTSPPPGNRFLAEPSADSLLT

SEQ ID NO: 139593 - protein, 103 aa, Heterodera glycines
ANLKELTQLFSAFGELNFIRLPKKPGSEGHRGFCFAEFLSVSDAHRAMDALVHSTHLYGRRLVLEWAKPSEESAEEKRQRTQDRMAMAAGVAGAKKRPKMRSF

SEQ ID NO: 139594 - protein, 18 aa, Heterodera glycines
YSEAIPEGFGLPINLGAS

SEQ ID NO: 139595 - protein, 36 aa, Heterodera glycines
MHSFKLFASLFLVLCVVSLVICQDKPAAVKRGHLLN

SEQ ID NO: 139596 - protein, 58 aa, Heterodera glycines
MKFSINSFAKVENVTALTYRMIEMCHVGVPFRWGSHTRCIRPATAAPCLTNERGNAEH

SEQ ID NO: 139597 - protein, 29 aa, Heterodera glycines
MDTRFVIRLHLPTIDKFEKNFMINDHVMQ

SEQ ID NO: 139598 - protein, 214 aa, Heterodera glycines
MIKKNLSLTVFKHDKKNFKFCFETKKLKGYRIHSIYADQLNGALPELVKLYFNDAPPNTNRRTLTMQMCVVTNCEPKNCCKLTVCYVGQMNPANGPLNSRFELENFEKSEIAEKCRKAQKKSWPQFGDKVLHGFELSYYYVNKSLMVSTSFNPISQYFAFNESNVTKCIDVILGENGYLDGYVQGERKQLHETYKKGDGLYKCKGKQCKDSMPK

SEQ ID NO: 139599 - protein, 16 aa, Heterodera glycines
EAIPEGFGLPINLGAS

SEQ ID NO: 139600 - protein, 207 aa, Heterodera glycines
MDAILATDWLHNAFPERKTTTTTTTISSVEEELDDAVKAEEQISWLKIIEEEEERGNELQTGEMEVERAKEIEPPKRQHLQSKCSCNEKQKSVPLIDFLCQHYKCSVKELHVLLQTLNKRREISEMLRSQLQLRTNHLRPAWKNFRVHCNELTIHPAQTAYAMRGYLGITVRIYYYVKHGVKLVYPQLPCVLQFGGGAIVLCFRLSV

SEQ ID NO: 139601 - protein, 344 aa, Heterodera glycines
MRHAMRMFLVPEDVFQSVFVQHHTTAAAAADGADGTPIGLLRSRIQQIERSRELNEEQKAAQYHQEFKRLNKLVREQEEQPINVRLQHEKEREKNSATPLPPPQTINHSTPKRLEKNIVPSAFGLRRQRHHYTQKAGALSNRRPAQKQQRKAAAAETPNSSGNGETEKEEGNGDDGEQWDDAQSSSSTASTGGAAAKRVLRARDGEAGKGGGETADRLQTKHNYQMTKNALITHIRKKGHSLGVSDQGKVLRADGSEFKTSNVEAIVSHLLNRDKRSEFKRPPVGYKEFADKAREDPLLKKYLFPEQPLQFGKGLTDFRHGKRHKKKCEGGGGKSVFRFKPTLW

SEQ ID NO: 139602 - protein, 140 aa, Heterodera glycines
MESHTTHKLPSTYTDEQLLAEQLLAFIDLKFGGIGNEIAHHGNEQGGKGDMRSIRSAAYTYVVKQIFGLKKTGLFALPTVLSTDVESQMQKIITERKCAVVARLQQPEIKDKTEQKNVLAFKSFCKGPFFHIFDSVQNLV

SEQ ID NO: 139603 - protein, 45 aa, Heterodera glycines
GTAGGNNAKGPAGGGVQLGDLLQHPEMLRQLVGQVPVDSSEATTK

SEQ ID NO: 139604 - protein, 385 aa, Heterodera glycines
IFFTFSLSLRPFSFMVLFRVRLRFGPSISPYRLRFVFLRFRWLLEAHNYPRFTLLGQMFAGFVLGCEALCRHCPEWFMDTTGCPLTLPLFRWIACAKTMCYVHYPLITTEMVALVMVALVDSRAVSYNNSSQIASSIVLTNAKLFYYRLISLLYCACGTSSQVTMANGSWTASHIANLWFCQWTASHIANLWFCQPKVVFPPCNVEILSNLENRTEQLLAGGNPSLILSVGQIRPEKNHLEQLRIFAEVRRRLKERDFLFKIKLVIAGGCRNAGDWDRKERDFLFKIKLVIAGGCRNAGDWDRVDFLKNSDEAVQSDCDIAWQLNVPFAELTDLVDFLKNSDEAVQSDCDIAWQLNVPFAELTDLLRVCLNRHRIRIKFLSIIFF

SEQ ID NO: 139605 - protein, 47 aa, Heterodera glycines
MVKKAENNLKKFTNEWDEMVKKAMLEGNLKLNKMICIKIKAMREKIY

SEQ ID NO: 139606 - protein, 47 aa, Heterodera glycines
MPPSADGHRSFEMTCGRCPTLRGSCLTSHAFGVLPYVGAVVYRSVLH

SEQ ID NO: 139607 - protein, 64 aa, Heterodera glycines
MCKRILIQPNVWQFAAVFTMNPRTLAGIRKKTELLFGILDNSKFLMTFADRLLRTDFCGPLFLG

SEQ ID NO: 139608 - protein, 66 aa, Heterodera glycines
MNDCLSFIIRCNSYQILRLFFIKLNRQISRVDGSPKRIQKEEKQLALLLLYASHNFGKLKLFKCDD

SEQ ID NO: 139609 - protein, 33 aa, Heterodera glycines
MCVKFIDRFLDKQHMIETIKFFIKKFMSLVQNS

SEQ ID NO: 139610 - protein, 44 aa, Heterodera glycines
MPDQMRFGTRKLEEKGGKKERRMNERHLTNGTRKRFLWAFENCI

SEQ ID NO: 139611 - protein, 81 aa, Heterodera glycines
MAFPYLVNVPLIEDLEAREANTTYVSTGPSPHTIQALIPRLHWSWASFSFDHIHDLINYCYVGANERRFIVSLLPPHGHGV

SEQ ID NO: 139612 - protein, 142 aa, Heterodera glycines
MRSSAGDRISRPTFGRWSDSDQKQRDCVSVKILNARAWSRSRDRSHLTLPRELEDLTPEVEDFYKKAALRTKAELGPPLVHGGRLVNFPKVRMRLILCEIAQQPLTPKSFNEPASGVEMLAMLHAIVPKKPFLKGEARIACG

SEQ ID NO: 139613 - protein, 77 aa, Heterodera glycines
MARMALDLRYVALHEIGHALGLRHSTYRHSVMNSYYRQNLALLDEQTEEFKLSKDDKAAIWELFGEKCHQKKKRRKS

SEQ ID NO: 139614 - protein, 56 aa, Heterodera glycines
RKKLQQKSFGEIFGEKWEEKEEEKREIIGKFYKIKEKIKEKGRNIQQKNGVKSMRK

SEQ ID NO: 139615 - protein, 108 aa, Heterodera glycines
MLSLMVLTLLRMESSELCGTKIHYAREFMKCALFCMRTTLTWLVSYIFVVFDTSVGVPSGPLVQNRLIVSLVWHKPGFRRLVIAKVLSLGLHIRALDICAYVQNRVQT

SEQ ID NO: 139616 - protein, 46 aa, Heterodera glycines
ILINIEIKTHKKIYSLLFRQLVKSFRMIPNLSRFDRFKKVRSDKSL

SEQ ID NO: 139617 - protein, 480 aa, Heterodera glycines
MRNVPRNTRGEICELRFLPLEDTQRPDLLMEVLIQHLLDRVLDGHPPPSLVGLQLHPPGFDRPYVIRLRPPEQNNAAALAAAIERLNEQSAAGIDLFAGTTVAKVLAVWPLEPIRADPQRGAPMDARGQRQRQPICQWRRVCRDCGRIAYQGKHQCPRQQTADNGNCRRCDGPHTAEEPCFIQPICDLSARQRASVAVDNDDNSDDNGDDDGEDDVLPLRLCFFDAETSQDSPLQLNNRLVQKHVPLLIIAEVICERCLQVGISVNDGLGRRAPDCVCMPGMVRGQQLRQWSSPPFANTRGDNTAVPMEAPTFNQRRFYFHSFDNEADDPVDQFLDFLTHHGPKKAHTVCIAHNGGKYDFHLILEALHRRNQPPKRLCTTGLKIYSMRLSGSHQRRVTFKDSINYFFCELDALVKSFDLPEHQATVKPFFPYLYIQRQHLLQRLDTLPAREFYSPDTMKAEKRAKFLRWHANNNGNGFQL

SEQ ID NO: 139618 - protein, 168 aa, Heterodera glycines
PNDDCYDYHLIEHAPAPMDARGQRQRQPICQWRRVCRDCGRIAYQGKHQCPRQQTADNGNCRRCDGPHTAEEPCFIQPICDLSARQRASVAVDNDDNSDDNGDDDGEDDVLPLRLCFFDAETSQDSPLQLNNRLVQKHVPLLIIAEVICERCLQVGISVNDGLGRRAP

SEQ ID NO: 139619 - protein, 701 aa, Heterodera glycines
MVRGQQLRQWSSPPFANAPGDNTAVPVDAPTFNQRRFYFHSFDNEAADPVDQFLDFLTHHGPKKAHTVCIAHNGGKYDFHLILESLHRRNLPPKHLCTTGLKIYSMRLSGNHQRRVTFKDSINYFFCELDALVKSFDLANDQATVKPFFPYLFIQRQHLLQRLDTLPAREFYSPETMKAEKRAKFLRWHADSNNGNGFQLREQLIMYCANDVAILRESAIRFRQLIADNTQGLDPFLNASTAAGLALATLRRCFLAPNRLVHSPEGGYLRGRRASAESQRYIRFFELENPGAQVQCAHWSVGEAHIEDTGYRVDGLWRRDAPLRPLAIEWLGCYYHGCPKCFPDRQQRLAAGRTAEDLYERTERRLFELEHEHGCEIHKVWACQWSERLRHDPELKRRGKLAQRVGRTEIRYTRTPAEFHELLEDPSLDKLDFVHVSEYMDRCVVRKRPEFAKAPLTNCLPVASFVTSYARLHLYDYIEQVLAIDGAELLYCGMLFFHKTFGVHAYALDTDSIYYVNKMGGPCVAEGEALGQMKREHTDRRIVEFVAGGPKNYGIRHTARDGTDERANLKIRSFRLSYAAQQLLNFEAMKELTLATYKIDGPIDDVLDNDDLYVYGGGEHRAIRVNFPHIDRNAYADLYTHEAHKDYRPFYAKGRVRPGMQTRPFGYVEDDGPPNDGQRTERRKRNFVDHDPAQPGHSGWF

SEQ ID NO: 139620 - protein, 124 aa, Heterodera glycines
MDLILATDWINNAYPEMDLQDANKEPTKKQEEEADDPSWISLIDEEMKREPLAPIGTPKKCACAERRRPVPLVDHLCKRFKCNAHELHVLFKSLEKRRDIVEHLRSSTAHRPPAPVRAQFSGPL

SEQ ID NO: 139621 - protein, 573 aa, Heterodera glycines
MDAFQQFKREDGQFRHPFTMIVSGSTGSGKSEWIMRLLRNVDKMISTPVERVIYSYGELNTNVMNLQRAGKVANVPVTVHSGVPRAEQVRECAKKEKTLLVLDDLVTLCNAKKAKALIRYASDEQLLCLVEICLNILKGRVPLRPRYLNKLKAHAQVLRRLASTRCSRSAKKVLLQHGDGLPAIVGLIASIALPLIADHTKRYLLVPEEIYQSLAAPPPSDGTPIGLVRTRIKQIKNDDAINEAERAVKYEQEVKRLNKLTKDEDERPVGVKLENLSDVVDAMPKPVNVTRPIVVSTRRHLKVGRARKENVEQLEDTDDDDDYQNPRSSSSNKRQPTQTEILKLIYKNAQSLGVSEEGQVLRAGGRPFITSSVDDIVSHLLNKDKRGQNKEPTAFKEFVERARQNPLLTIIMDLKKLRLREFLYKDLSSPVAFTSVEPLLREARKSQPKINRNDVQNYLTSQRTYTLHRQAKRRYRRLPTLAPGLHTEWQADLAIFDRLGKQNRGFKYLLVCIDTLSRQVFVEPVKTKTSANMIIAFNRIFKRSKIYPVEGVNRSGKGIHCPGSTAVLPHKRR

SEQ ID NO: 139622 - protein, 303 aa, Heterodera glycines
MSNCSVNRLPHTLKKGEDDQLLKRSDLIDTLNTEFSCPICLDLLKNTMVTECLHRFCSECIKKCIYKGNIWPDREQYEALQREKAQKWSKHFDVVALQRSIAEGMRAQAKALIRHSNADVNEPTTTKRAEGSGQVANKAKKASPPIQHNAICAPKKLCLLPRHVMENDIANADFYTDSSSESPSSSSGKDTSFDPTSDAGKGTQLSKSLIVDVDVGLFNKSVDDRFIGQLTSREAELGVEELRVKFVNICKNMAKVELSFFVQLYNNKMTRLYANESMCTVLALARRPNFFDYPTVFFNIEAI

SEQ ID NO: 139623 - protein, 225 aa, Heterodera glycines
MYRLLSKVDQYPEASRIVFDRTDVAKPTLSLSGVSEYFLNIKLEKTEREGNWSQRPLRLEQKKYAAQDAHCLNRIFRIVASKLKRLKDNELAKELKRHSLIDFNEEKAKPTMAIPLLSGQLVRVKEGEEDFILNVQLALQMPDNEVVNVPIATDGTTPPSLLVRNLLDELRIILRPSDMWSRCVECNKRSFVRIPKRIVQTLCFMTAVRHSAEWMGVDEQVDKFQ

SEQ ID NO: 139624 - protein, 166 aa, Heterodera glycines
MVEVAIAQIKTLLENEVPKAVFWMDHLNLRDHFPFNTHALQFSSDVRDHYFRRLFESKLPERACHFAELLELSEHDYIPELRHYCQQNADEVQRIRNQIRKDIAIRLQNQQIEEQCVCELTPGHQIVLVDTWPKLEQLIDHLRHDNEELFGIDAEWRPHYLCAAEK

SEQ ID NO: 139625 - protein, 56 aa, Heterodera glycines
MVIFWVGIFVADFKKMKRDTEAEKITFSWKGPAVPIDAVGPGPSFSKSRTWNRDLG

SEQ ID NO: 139626 - protein, 86 aa, Heterodera glycines
MFKAISKFCAILIIDIFGIDATVALHAAQEEKIVWQREKHSTHETKSNADWLNQAEGGRQAGNEREKLLAREKIKDTLLGREKREK

SEQ ID NO: 139627 - protein, 76 aa, Heterodera glycines
MSAALKPSDYKIFPKSQKCVPSNGTESTASGATEDSFSAEDRKTDWRSIYLAALVCFFGQVQFSIFLNSQFAFMKT

SEQ ID NO: 139628 - protein, 59 aa, Heterodera glycines
MNLFFFLIGTEQHGSWDWLVVVIAMININDLRFADVIDAIWPVDPPTLRMALSRDETDK

SEQ ID NO: 139629 - protein, 109 aa, Heterodera glycines
WICNYVWLDILPSFDYAQLGLQMALLSYRFNALVDAHFDGKPELTLWKTTKIRKQIGVPKSVLANYADSVQFPLADHPLPNKIRFKDLRISYIDHSVIAFLRSNQQIFD

SEQ ID NO: 139630 - protein, 38 aa, Heterodera glycines
MNQWHGRCCKSMHHNFSSIVKMPAEEVPWPNVAVPSEA

SEQ ID NO: 139631 - protein, 51 aa, Heterodera glycines
MPPKPSGKGAKKAVKSTKAVRTGDKKRRKARKESYSYPCKVWGASDKFLKK

SEQ ID NO: 139632 - protein, 199 aa, Heterodera glycines
WVYAYRVNYDTLNWRMLIAQLHKNHQEIPTMSRMQLIVDGETFLRQSANTQLFVQLLSYLAHEDDLGVLLVGLDALHALLELFSASDVFGTMLVHFVPVIHQLDRQLSLTAAHGTDPELAALWLLSPLRLAKLYQLRCAANLGTCAETKQVHWTKNGTTKCWDKHAQIWHLFLVQSYSGRVNVRQSLAGAPVARPSDRF

SEQ ID NO: 139633 - protein, 73 aa, Heterodera glycines
FVWLVAFFGTAFLNITFGLALSLLFSLAMFGLRKLNDAIATKGRRASPESSADSERQLAKLPQIVNVTLAEEK

SEQ ID NO: 139634 - protein, 60 aa, Heterodera glycines
TVSFFLINTRNHQIKTTKQLRILPHEYTVSINNLCLLRLFSFLFRLFSLWPLLRCVFRLS

SEQ ID NO: 139635 - protein, 98 aa, Heterodera glycines
MHKTVPKLKITLPKLDLNDPASLAAFASPESLDSQELDEDDILLDNEWNEPMDDEEEEEEDEDMMMMEEDDDNNDVGDLFDVEDVPPAEAMLRCSQNR

SEQ ID NO: 139636 - protein, 95 aa, Heterodera glycines; identical to SEQ ID NO: 125597

SEQ ID NO: 139637 - protein, 272 aa, Heterodera glycines
MNTEKDMIKAIETKIIALEEHKKNEEIFIGVLKDRFGKELLKAVHPDIRKNIVEKFSYPKQNYWDANASHNDLEVFGTESLKVYYKGDGSVFAHSDLPPKRCHWTEVLAKIGTVVHIKAMANFGSMDQAILEMRTFLVAISSVVALIWPLVGWFISFGFAVKQKTKLDGIILYEKGIYVYESDGEIWLGNSKEKRTNYEYSYGIGDTVGMGINLATRQLFCTKNGLRLGFSDLLVDPSFADDSFHPFLTLGHSDDKIEANFGPNFKFDLATL

SEQ ID NO: 139638 - protein, 105 aa, Heterodera glycines
MSLNRFCAICCSQMYRRHWSQIISKYLLAIILLFALAISAPILWHSVCFRLSEVRTPLGQGQHKMDGPVFMEIPTQQIYYNITKMFAICHLAFLLFAYPLMCRRI

SEQ ID NO: 139639 - protein, 34 aa, Heterodera glycines
SFSSSIDWYFFRKNFDFFPEIEKIFGLSGTFESR

SEQ ID NO: 139640 - protein, 27 aa, Heterodera glycines
MSEVGTRKSEVGIPCHPWYTMVKKGVL

SEQ ID NO: 139641 - protein, 64 aa, Heterodera glycines
MVQLANGGGAIGDEVGTEAEQQQRDRMGPAKKKTKRPAEREQNDDQQQKGQRRAKEREDKEEKK

SEQ ID NO: 139642 - protein, 36 aa, Heterodera glycines
MSEEKFEDVDGSIIGQKRQNTENGGPASKKANVIES

SEQ ID NO: 139643 - protein, 207 aa, Heterodera glycines
DELTEAMKRRDTTLTIHLFGRRGQNTLSFDEFQNFFYHRLQREIIEIEFHEFARGKTRISTVDFARLVLRYSILHKEEHSPYIRRAYERSQFHCQGVTLQQFEQFSMFLNNLEEFSKAVRLYSLADIPVSQSEFIRAVKCSTGFSLDSALVRVIYKIFDANADDKLSYREFIAVMSDRLSRGLKQRTEQMFWLNSFKECVRNKLSGI

SEQ ID NO: 139644 - protein, 182 aa, Heterodera glycines
TASSRRLQKELSEMRGNNSGAVRVLEVDESNLLRWSLMLYPDREPYNKGAFRVNVDFPTEYPFDREPYNKGAFRVNVDFPTEYPFKPPSVTFATKIYHPNIDDKGQVCLGIILAENWKPATRAEQVMNALLSLIAEPEIAHPLRSDLAEEFQRDKKKFFKNAEDYTKKYADYTKKYAERRDV

SEQ ID NO: 139645 - protein, 104 aa, Heterodera glycines
LTIHQKDQYQAQNGPTKYEPKAEGQHVTSSVTTAEAGKYSSSSGHASSSESEEEDRWEEPRKRSRNRERDERNGRHGEGEDKAAKRWYKSDESKEEKRDGKGRE

SEQ ID NO: 139646 - protein, 58 aa, Heterodera glycines
MIRSLLGSPLETTPLRRPPAGDFRPELETMFGSQKYRKPRKCNKQNAKLLKVFVGAGQ

SEQ ID NO: 139647 - protein, 52 aa, Heterodera glycines
QFTKSSSNLMKQFPSSFESPNLWNFLNKTTNDDREKEEMKWNEIYLLPSYPN

SEQ ID NO: 139648 - protein, 251 aa, Heterodera glycines
MASQAEMANLFRQLTDALQNIATQTNPNPNKQNSDLFTTINSQLSEFVYNPETDSTFDIWHDRFGAFIEKDGQQMPDDMKTRLLLGKMSSQDYARYSESILPQNPTDLGYQATRAPSQSVMDFAEQVNACCEKAQMALSKEEIKALIFVSGLNSGDRDLRERCLKLLEESRTKNVAIKFVAIVEECRTILSLRSAAAALEQPGQCFNANAIALKPQQAKERHSRHQKFSPSSRRENSGNQSRSPSLNIRRS

SEQ ID NO: 139649 - protein, 459 aa, Heterodera glycines
MLYGRKFTLLTDHKPLISIFGSKNGIPIYTASRLSRWALTLFNTISNLVHFHQRFWTGRCSLSIDHAAPRGTADDDHVIATAQTIPISIQVQKIQLNMPRLPLSMFCMHQLPVTATEVAEKTKQDEELQEVLQNCRNHWPKTAHSSLLSAFYTQRARLTEVDGCLLMGDRVVIPSSLRNRILTALHFTHPGTVRMKSLAKQFVYWPRMDLDIDREHGIRHTFAPPYHPMSNGRAERFVDTLKRQLKKCGETDSHWVQNSLLAFRSTPNASLNGKTPAELFLGSPVRTILSLVRPDEKKKHSDTTDKQYRHKMAQQFNRHYGTKQRTFCTDNPVQFANYRNGSKMWLSGRIVSGNGVVWRIYSPQLNAVVTRHSNQIRKSFPIPYRDSSEPNEQQDQDEQQQEAPQSPRHVRFADEENEPLEHVQIIEPRRSTRQRKQTQIFDMDTTRAKYDLVNPGQNI

SEQ ID NO: 139650 - protein, 82 aa, Heterodera glycines
MPKEMASSNGFIGRLDNVANLELFTKVRILSDGQTFLEAANSVQSAQQTEGAANEMPFTYVDKVRICDTANGDEVNQLNAYS

SEQ ID NO: 139651 - protein, 227 aa, Heterodera glycines
LNPPTFQSLALNPPTFQSLALNPPAFQSLVLNPPALQSLALNPPTFQSLGLNPALQSLALNPPTFQSLALNPPTFQSLALNPPTFQSLGLNPRALQSLGLNPPTFQSLGLNPPTFQSLGLNPPTFQSLVLNPPAFQSLDSTHQHFNHWHSTHQHFNHWHSTHQHFNHCYSTHQHFNHWDSTHHHFNHWHSTHQHFNHCHSTHHHFNHWYSTHQHYNHCYSTHQHYNH

SEQ ID NO: 139652 - protein, 114 aa, Heterodera glycines
MPFCHFSFAAVESRELIYPIEVKHLALFLLDFYKEFCDQNEQFAFCLATQANILDTFHVELKHRSTEVMKSEKPQNGGQLLLFIELEKRLKMKKQRPADQTGGAICRFAGKETA

SEQ ID NO: 139653 - protein, 181 aa, Heterodera glycines
MYGTSNVYGLTVVMGRMLMEGNSPLVIPIHPRNGRRFTSEEITTDSVDCMHHFNKLFVLITKTLSEMGEIREDQNNSNYSPNIVHKQKMSQQQMQSKMCKDKTSKPLTKQVDQLLYELPQQNKFSINSLCQPPEFLKVFSDMRCLVGEKAVFDCVLLGSPRPEGDFQFISEALCLIMLNFQ

SEQ ID NO: 139654 - protein, 72 aa, Heterodera glycines
MTATITWNSPKKNHGPEQYFLLFAQEPAPQFQYWRRFEIGKSKRFTLTDLSPDTRQKFIILIYLIIRAANFM

SEQ ID NO: 139655 - protein, 39 aa, Heterodera glycines
NVSSSAICTFCCFIWGAWDAIVAAIITVISHCLRYLSFK

SEQ ID NO: 139656 - protein, 47 aa, Heterodera glycines
MDKVGEGHSLGGHRRDPRGRTGVRAAVQRGGGRGPGKNAKFLSFYCY

SEQ ID NO: 139657 - protein, 100 aa, Heterodera glycines
MQNIRECFLVITNIKCILQFVFSLLTIFLIQQDNGDGSCKGKGVIVGLALTKQPIIARVLIFNLMTKLPWKSILIQSSDLFGPFRFITPLHCRTKSKSIF

SEQ ID NO: 139658 - protein, 95 aa, Heterodera glycines; identical to SEQ ID NO: 124528

SEQ ID NO: 139659 - protein, 65 aa, Heterodera glycines
LEKSAIIGPTDGTDSSVTIQFVTMSTLSPFWAVLLKEQTYLVEIMLNNGQNPNEHVTFMCDEIKQ

SEQ ID NO: 139660 - protein, 47 aa, Heterodera glycines
MNSDGMDCDEICALEEKWRRMNESKTKDGTEMGRKKQTTVFGRYEWT

SEQ ID NO: 139661 - protein, 79 aa, Heterodera glycines
MRSMKWRVPVSYLILFINFFLHAYVYGGGKSKYRSADQKLNGSSLADQKQPNVDKQRNGTILLMGNNNNANEATPRRDG

SEQ ID NO: 139662 - protein, 52 aa, Heterodera glycines
MPVKFWSCTGPGILTKTGTGLTGTRKVETGTSVFVRVRDREKAVTNREFIFQ

SEQ ID NO: 139663 - protein, 26 aa, Heterodera glycines
MAVLMIIISFINHSCRSHDLLNEYEH

SEQ ID NO: 139664 - protein, 29 aa, Heterodera glycines
MYFSSLKMIISLSKQPIHMELPLVTYLIF

SEQ ID NO: 139665 - protein, 41 aa, Heterodera glycines
MNTQRFAVGPIRAFWSLSRLKGGSSDKKENCVTSLLINLEK

SEQ ID NO: 139666 - protein, 123 aa, Heterodera glycines
MSAKIIRVPKIACDLSLAKNGVSKNRNYAQKAPQTILALPIPSTIAFIHPIMSAKIIRVPKIACDLSLAKNGVSKNRNYAQKASQTILALPIPSTIAFIHPIMSDKIIRVPKIACDLSLAKNG

SEQ ID NO: 139667 - protein, 78 aa, Heterodera glycines
NRNYAQKAFQTILALPIPSTIAFIHPIMSAKIIRVPKIACDLSLEKNGLSKNRNYAQKASQTILALPFLLQSPLYIPL

SEQ ID NO: 139668 - protein, 49 aa, Heterodera glycines
MTSTEVHNVIAFGGMARYVEKNVDRGAMYSLGGGGGGASREGADDGLKD

SEQ ID NO: 139669 - protein, 721 aa, Heterodera glycines
MDAFQQFKREDGQFRHPFTMIVSGSTGSGKSEWIMRLLRNVDKMISTPVERVIYSYGELNTNVMNLQRAGKVGNVPVTVHSGVPRAEQVRECAKKVKTLLVLDDLVVGMSQQYLDALFTRGSHNWGVSVILTLCNAKKAKALIRYASDEQLLCLVEICLNILKGRVPLRPRYLNKLKAHAQVLRRLARTRCSRSAKKVLLQHGDGLPAIVGLIASIALPLIADHTKRYLLVPEEIYQSLAAPPPSDGTPIGLVRTRIKQIKNDAAINEAERAVKYEQEVKRLNKLTKDEDERPVGVKLENLSDVVDAMPKPVNVTRPIVVSTRRHLKVGRAQKENVEQLEDTDDDDDYQNPRSSSSNKRQPTQTEILKLIYKNAQSLGVSEEGQVLRAGGRPFITSSVDDIVSHLLNKDKRGQNKEPTAFKEFVERARQNPLLTIIMDLKKLRLLEFLYKDLSSPVAFTSVEPLLREARKSQPKINRNDVQNYLTSQRTYTLHRQAKRRYRRLPTLAPGLHTEWQADLAIFDRIAKQNHGFKYLLVCIDTLSRQVFAEPVKTKTSANMIIAFDRIFKRSKYIPWKVLTDQGKEFTARAVQQFFRTKDVEHFCMLTSPQFHAGMAERANRSIKERLYRYFTERNTYKWIDVVQDIVCAINHSTNSSIGMCPADVNFKNAEALRQKLHDAVENVVRRKPKYRVGDRVRIEKYKHVFQKGYLPRFTNELFTVAE

SEQ ID NO: 139670 - protein, 72 aa, Heterodera glycines
MDLQDANKENKEPTKKQEEEADDPSWISLIDEEMKREPLAPIGVAQAGNLCGIVPDADVKFSEATAAAPIQF

SEQ ID NO: 139671 - protein, 38 aa, Heterodera glycines; identical to SEQ ID NO: 130615

SEQ ID NO: 139672 - protein, 99 aa, Heterodera glycines
NVSLFERIVSILCVFGVFVGLFAFLWSLVILFDLFSGWENKPRWALPALAFSTFSLASVAAVIYLFRGCSENDNFVSHLTSSPSSPSSSPVAKCSLHYS

SEQ ID NO: 139673 - protein, 181 aa, Heterodera glycines
YQFFLQLRHDIQTGRLDCPREAVIDLAALALQSEFGDFSPEFGDFSPKEHSMEFVSEFRFHPAQDEHMERDILHSYATKCSGMSPSQAELAFLNNARLLDFYGVDMHPVEGRDGNTYRLGLTPVGMQVFDGRQKIGLFVWEKIQRLDFRGRKLTLVVEEDLEQPVSQISQFWGLAFSLFSH

SEQ ID NO: 139674 - protein, 159 aa, Heterodera glycines
MAYDYGGFKSESNCSCPNSQLIATKFIVAEYDCDDDHDSAKILGGMRKINRAGLSALTGLGLSSPRQSSFSMQKRKYAEVQFKCEQCGQIVHKTYEIRQNGTKWDTFGRHTDIHPVKISGPIYNRTYEDVERIYDDMWSDYSVGTRNTKDWVEEMIHRL

SEQ ID NO: 139675 - protein, 44 aa, Heterodera glycines
MTESDEGTNWVESHPCRCGAKNWTASHMERVMVKLCCGSEEVQN

SEQ ID NO: 139676 - protein, 145 aa, Heterodera glycines
MNVIQSKTVIKKKSQWKPLEIGTTKIPDPEELPFGIVQTAFRASDRMRTTSEDSAESFDAYGPEWEGKGRGIGNRREFSSPNMTSSGRRMSITERLFGRPVPQERRNSLGEEQMGQEKPKSIAENKDFKELMKRQRKILGDDEWQ

SEQ ID NO: 139677 - protein, 70 aa, Heterodera glycines
MALAGFDTSKEKMPDNPCDTMLINALIMAWKKFDDKDAIILIVAGKLYRDYEQYQLNYLMENVGNVKLAF

SEQ ID NO: 139678 - protein, 149 aa, Heterodera glycines
SNERRNGRSESANGDKKKKVKEEGPGRLYDAFAQAELVAERLKLLDYEREFVPLGDSLKPILRHRHYFALSTNIGEQFHLFTSLCAWLIRKSGVDPSMEMPHEFDDPNATIAQILESLKAKVAGGGRRGRETVETLDRAFPPTNPNDLH

SEQ ID NO: 139679 - protein, 72 aa, Heterodera glycines
MNGYSILCVMLLVELVVVPIVNGSPVVKYQLGKRISFLKIIEQILRLNVLLFQYFLTFLESKFLLFFLFNFY

SEQ ID NO: 139680 - protein, 48 aa, Heterodera glycines
MTAIGVPIKILHEAEGHIVTLETTIGEVYRGKLNEAEDNMNCQMSDVT

SEQ ID NO: 139681 - protein, 171 aa, Heterodera glycines
MQAILTQKNRTKLQHNGHSYIFHKPSADGEVRFWSCEHHHAKDIRCKGRLHTNLNNNVLREVGNHQCEPSAARMEAQRVITKIKRRAEQTMEPPATIRSLSLQNVATPVLAQLPTKNAIKKVFSLFFVMRFLCLGKWPKCLSREMAGREVAVGKWLDPFDEKRQSLIFNDA

SEQ ID NO: 139682 - protein, 30 aa, Heterodera glycines
VIKNLLKNNPPVSIKGPVSNYVPLSEEVAK

SEQ ID NO: 139683 - protein, 101 aa, Heterodera glycines
  unsure (1)..(101): unsure at all Xaa locations
RGICSRWLLDNPIRFGGVGHVVQIDEALIARRKYHRGHRVRXIWLFGMYDVHTNNXVVRIVPDRSRATLLPIIEXFVVAGSSIHSDXMGAYMGGAIQPSLS

SEQ ID NO: 139684 - protein, 99 aa, Heterodera glycines
LLMMLALVMIHPPNPCAIDQPRRRFIRVSLALFPSGRNDQKFADAFHNCHYVSIFVHYFPLFFSLFLSLQTPNIAIACKLLLCLGQAEGQVLLGEGQKN

SEQ ID NO: 139685 - protein, 39 aa, Heterodera glycines
MRVDFKYALAIQVRIHAMRSTFKSKTRFRAFEHEPIGFN

SEQ ID NO: 139686 - protein, 21 aa, Heterodera glycines
LCFIFSVNFINLSFKSINVYL

SEQ ID NO: 139687 - protein, 244 aa, Heterodera glycines
DQEARSPWTCISRFLPSTQTIMQFSEGRAPTPEDRIVYVCGSRAPTPEDRIVYVCGSFDLFHIGHLCFLEEARRLGDYLIVGIYSDQDVNSYKGQNYPIMDVNSYKGQNYPIMTLHERVLSVLAYKPVSEVVIGPVSEVVIGAPLCVTKELIDRFRINFVVQGIRTEHHTATEEADCYEVPKHLGIFKHLGIFKTVDSGNEMTTERIIERIIKNRLEFEQRNRAKERKERLEFEQRNRAKERKE

SEQ ID NO: 139688 - protein, 169 aa, Heterodera glycines
MVAHEGVISGHLDRPFSNGAAAAAAAVHHQQQQQQLFHQRHHQLQQQQHHHHHHQQQQHAKQHPSSSVGDCGEEPMDSASGAGTFCASSSTISNTTSSSNMVEKCEPSTVADEAGEPMPANIASSNSGNNTNNNNAMMECNSSNKLEMGQPPNGSTTTAPKQHPSTRGT

SEQ ID NO: 139689 - protein, 26 aa, Heterodera glycines
  unsure (1)..(26): unsure at all Xaa locations
QINXFVVSFNSFLCSLSEYNFLIFLT

SEQ ID NO: 139690 - protein, 41 aa, Heterodera glycines
KQKMGKIIKLIAWLKFNQINISWYHSIALIVLFQNIIFLYF

SEQ ID NO: 139691 - protein, 72 aa, Heterodera glycines
MKNARISLGDSISKFLIQFRTFGASIRSSLSRQLELMDTRNGLYNKKNTVTLGIQFTVEGEDGGEQQAMEAD

SEQ ID NO: 139692 - protein, 42 aa, Heterodera glycines; identical to SEQ ID NO: 128558

SEQ ID NO: 139693 - protein, 374 aa, Heterodera glycines
AQKRSRRRSKYRAFVVKPPPASRSLPIQPLPIQPLLVFVNPKSGGNKGAKALNTLCWLLNPRQVFDVNVMRGPKYGLDMFRKHSSMRILVCGGDGTVGWVLSTLDQLGWPAYPPIALLPLGTGNDLSRAMGWGGTFSSDEPLAEVLAAIQTETSITHLDRWGRTPIGDKRLYEAADAVQNQLPLSVMNNYFSIGADAHVALQFHQSRSANPQMLNSRFKNRIAYGGLGTIDLFKRTWKDLSEYINVECDGVDITAKIREFKFHCILFHNISFYAGGTVPWGAGDGSRPSPCDGKIEVLGFTTATLAALQMGGKGERIAQCSKVRIETSKPIPMQVDGEPCLLGPSLIHLSFHNKGKAIKQLISLLSISPSLYSR

SEQ ID NO: 139694 - protein, 182 aa, Heterodera glycines
MCRRRRQGRSRLTAKQHNVAGRASGCCWPARLRHVQRLGGTAERHRCVQRGGGHFPRVASPGAESDGGRRVHIGGGGGHQQQSGHFHFGRRFPFNECPGGGHRRTRIGVHTGQNEVTSNTTFVPDLKNREKDKSFSLTQTVPGFPIDRAQILIDVRAKAFSLAFSRSLIIYGPESTLIWKLP

SEQ ID NO: 139695 - protein, 64 aa, Heterodera glycines
FRLICSFSFSSSSINCHSFPFQVLAFRPLLFWRTFVRFVVTFRALRFRQIVAASAFAGRLHAAL

SEQ ID NO: 139696 - protein, 770 aa, Heterodera glycines
MNKAFATIVLLVVLLAVEVQNRSIVKRANQQNAYGDEPVVPSGAHQAAPAPAEQNAPTVQQPSPVSPPEQAQAGAQPSPNAAPTATQPQQGEAAAVPYSGGANAGAQPSKPAEAAASAPAAAEQAPAAAPAQSQPAQAAPAPATAEQAPASAAQPAAGGYAAANAGEQKKPAESAPAPSAAEQAQAAAPAPASQPAQSAPAPAEQPAAAPAPAAAEQAPAVAAQPAAGGYGGANAGEQQKPAEAAPAPVEQPAAVPAPAQPAPAQPAPAQAAPAGYGNAAEQPKPAEAAPAPAAAEQAPAAAPAPPQPAESAPAPAAAEQPKPAEAAPTPAAQPAEHPAESAPAQQAAPSPAASSGYGAAAAEQPKPAESAPAPAVAEQAPAPAQSQPAESAPGAAAPSEAPKPAENAPPASNASPTEAGSASAAAAPSGGAAVYGNAQPSAGIPSVSAPTSEGSAAAPPSEANPAQGEQPAPAAQSQAQPAEAAPAPAAAEQPKPAEAAPAPAAQPAQAAQPAAGYGGAEQQKPAEAAPAPAAVEQPKPAEAAPAPAVAEQAPAASPAQSQPAQAAPAPAAAEQAPVAAAQPAAGGYGGANAGEQQKPAEAAPAPAAVEQPKPAEAAPAPAVAEQAPAAAPAQSQPAQAPASVYGGAEQQKPAEAAPAPAAAAAPAPAESAPAQSAPSAAAGYGGAESAPAAAQPAPAGANAAAPAEQPAPANAGGPSGAAPAPEASAQPQPSASAPAEQAKPAESAAAGSPPYAGGAAPKTAPSGYGA

SEQ ID NO: 139697 - protein, 613 aa, Heterodera glycines
AADSAGFACSAGAEAAVGAAEASGAGAAPLGPPAFAGAGCSAGAAAFAPAGAGCAAAGADSAPPPAAAEGAGAGADSAGAGAAAAAGAGAASAGFCCSAPPTEAGAWGDAGAAAGACSATAGAGAASAGFGCSTAAGAGAASAAAGACSATAGAGAASAGFGCSTAAGAGAASAGFCCSAPPPAAGCAAAGCAAGAGAASAGFGCSAAAGAGAASAGWADCAAGAGSGADSAGWDCAGAGACSATAGAGADSAGFGCSAAAAPPELAAGDGAACAGADSAGCSAGCAAGVGAASAGFGCSAAAGAGADSAGGGAGAAAGACSAAAGAGAASAGFGCSAAFPYPAGAAWAGAGCAGAGAGAGTAAGCSTGAGAASAGFCCSPALAPPYPPAAGCAATAGACSAAAGAGAAAGCSAGAGADAGDAGAGAAACACSAADGAGADSAGFFCSSVGCGVSAGAGCAADAGACSAVAGAGAAWAGDCAGAAAGACSAAAGADAAASAGFEGCAPAFAPPLYGTAAASPCCGCVAVGAAFGLGAPACACSGGLTGLGCCTVGAFCSAGAGAACAPEGTGGGGEEGRRQSGLGLALAGTAAGSADVPRGNNGSGGGGGGGE

SEQ ID NO: 139698 - protein, 75 aa, Heterodera glycines
MASQYHRLNQSPVFRTPGLAKLFSQKQEQLHRQQMMMAILNEAPVDTPPLTDDEDYVNVGECIMGYGSAANSYIE

SEQ ID NO: 139699 - protein, 52 aa, Heterodera glycines
MRFRFRRCVLLLLGTVLTALLIILLVTQRHTSTNQQGGHSSNGDEIGTNEGN

SEQ ID NO: 139700 - protein, 68 aa, Heterodera glycines
MLLSPALLIMLYNAFKPRREAGQFQNFVPHFTVESPSTLLDNYVSMSTVAFGQLWNGKWKYQMGCALF

SEQ ID NO: 139701 - protein, 62 aa, Heterodera glycines
LLIMLYNAFKPRREAGQFQNFVPHFTVESPSTLLDNYVSMSTVAFGQLWNGKWKYQMGCALF

SEQ ID NO: 139702 - protein, 289 aa, Heterodera glycines
MENNVNDIEIGKVGEIAEEEEEEEEEKEEEEEEEEEEEEEEEKEEEEEEEKEEEEEEEEEEEEEEEKEEEEEEEEEEEKEEEEEEEKEEEKAKEEKTELPNKNVKKNYSEEKKQKLVKKLLKLKEKLKGKIPQQKIDKAFANKVGRDFATIRKWKREFGLTEKRREYSTKEKGEIVEKFARLKKAFANEKCEEKKTAREIDSKIEKIIGFGIATIYLWKRELALTEKCPRKKYSSEDKMKIVQRYDEMKAETPYLRLKDIAKMLEVPERTLIAMRRELSTEQSPKASSN

SEQ ID NO: 139703 - protein, 34 aa, Heterodera glycines
GWLFFYNIQRQLRTVRLARENHPPFFPWAMSDSD

SEQ ID NO: 139704 - protein, 95 aa, Heterodera glycines
MKIVYCNWKSENFTIVKLSFDLSCIFLYRIFSPAKNSEVKIRKLFEVKMSLMFKNTKENAEKEKVEMEEETDEQKWKKYRNKFLGFLNSPLLPIV

SEQ ID NO: 139705 - protein, 232 aa, Heterodera glycines
MLALAVTSPSMKTTHADIDKPPGCEAVNVSNGQRIGETCGGSGSYATGDCSRSGGTAAAYLLGSGARIRSTGCFIYPHRKDKKWVSSLWSLVKGWNPSLWALVKGWSPNIPFRFIKITTSVLKGGVITADDVRELTRGLTALELDAKVRALKEKNDRMYDQITARLRQQTDAITRLRALKSVRRRRPAVGQTKKKTSVSGTVAAKRQKTVPRNDQEIAGRHRKVIIDDSSEE

SEQ ID NO: 139706 - protein, 305 aa, Heterodera glycines
SALNEEEPQIRLEKSNIVLLGPSGVGKTKTFVTQVLARILDVPIALCDCTSTSMTQAGYVGEDVESVLQKLLQNAQGNVEKAQRGIVFLDEIDKIAATREAISHAYRDVSGEGVQHALLKMVEGTVVNVKTGRKGQQVIRESVPMDTTDILFIASGAFNGLGQQVIRESVPMDTTDILFIASGAFNGLERVVSRRLDKRTVGFGAALLENSITAALLENSITDDDKEQQVIKKRDKLFLQADQGDMIKFGMIPELVGRFPVLVPFVGRFPVLVPFHSFDKQMLIRVLTEPKNSLLAQMKFQFSDN

SEQ ID NO: 139707 - protein, 204 aa, Heterodera glycines
MRQITKCMGGLQNLQDLPTKVALPKRLHIKTMTQYNAEFPFPILFPPVSHQNVLAEWLSKLKVSQFHCAESEKYAHVTFFFNGGREEAFEGEEHVMVPSPRVATYDKKPEMNCEGIADKVVKQIELGKHPFIMCNFAAPDMVGHTVPFACSSTSHSFKSAPPITAEGVPRARALCDVAPTVLYLMGLTKPEEMDGQNLLGTAAN

SEQ ID NO: 139708 - protein, 169 aa, Heterodera glycines
MINNHLVENKCVLIVIDGWGLTEEEHGNAIANANTPVMDQLCSGNWQQLEAHGEHVGLDKERMGNSKCGHLNIGAGRVIDQDIIRINLAVRNGQLIENREVIDAAEQAINGNGRLHLLGLVAYEALVGGVGEQCEPANAVQLVNKRYAIQEETDEFLTPIVFSDEARVK

SEQ ID NO: 139709 - protein, 111 aa, Heterodera glycines
MTFFFTNSESRSRGIASHRVNQMPPEKDKAANIEPTGSDYPDSEDEMAILEWFDKPISEDILNLSKHPPPQNKIHNLQPARENDDDDLDIIAYICKNMNEGWGLGWGLMHY

SEQ ID NO: 139710 - protein, 84 aa, Heterodera glycines
MKLKPNPVKQREHRTRLEKYINSEACADDTAVFDMFPHCADDFAPGIASHRVNQMPPEKDKAANIEPTGSDYPDSEDESYILFI

SEQ ID NO: 139711 - protein, 80 aa, Heterodera glycines
MDGKDVDKDEVNTMKTMQFKRSEQQMPLRNGRDIQLADLGRANKEDLLKKEDASRTDDNLTGSLISKSHFDLKAKQSIGR

SEQ ID NO: 139712 - protein, 100 aa, Heterodera glycines
VNAPIYPIAMKYDSRFGDAFWNSSEQSYFRYLLQMMTSWALICHVWYLPPMTKEPGESAISLANRVKKAIAVRGGLVDLDWDGQLKRYKVPARMVDEQRE

SEQ ID NO: 139713 - protein, 144 aa, Heterodera glycines
MRIGSRAFSALIFFHDSHNKAQSGGICVANHTSPIDVICVANHTSPIDVVILGSDTAYALIGQKHGGVIGLIQRALSRASSHIWFERSEAKDRSLVCNRWVFVLKKCGKVPQIFHFHCNCARDGIYKIYLRNLLAFSIMMILIF

SEQ ID NO: 139714 - protein, 107 aa, Heterodera glycines
MSHRQFLLQNSMPIFIHFLKFISVHYLSPFPPRHYHPRDVHPALGRAGPVPAAGVPIPNVRQFARMARHSGLHVLHKGRAVGLVEYADTDQRQLLPISEVLKNKQIN

SEQ ID NO: 139715 - protein, 56 aa, Heterodera glycines
MSLLLLSATAEHLLVLSAFFFPPALLIVLLVVVLATFGKSLGLRERYVSILIRIFE

SEQ ID NO: 139716 - protein, 78 aa, Heterodera glycines
MILQLAIDTANEWQLNEIMDVIIREIFDQNLEEMFKKAEEKAKKDKPSRAYTINNDKHNIILYSKFDDQNTWFNDALF

SEQ ID NO: 139717 - protein, 113 aa, Heterodera glycines
MIRRGGTMIKRGTTVIKGGTKVIKRGTKMIRRGTTMIRRGTAVIRRGTTLIRRGTTVIRRGATVIRRGTTAIRRGTTVIRRGTKVIRRGATEIRRGTTGIRRGTNLMKRYNSD

SEQ ID NO: 139718 - protein, 282 aa, Heterodera glycines
CEPSSDHCTSSNPCCTSSNLCCTSSNHCCTSSNHFCTSSNHCCTSSSNCTSSNLCCTSSNHCCTSSNLCCTSSTSSNHCCTSSNLCCTSSNHCCTSSSNTSSNPCCTSSNLCCTSSNHFCTSSNHCCTSSNRCCTSSNHCCTSSNHCCTSSNQCCTSFNSLCTSFSLMTSFNHCCTSSNHCCTSSDHFCTSFNHCCTSFNHCCTSSNHCCTSSDHFCTSFNQICTPSNNGTSSDHCCTSSNHCCTSSNHFCTSFNHFCSSFNHCCTSFNHCSTSSNHCCTSS

SEQ ID NO: 139719 - protein, 212 aa, Heterodera glycines
MIKGIIMLSSPADESFFAQLDKYDIPVVVIGKVEGQYAHVYSVDTDNFGDSIALTDALIESGHQNIACLHAPLDVHVSVDRVNGYKQSLAAHNIAVRDEWIVDGGYTHETALKAARQLLSQSPLPEAVFATDSLKLMSIYRAAAEKNIAIPQQLAVVGYSNETLSFILTPAPGGIDVPTQELGQQSCELLFRLISGKPSPQNITVATHMTLK

SEQ ID NO: 139720 - protein, 87 aa, Heterodera glycines
MPKQNEIVLKYSFLDLTWFLDIEAVFYAISKTKKCLVVKTIFHISLHNFVSSARIETGIRPLERAARALQEGMERNSYFWDFFRNQN

SEQ ID NO: 139721 - protein, 279 aa, Heterodera glycines
MMELASLAVPLLKDDGQNKLLLMKLLQKCVSHFLCRANFLDLNEKNNFELEKSKWHELGKIQSAFCKEMEKGEILKVTEEKTKNMAIQFANYFEEMKINEENIRTNVQNANDKFVKYFGKESDKILKNLFDAFKVFVESVNNQKMCRFRHQISIAKHMQSLATELLRSALATVTVSTAGLQQTQRRRKRMHSFDGVQQPRQSQAGRSQVGAVQHQEHRPNWRCNCVLTIAFLSLGTLFYAFFLLIQKASEAHALFFLFAFITFVLSLGTYFKFCSLICQ

SEQ ID NO: 139722 - protein, 94 aa, Heterodera glycines
MRLLISKTGILDVTITRHHKSWHSFLFPTLLNFVEFKICNFKNQREILGIEGVACLINYKYFETRRMEMRKSFQIGHELCKNVTAFKRELFGSL

SEQ ID NO: 139723 - protein, 56 aa, Heterodera glycines
MIRRTNFACTTRRGDFVSREKFNNISVSVILMREDKQFLRDLTFNRKAISIVEHLN

SEQ ID NO: 139724 - protein, 23 aa, Heterodera glycines
MICAKLHLVKWSKGVNQTNKSLQ

SEQ ID NO: 139725 - protein, 37 aa, Heterodera glycines
MDENNHKLISQLIARMGCTVLAILHRTTGLAEFDWII

SEQ ID NO: 139726 - protein, 105 aa, Heterodera glycines
MVQPLAKSDGRNAIEQRLVVDGGRGIIGQAKAKVVPKSAREEERMLGAEAELNSSKRDLMSANELPKTPTNDRAESNPTLSKSITSSTKIFPLSSGTARRRAFRG

SEQ ID NO: 139727 - protein, 159 aa, Heterodera glycines
NAVPNSPIIVEEQQSQAPNSPSIIIVEEEQSHCQQEQQPKQTVDAVAVPAKSAPPDSVVVVVAAVEHQQQQQQPPPPPPLSSSSHCPPPPSVPCTSASPSIATSSIVLTSTSSAAPPAAVEQQQQQPPPPAQQNNNSSNQPGQRRRPGSAAGGLVASFV

SEQ ID NO: 139728 - protein, 22 aa, Heterodera glycines
KSIKNLKMRIHARFSGNKLNRA

SEQ ID NO: 139729 - protein, 42 aa, Heterodera glycines
NCTKLTSFLKKKVKKIYDFSSKISEVGIPTPKMSKIGSLSVP

SEQ ID NO: 139730 - protein, 48 aa, Heterodera glycines
MAAYRMERIYSVIGTILFIVAFICMVWYLIDYDINRGQLIAATVKIKN

SEQ ID NO: 139731 - protein, 104 aa, Heterodera glycines
FSTVVVPLLIIVVPLLPWPSVMPTRTRNPKPDTRNPKFFSTRNPNSKFFECSTRNPNPKFFSTHGITEDGDLGVKMLGAEQAKELLKQPCHPGLKQCCALFCPS

SEQ ID NO: 139732 - protein, 73 aa, Heterodera glycines
MVLEGTWQAESEVTDEGMGWIRSKAYGSRQYKNKFIKRMRRRYGICAHLRRIHIRNYSIPISFLMSKPMAKFG

SEQ ID NO: 139733 - protein, 30 aa, Heterodera glycines
MVKKGTIMVKKGTIMVLKLNKGNRLLKRVL

SEQ ID NO: 139734 - protein, 38 aa, Heterodera glycines
MALCDLTWVCHGMVWHLLVWEEFSSRRGDLKTLSLFFC

SEQ ID NO: 139735 - protein, 106 aa, Heterodera glycines
METGILFFNLLRRGYIIGGRQINGDWHIKRVYTAQQQQNAAVVGAKVCVECGQRIVHQTVPQSQLNANAIGVASVGCTSMNAIAKLVKKVRSAKCAKANKAKNEKE

SEQ ID NO: 139736 - protein, 92 aa, Heterodera glycines
MKKASLLLCMGRVFFFEQWHLFVTAMEMYRMQRVDTVVAYVMSVHPTLYELMRLYERDGLLRVRANMEMPTETVHGTADKFNPNGETEWSNQ

SEQ ID NO: 139737 - protein, 24 aa, Heterodera glycines
ITGVSIIAVLFLVFLMLSQNLVRF

SEQ ID NO: 139738 - protein, 73 aa, Heterodera glycines
MELTSGWYGDRYVGFVYPEEGISKEAEQPVELLAAVVGAGEFVEFETGNMPICDEALFPAAAETNTLNIMQKL

SEQ ID NO: 139739 - protein, 126 aa, Heterodera glycines
MQVKNHFLKFESPIFLIDGSYAIASSNSVNQSLHACLISDVVPSLPSNGSLMFSYWTSPFVVLNVCQKIDQIPLNLTTMCQQTPLVQGPGPANVTIGASTGPFQVAKSVLYHYFFVCFIDKKSNNL

SEQ ID NO: 139740 - protein, 83 aa, Heterodera glycines
MPNLNCVEFDDTCAWHNCQTPAAQLMWFRTSANISSDQMMTTTGTGVMPSWDFAISKIRIFFSFFYWCPTKTKSFDEFSMKIY

SEQ ID NO: 139741 - protein, 133 aa, Heterodera glycines
MSEPIRTALATMVEKLINRMEIVHPIIEAQERTEEGFDKLRQERVLLTGLLERIEVKNKEWDAYIRDIGAEAQNEENERYRLLSHRGRHFYDWVEEGRETIKNQKERKMRMKLGNQLMKLELIFLEEIIGTKE

SEQ ID NO: 139742 - protein, 131 aa, Heterodera glycines
NQQTVQDRASNCADEVLHFMGCELLALRPPELFLFSRQIAFGLHQLLRANAANLHASEHWEMFFILLESVGAAAYRDESTGQKWSRCVSGDMLAIPFSCPHRPFPKTVLRFSNVALSYWHSIYPDTIQPLF

SEQ ID NO: 139743 - protein, 120 aa, Heterodera glycines
FSTISWMSETALCPLVRISNRNLFRASNCADEVLHFMGCELLALRPPELFLFSRQIAFGLHQLLRANAANLHASEHWEMFFILLESVGAAAYRDESTGQKWKVSKVNNQNLSFVDVPMNF

SEQ ID NO: 139744 - protein, 69 aa, Heterodera glycines
FDYSTMREKTPELYEHLAQSALVIFKGDMNYRKLEALCGFCPTTLLALRTLKAETVAGVPLESLRKKKE

SEQ ID NO: 139745 - protein, 75 aa, Heterodera glycines
MSVKFCELGKSTDSGKEEHEMLFTPELDGQMYGLQNLHFQAVEQPEIEQGYSTSQLHSELEHDVKILQANSMGKS

SEQ ID NO: 139746 - protein, 210 aa, Heterodera glycines
MGKVSLGTLRKPEKKHNKVISPYGLPRKEETKKMISSFVRLSVLVFIVVIVMVVDHFYFRLLQIVVTHGKILRGQKGGNSLNIVVNGSGAVAELLRNVLQFNYSKDLDTDLDNLHCLTQPNAPNWTFNAWYLMGPLVLMFLLQVFLGFVVQRFVLFFVLGLMFPRRAKARIIHLYNKMLFGRVNLDKLSAAKKNVNERQMSSNANDGSDD

SEQ ID NO: 139747 - protein, 101 aa, Heterodera glycines
MRNEYKQKGRKYSTKEWKRNYAVIGKKIGVGQGVIGQWKKQFGLSGKRISEKEKMEKMKMYWQMKGENPKMSDEKISKILKINQRTIFKWKKQFEEELNED

SEQ ID NO: 139748 - protein, 111 aa, Heterodera glycines
MKTFKHFQLKQRHRERRDQQLDEFKRELKEEEALALGEVEEEDEQTREERHQRAMLRHRRTEREEAPLEQEDLEEEADEASQLKCHFDPPIYSFRFQKLYSFKPFTFTDLG

SEQ ID NO: 139749 - protein, 93 aa, Heterodera glycines
MLIDEINALHEMMMALEADFEEAEREAKTHPDINGGDLVHNIIFPEPDGMAFDECQNGTAADQTEKAAENGVDQEDEADEADQLKNKLKQNLE

SEQ ID NO: 139750 - protein, 135 aa, Heterodera glycines
GDANCGTAAGGGDGTNSAGQSSSSSSASSPTVGQRTPRKRSDAGMGSAEPAGPLPSIPEEDANSRNSCSGTRERRRATASSTTMTSSAAPSTASSEVAMVDTVGTTTEAASAVEDQAHQLRAVQATQSPPPLAGE

SEQ ID NO: 139751 - protein, 127 aa, Heterodera glycines
MRQINAFRRKRVAQLESKTRKCIFRFRETSNGLQPARNVPASRGGVRLGTPTADSAGRFPLRPPPVPPFPCSFPFPFRSVTFPVRSSASSLSPLFSDIFREFFGDPLSSSDFHRSPFFAFPANGGMK

SEQ ID NO: 139752 - protein, 127 aa, Heterodera glycines; identical to SEQ ID NO: 133730

SEQ ID NO: 139753 - protein, 226 aa, Heterodera glycines
MLFNAEYFFILYFAFLFCSADALGDNPSNGPVILNPSKFVHNHRENEMSERNPLKDQNFGNKSAKPIAADKYSQLVGPSTNVAKEWLERNNPKKVKSPSRKDTIGKIGKSRLQKSSTNDEKMEKEPQLAKAGTFASHRLASSSPSSASAHDMTKANRYGKSAVYSSRVGQPVGLTRNATGIGRTVNLDKKVPSHGFATGGFSSRLMEGMANINARMNMKKNALRPF

SEQ ID NO: 139754 - protein, 367 aa, Heterodera glycines
LNDAIEEEAKTVLDNVKMAFAEVLDQTEWLRNETDKAKAKEKLAKMSNFIGKAPAIGNPKDPEDEFINCIVNQQNWQFDSLREFINCIVNQQNWQFDSLRGNCAFSDAPVANRRLGQPGPILWDGRPEVNGYNIYHWNSMQVTGGMLRPPFIASNQSLAQNFGSVGFIIGHELGHSFDSYGYSVGFIIGHELGHSFDSYGYEYNADGVKDEKWWSKASKNSFVKRKKCFVDQYSAYKVNGLSVNGTHTVFENIADNVGIRASFAALKARLAKAQEQMQIEEEKLSAQEQMQIEEEKLSNEQLFFLSYAYSWCGRTTRERMAKYVKRDPHAPREVRVNLALANFPEFASAFGCASGTPMNPEKRCTLW

SEQ ID NO: 139755 - protein, 156 aa, Heterodera glycines
MPLRQHFKSYAGRADNAISVYDVANRHIDNELFTFLETYEHSKGSDFHRSQIARKMLMFHNKCIDERTRAKQAGLSIEMLIKRLKTMRSDGFSTTDMMIEMFPQIPFLFLQKWIDKHIAVQINFGLFYNVWPLPNWDEDVRALLKDLLKVAFDFAF

SEQ ID NO: 139756 - protein, 160 aa, Heterodera glycines
QQQQAQFGQMSVSDNGTASPPPAGNGSYRAKRSPCCDFGSYPFMEPPSRYGGFRYPFMGPPPRRGGFRRGGRRRGPTGSTASPSSTNSAALADQFIVNNETETTPTPTEGTESSRSTDGTTATNTDGTTAANTDGTTAANTDGTTAANTDGTTATDNGQS

SEQ ID NO: 139757 - protein, 267 aa, Heterodera glycines
MKFAKTMLMIPEAEYLALRSAMNSGDYLQNEKASLDAKISQNLQDPDISEDLKAKRHDWLYKERRTVKGILENRPQKVVIEKHVPGPNVAPYLGLNNQSKPQETEEPRKIIIPRKRLEEQTPDPESDNDTLEELTPEPQTTSTLKTHIPIKTIIHPTLLNGLFRYVKENKDLFKITAAGKVQSNMNLPIENSNYRDVLLYLAGKKDETPRGAKFLKDRLLKDPTVKDMVDKSKVMWGRGRKKAIKSIKTPGIVREKKPFKPLIWARL

SEQ ID NO: 139758 - protein, 139 aa, Heterodera glycines
LFEYPKRTLEKIDFFVFGAVPPNRCAQIYGETESFGNSFPIACTLILRWIFAPHNCLSTPNGHLKNRFFYFINIFSESALKRTKFYLHVSLGTLMLFLSKREMEKNFFKNFSLYFGYIVLLLVGCLEQWNHAHPSDLAS

SEQ ID NO: 139759 - protein, 127 aa, Heterodera glycines
VHEKELLFLNEQTKAEIHIEIINDDEYEKSEEFFVEMGTPEWRDGKGQVGPKEGQPDGRPILGEHSRCKILITEDKEFKNFIDKMVTNANVGFLVGTHSWKQQFAEALTVEDIDGGGHSLGKLKDTD

SEQ ID NO: 139760 - protein, 184 aa, Heterodera glycines
VALEAAKVLDDKTIWVALGEAALLQGNHQIVEMAYQRTKDFERLAFLYLITGNREKLQKMLKIAQIRKDVHGQFQCALMLGDAQERTKVLKELGQLPLAYLSSVTHSLDEDAEQLRAELEQRQIAVPETNTSATPLLPMTPLNPLVDNWPQLTVSTGPFDAQQLLAATAASSGGGTLSTAIGKS

SEQ ID NO: 139761 - protein, 80 aa, Heterodera glycines
MAEEIGTTEIAIEPLVTTTPKTTLTMGAKLKKPLLNKLNKMDPGELRHLVADMQSRLAQVEDTNVDPPCKAQHNAVEERD

SEQ ID NO: 139762 - protein, 339 aa, Heterodera glycines
MSFQTKSYSATIQLTDEQRERVKQNRERALRIQAEKAEQRIKQGPTAAASQLLPHMDGMAISNNKPPPLIGERLVCPRPIQIQPPITTKNSNSPRPSTSSVQKVLVQMDFSLINANRFKVQFTPFNRDVVDKLKSIPSRPFNADDKTWSFLIDDYESTKKALNGLNRTVNLKLAEIPFDRCGVSVGIERDGRILIADEMGLGKSIQALAIANYYRNEWPLLIVCPSSVKYAWMGQFKRFMPNANVYIIEKQSDPLPISRNTSVAIKIANRVILLSGTPALSRPSELFTQVRMIDPKIFPSWVKYAVRYCGGKKGRFGFEAKGRSNPDELKTVMDKIMIR

SEQ ID NO: 139763 - protein, 70 aa, Heterodera glycines
MAPTYYDLNSFPDGSDAKRKLDSLHRALSILSQPMTKYPCQPSYAPANIEHAQNPSARLDELGLPLGSLT

SEQ ID NO: 139764 - protein, 258 aa, Heterodera glycines
RNPLTGRPYTQRFWDLLKKRMGLPVWDYREKFMELLNKNQCITLVGETGSGKTTQIPQWCMDFAREKGALANRKYMVSCTQPRRVAAMSVATRVAEELDVSVAEELDVSLGQEVGYLGQEVGYSIRFEDCVSDRTVLKYCTDGMLLREAMNNPLLEQYNVVLLDEAHERTLATDILMGLIKEIIRQRQEIIRQRQDLKIVVMSATLDAGKFQNYFDSCPLLSVPGRTFPVEIFYTPEPERDYTPEPERDYWEAAVRTV

SEQ ID NO: 139765 - protein, 50 aa, Heterodera glycines
QVQQQQAVISEQDHQLQHFKQHKMMEEVIQDHERRRSVVVMGLPESQKQK

SEQ ID NO: 139766 - protein, 92 aa, Heterodera glycines
MSATKLPGVNTRRDPANTDHEDASSPYPLGFIATLHRIGAGAAADGQPWPERNLSLGRSMQMADADCALGGLRVVAELMLAAERTRQNGTDE

SEQ ID NO: 139767 - protein, 291 aa, Heterodera glycines
MIRRSAPLIRRVNRRGATVIRKGTTVIRRGEIVIRRGTTVIRKCTTVIRRGATVIRKGKAVIRRGATVIRRGTTVIRKGTTVIRRGATVIRRGTTVIRKGTTVIRRGATVIRKGTTVIRRGATVIRKVIRRGATVIRKGTTVIRRGTTVIRKGTTVIRRGTTVIRKGTTVIRRGATVIRKGTTVIRRGTTVIRKGTTVIRRGAKVIRRGTAVIRRGTKVIRRGATVIRPLFRQKKNMKLKINVIFMISGQKIAQKNHFQAIFEEKFCPSENQMGLPFRQEIRNNFSGDNFF

SEQ ID NO: 139768 - protein, 277 aa, Heterodera glycines
FVSYFSSGEKVSDNCCTSSNHFCTSSNHCCTSSNHFCTSSNHCCTFSNHCCTSSNHCCTFSNHCCTSSNHCCTFSNHCCTSSNHCCTFSNHCCTSSNHCCTFSNHCCTSSNHCCTFSNHCCTSSNHSCTSSSRTFSNHCCTSSNHCCTFSNHCCTSSNHCCTFSSCTSSNHCCTSSNHCCTFSNHCCTSSNHCCTSSNHCFTFSNHCCTSSNHCCTFSNHCCTSSNHYFTSSNHCCTFSNHCCTSSIHCCTFSNSCCTSSNQWCTSSNHCSTFSNHC

SEQ ID NO: 139769 - protein, 344 aa, Heterodera glycines
MFCQLLLFGFLLAISIVTVCAAKREINLSIYPPPISNDYNYRIKICCNQNSNSGAAVEVPFSLHQQKLIAEHTLCGTKNSEQNVNEGQFLENGKNGINQSRYQENKGCQMSHPLNNFFLKSTDKQLNGKQTQLGTVAQNKFNFTISMPAKAEENLTQCANNELFIEIVKIFATGFLNQREEKLLKLERMTIEQFKRTDKLEYDFEEEYCKKFEIISHMEKQPFEFTLRISKASGVSSQNFILQQDFVVYKKTLTGGTKIYRINDEMWNNYSSFKIDFNKSDVSPLNTVESTNDNHTIQQRGNSNIQVNKKQISMAKSTVTQNGKAKVIVQGEQQRKKQGTRTVQ

SEQ ID NO: 139770 - protein, 124 aa, Heterodera glycines
  unsure (1)..(124): unsure at all Xaa locations
KFKIFLKIHGFSGSGLAQNSRSNDKFRXKDSICLAINLFLSIKESLTYALLSAGLMLCANVTILAHISHRNFLHMDSDETLLLQWHVVPSTDPLLIGTIFAALILCSVVYLVDVWVVYRQRRWR

SEQ ID NO: 139771 - protein, 92 aa, Heterodera glycines
ESLTYALLSAGLMLCANVTILAHISHRNFLHMDSDETLLLQWHVVPSTDPLLIGTIFAALILCSVVYLVDVWVVYRQRRWRTWVTDKSNYKI

SEQ ID NO: 139772 - protein, 141 aa, Heterodera glycines
MQKTKSDDVLETISSTVQFHSEWYLGSERQFVHDFNTSIRKSIKCKQCRTNLFCCSAAYYDEEFLKSGQWLAKIAEICICLFIILVSLFNNGFYGEVGLSIAVAAASLTISCAFVVIKLRTLNRWATQKQWFIMVVIYSSL

SEQ ID NO: 139773 - protein, 21 aa, Heterodera glycines
FIKVTILVKSVNKRQFQFQFI

SEQ ID NO: 139774 - protein, 199 aa, Heterodera glycines
TPNRVDPRLPLDDNTQTPNRVDPRLPLDDNTQTPNRVDPRLPLDDNTQTPNRVDPRLPLDVNTQTPNRVDPRLPLDDNTQTPNRVDPRLPLDDNTQTPNRVDPRLPLDDNTQTPNRVDPRLPLDDNTQTPNRVDPRLPLDVNTQTPNRVDPRLPLDVNTQTPNRVDPRLPLDDNTQTPNRVDPRLPLDVNTQTPNRVDP

SEQ ID NO: 139775 - protein, 29 aa, Heterodera glycines
WLTKTSSNLALSILIQIAPNFFYSLTRPY

SEQ ID NO: 139776 - protein, 68 aa, Heterodera glycines
MAFVNSLSSNTKTIHFLKKSLLLAHNYCTFSREWSEMEYERHAEDTLVALTEYLDTLPDRVDCESVSI

SEQ ID NO: 139777 - protein, 167 aa, Heterodera glycines
MSSLFDSTWEGHLQHIKFWRSEVALDGIKHLNPLIKVKRSLGESISNVQLVKGADGTMAVVGLATAPGDSAHVQMVMQAELPDISLGDDFEQDETKQRPTLELQPLFSHKTEAEHSTDASPRKIPPELALHYERMRGQMVDGVDDFKLHEKSGAVLFTTAKEISIFK

SEQ ID NO: 139778 - protein, 89 aa, Heterodera glycines
MKSIRTLIEQQQLLKAPKRTRKSSDFDDNSHNYLPNPVCFHAEQKRNKIKKTAMENPRQNPSKMLAEVHADTKDEIFVAMGIDLTLAAE

SEQ ID NO: 139779 - protein, 63 aa, Heterodera glycines
MAKTLLHDSEGTTKKGEERETKRISSNSALFEPLKWRLRDKLAQSLLDGTEQLNMQSQKIEIL

SEQ ID NO: 139780 - protein, 45 aa, Heterodera glycines
QNLCAVCSVLSADVSLLPFGHPLSLAPEHKSPLGKSPLFAPINAL

SEQ ID NO: 139781 - protein, 310 aa, Heterodera glycines
IKRKISERKGTKGSRASSAASSCRSLSPVSSLAATTPPKPAAKTPQITPATKGTQAKKHLAIDSKPGPSNRFSGESVAVVPPPAPKVQQKKPTAQTDQHAEATTSATTASKAFLTRAEPNGNCFFNAICLTLFGSENHADQLRKRMCTFLRTILADQRLFLRQNPNYNTRETFLTRIDRMLLHGTDEGITTLEEYAGRREKNRDWAQVNDSMLLAMLFQRTVVIITPNLSRREIERQNPQWNYANQNLYVYFPDGEMRQSLRNVPVDQLQKFTMVQDVGTHVDRRPVNNAIVLYYNGLNHFDTVTFVMQN

SEQ ID NO: 139782 - protein, 633 aa, Heterodera glycines
MSDKLENLLQKLLTAQADQQTQFTQALNSLVNNNPDKEQASLFSTINSQISEFVYEPENDQTFQTWFERFGEYITTDGKLLTDAMKVRVVVGKLGSQEYSKYVERILPQKTGDLNFNDTIKKLEDIFCGTKSLFVRRYDCFRMAKAPSQAVLDFASHVSAECEKSKMQLTKEEMKAFIFVSGLDEGDRDLRERCLRMMEEARQRNATITFASLIEECRSILSLRSTAAAFSQSSSLGAQTNSISVRPQQITERSSRPASKGQNRTFNHRSPSVQSHRSDQQRKPPPPFPCKWCKQMHWNNECRNRNKCTKCGKFGHNSSTCRSRNYSNDRKFNRGSMTVMSVHDSSEPWIDIHCKINAYPVKLMADSGSKMAVIQTCLWEEIGKPPLNHCTANGTSYSGDEFEISGWFNCQVTYGDITLTLKCFVTPKGVMNLFGLPWIRAFETALQRPIATTLPMPLPTAASHQSMAIPSSTELADLLKQNFPDVFSSELGHCTKMRAHLYLKPGAQPVFCRPRPVPHGARDAVDAELDRLLKIGAIKPVDFSKWAAPIVAVKKKSGDIRVCIDFSTGLNDRLELNRHPLPRPDDIFNLIRGATVFSLIDFKDAYLQIELDYESKQLKLTDQLIAGLPDVHE

SEQ ID NO: 139783 - protein, 568 aa, Heterodera glycines
MIYGRQFTLLTDHKPLISIFGSKGGIPIYTGSRLQRWALILLNYDFKIKYISTKEFGKVDMLSRLIAKQREDDGDDHVIANINQFPISEEEEQLDLCANAVDYIFQANIEQLPVTALEVAEATKQDEVLSEVSQFCRNEWPRKVQSPLIEPYFTHRSKISEIQGCLHFGDRVIIPAKLRQRILTALHFSHPGIVRMKALARQFVYWPRINLDIERWSRNCADCSLAAKMPAKVPLQPWPTSHEVFERLHMDFAGPCADGNKYLIIIDAYSRWPEVIKMHSTTARFVIDQFVWLFSRYGYPKQIVTDNGPPLKSSKIFDFCRKHGIEQVFAPPYHPMLNGRAERFVDTFKRQMAKCSRTDSNWVQNSLLAYRSTPSDILSGKTPAELFLGRKIRTIFSLLKPKQESQHQQPRTDHKTQQMEAQFNKKHNTHERIFKVGDKVLFINYRDNKKFWLFGKIVRGSGVMWRIEAPCLSAIVTRHSNQIRLFNPIPYKETDQIQHSPQRGQAQNPPEQIQVEREITPPRAPKKVRFADEQPHHHEQPAEEEQIQETPNLRRSTRVRKAPDRLDL

SEQ ID NO: 139784 - protein, 280 aa, Heterodera glycines
MDSPKAPEVVPFEDEQLSAEEKQILNDIEVLKTKLEETNKRKSELKKQNEEKEKIKQVDEVILEDDEEEEEEDQTPKMSKKPRLDPVVAKCVVEKVINEKWEGNDLVVMDPRGKGSMEEQNDEESRRKEDLVRIGRRNDHNEAWREFLTTTTSLDREKEERLKAMGKIGLGENGRRMAEKSMRAAEKTIFESPCLQPEGMRRNVINELESQEERERRKRFATRTPPSGQAFANSVWAEKDWKRDDEGEKDEKEEPVFTKIIKIQRKLKEANEELKMLQKR

SEQ ID NO: 139785 - protein, 732 aa, Heterodera glycines
MALWIPERVRLGRADANEGEIFGRPAAHSTSINENYGRLNMQNLSSPHISYGSVLRNRADEARRVERLENQRGQELMDRRANLGEFSLLRGREVQREGDRNGQRPRQIEQRNELADGNFLRREMYDQRGNEHRRVDRLAEERERRNDFYRNHEQHPEIDQMRMGERNFGENFVGFPRMSENLALQMYRMTLATQYASILREIPTIEGTEGRDKIHDFFLTVETLTADWEPEKQVNVLKTRLRGKALKALNIALSKFGPNPPFKILKAEIASTLRETDCREASAFTELTQFGKRTPNEDLMSFGEKIYRLVKCSYTGLNETQLDEIAKKFFVMNINDGDLARFLECQSRPGQTFDELLMLANRIHLADPERVRAKIESKSGRTQQNQPFHNRNWNRTDSNTQFQNRQQNYGNFWGNRRNFPNQNQTQNQSQNWRNNQPIRFTGGNAMPLNANPPEQESERANPRSANTIFLKKGETEKESSSVNVRQLETKKFLIMDQMDTESLLDYDEEQQQNEPVLKMSGKDEEAALKKLGVIEETEKENTPVKSGGTFVEPCIVEAEEKEIIVDDVVLKYPNFEMAQKDANFRFHVYTDASANGLGAVLCQKDISGQMRPVCYASRRCSDAERRYGPTVLECLGIKFATTKFKHYIAWLPTVVVTDHKALPAMFRTKNSVGNARVDRWIMELGAPFQLEVIYSPGKTNYVADALSRAFPNDLHFWIKDASQQIRNFDKNC

SEQ ID NO: 139786 - protein, 93 aa, Heterodera glycines
MTGAVRVSRQERQVSFLGGSQQGFWGKVRVKYGEKNDRNSSLECQKWNNNLRLVRINNLMNVSETWYVYANSVTDQKCVDQVFMVNEFISDKW

SEQ ID NO: 139787 - protein, 73 aa, Heterodera glycines
MPFVAFSGIILNFSVFVMTYFYIETEKHHLQEIIRSLPSDYFVLVGVVGRILDTANYVYTFTSALCWVDVLLR

SEQ ID NO: 139788 - protein, 574 aa, Heterodera glycines
MVLNRGDASTKGMWSHLKSMHLEEYNELQLQEPEKPKNKTRSESHFRKIVIPRMAENLQQKIKDKIGTGYYSITSDGWQLPTKSPSLQSVTIHSVDENFVRSDFVLNVAPIYDAHTGENLADHIEKCLINNGFSMEKLVMMVRDDAKNMIKTCRILEIESFQCVNHFLHLTICDVLKEPKLSDLIEKVREWVKECRTTKGAALFRKKQNEQGQKTTKLIMSVPTRWNSTYAMLSQFRQQKKTILALEFDRMHSEIRTVKRAKVEKISNDLPRIDAVDFDLLRHVCSILDIFDAETRKFSTETSIAASVIPTLKKIRDFLALTPFNSSVQFLANSLANAIDRRVSNLAHNTALQIATILDPRFAYDENIWRKNLWPDIEEELKNFAKSIEGQKNVSVDDEQLDDQNAAFSGLVHHDNVDLSALDEGGSSDESVRYDIWVTPKSPGAGSIPSTLSGEINADLNSKIESQLAHYKAIVRPAIDADVFCWWRDNAPKFPELARLARIFLTTPATSVCSERVFSKAGLLYANSLRNRLSGEMAQNLLIIKANMNKLFLGPSNDIDEDEKDDENNDNEAK

SEQ ID NO: 139789 - protein, 192 aa, Heterodera glycines
MFMISFIIMKLFQNLVLFKFQLFILTREIPKDGLDTARAAESRADHVLLLGSTIILTVECVCELVEISYFSPKKKMHFVTKLLDIFYSLFTQLANWFEIYCLKKIAAVNDDLVKRIRNTMPFVAFSGIILNFSVFVMTYFYIETEKHHLQEIIRSLPSDYFVLVGVVGRILDTANYVYTFTSALCWVDVLLR

SEQ ID NO: 139790 - protein, 194 aa, Heterodera glycines
MTQHVNPDQIYKWVSEHGNFGGKNPLLVSEIVSVIDLFRTMPHFNMLEPKDQAILLSFVAIPLIYLNARFYSSKINSPIVKIIPNSSFSPLYLYYKNPFYAAVTGLSAAGRLTLQHLSEHYANLLMHYLRTNYGNIAGAHRYAELVHLAESVFFNAERHREFFTYLAMVTDQGRFHAAIPPIFTPMILHGTLDE

SEQ ID NO: 139791 - protein, 59 aa, Heterodera glycines
LGPIKLISRKSRMNSHFQIFYRFLNVWIFFWLTKTSSNLALSILIQIAPNFFYSLTRPY

SEQ ID NO: 139792 - protein, 74 aa, Heterodera glycines
IIFIQKIFFWVFGAVPLNRCAQIYGETESFGNSFPIACTLILRWIFAPHNCLSTPNGHLKKSIFLFSGQSPRTD

SEQ ID NO: 139793 - protein, 62 aa, Heterodera glycines
ITKFVGKKWAKDQEKIYTDSAEFVSDTKTLIGKEHPDLVLNTDQSGFELESALIWRQKETNK

SEQ ID NO: 139794 - protein, 242 aa, Heterodera glycines
MQWKPEVRTKVIRRGAKVIRRGTTVIKGGTKVIKGGTKVIRRGTKMIRRGTKVIKGGTKVIKGGTKVIKRGTKMIRRGTNLIRRGTNLIRRGITVIKSGTKVIQRGTSVIKKRTKLIKGGTKVIKRGTKMIKRGTKVIQRGTSVIKKRTKLIKGGTKVIKRGTKMIKRGTKMIRRGTNLIRRVITVIKSGTKVIQRGISVIKKRTKVIRRGAKVLRRGTKVIQKRTKVIQRGTSVIKNTYKE

SEQ ID NO: 139795 - protein, 300 aa, Heterodera glycines
MEVFPCVNISLQDISYRPMNECRLYIPVTAHFPDRAIAAFLDPELRIISLTAQQASCNSYRFHHLQLRSNPNIWLWIDSRTGTARRMPKDYVHELYETTINQTNSNLELHPLIFHAWQLDNESDATRFPHINEFINSEQFKDKLEQHITARTEALGALKGGIEGFTMRWLKGLIDEAITWWIRVACVYSTFLMLRGIVLPCTLAYLLNPIRVTLLSLVGVRPHSTFRPTVSKPLGIEEGMPLHEMPQTPKPPARRAEHRSMSPIKLDMIARTARYQQPRTQSHLDLTEDSPFGRPRRKEF

SEQ ID NO: 139796 - protein, 341 aa, Heterodera glycines
MSGPIQKGIINALKALDNAKSATSLLLHPDPDLSNWENAVNLEAQFDRVVKEIRTIEMQMDSLRDSSNAWIELLARLTGDDKDNGEKEYVKFDKNEKIADRYDAATTKLRDLRDLEATLSAAAKLHRGRADREAKADQLANPQQQPPMPPAMAAPMTMPTFTAPLYQFQPIQLDKFFGQKRKWPEFYESFKSAIGSQSISKAQKLNLLRNLLGGEARELIASFRLEDANYETVLQLLKDTYGAPEEHIRSLHFELANLKPCRSLRETKDFLLQLERLTRELNNAGEDIEGPQVFLMLEKKLTPPFLRSILTKKGEDPANWTTTKFRDVLTEAVRKEVQIQE

SEQ ID NO: 139797 - protein, 181 aa, Heterodera glycines; identical to SEQ ID NO: 124594

SEQ ID NO: 139798 - protein, 28 aa, Heterodera glycines
MAHAKKENLCMRKAVPVPVRSFVLSNSR

SEQ ID NO: 139799 - protein, 35 aa, Heterodera glycines
MTAQNAINFLFHSLDNLMPFLLLAFFICISTKFIF

SEQ ID NO: 139800 - protein, 385 aa, Heterodera glycines
MIFDEFVALAARAEATQKASKLSMLKANNSRRFDSEFQMPRYSPRPMQQHFRQENFPQANNQQQNRPTCYNYGKFGHFARQCSEPQRNQGTQNNNSSATNFVRQNFLVEQQEKPPQQNQNLFVGGISMSPADVEKLFGKDGTENETKNLNKVSIGRIMALKVSVCGLTAKAMLDGGAQISMVSSKFFAKLLTEKRIGTEQLRPSRHNTRVIDINGNAVECIGIVSLPIVRKGKCSNATAIFTNSGTKSEVESKRTSEFCATKSSHRPSFRQKRKKAEKAPKNIVPNVENRIIRNCDEKGHKKFGPKEQLGKKFEVQSGDGENSVKSGRIFRGKNSEVQLGTIEILEGRKEFERKRLKLGRNSQREKIGRNVSLDGNGPRRIMAQI

SEQ ID NO: 139801 - protein, 54 aa, Heterodera glycines
MSRETLPFDRGWVELTASCPDSTSTSADRQPMMRGLRCNGILKGWKITNKNRTE

SEQ ID NO: 139802 - protein, 15 aa, Heterodera glycines
MAKGQRKSSKKKWDK

SEQ ID NO: 139803 - protein, 55 aa, Heterodera glycines
FEYPKRTLEKIDFFVFGAVPPTRCAQIYGETESCRNSFPIACTLFLRWIFAPIIV

SEQ ID NO: 139804 - protein, 66 aa, Heterodera glycines
MDQLISGLLGGGGGGEANSGDNQPQQGGGGSGNQLADMAGELIGGFLGGGGGGSGALGGGAGGGVK

SEQ ID NO: 139805 - protein, 58 aa, Heterodera glycines
FINIFSETALKRTKFYLQVILGTQMLTLSKREMNKNLKIFNCFLNMRKILGLTFFFIS

SEQ ID NO: 139806 - protein, 93 aa, Heterodera glycines
MADPSPVTQKALAAEEAAMAATLLESLLSSSTMVNPINFLRSMPAHQLSTSSSSANGAKSVDNRHQNPLAEDGTTTEESEEKDEEEEEEEEQI

SEQ ID NO: 139807 - protein, 87 aa, Heterodera glycines
MNASMAMPTITTTTTFGLVQPTMAQKHVVWHRTRANVSKAVVQQQQLQTGEIQAVQRRQRHRVPAITTNGHHQQKITTTITIIFSIK

SEQ ID NO: 139808 - protein, 236 aa, Heterodera glycines
MHELRHAQEIRQMYEEKLQRVNKMHTKMCRFTELMNERKRDNERVADATRERLAYDAHWHATLHEWHADQSPPTVGRAQCQAVQQARPAMLRMTYYDYDGTGRRHIGQKVMAQPQQQQQHYADNLRGSAASCSSSSRDCSSAEDNDDDNEHPQQQRDQQVPATQPPPAGGAEAVDAQKRRKSCRHCKTNKRNMQMMMMKLHHQLPATTTAMVPQITAQQQQKVVVGQLQEEARMGS

SEQ ID NO: 139809 - protein, 176 aa, Heterodera glycines
CQLFVRCRPLPNLFHWKAWLLQQLLSRNGPPDAQQQSHGAGAATDRSQEHWDEFNKTAAEMKGKAKVLLHFPSAHWWIKFAGEELLSWTTGGFIQAQVTPDKMVLNFYSGQGSVCLDQTPLVGSLLGKLPFVNHNCKSLYGTTTLCPRDKPKCREEAAAQDKTGWFSGPWWCMKLC

SEQ ID NO: 139810 - protein, 147 aa, Heterodera glycines
MKSGAAKKKLQQKTFKEIFGEKWEEKENEQKKREIVEKFNKIKAKIKQKERKYSAKEWNKIELKIGKKLGTNRNKIYKWIKELGLYKCHNKSKTDVQKIEIVQKFNAMKNEYKQKGRKYSRKEWHQNYAEICKKIGVTQGVIRKWKK

SEQ ID NO: 139811 - protein, 23 aa, Heterodera glycines
KPKLFGLFKKELKIFKNFIHLPF

SEQ ID NO: 139812 - protein, 134 aa, Heterodera glycines
MDEPNFGRGRAEHGQRVVDRADQSHGGRTGQSDGYHEETEQLRTVRARNEQTVWHVKTRQIWHFRTRNANEKVRKADELDRHLKPLIGRMSGRGILRNDRFSLQNAYNSRRKALQKQDDVDEVLELLAPSADVP

SEQ ID NO: 139813 - protein, 163 aa, Heterodera glycines
MKYKTNPIKADYKIGNNVLGVGINGKVVECEHRTDGKKFALKILRDIPKAKREAELHFVASGHANIVNVYDIYEQYKFIKIGRDGKCISDDASGRRAHQTNGRRAKRTFGEAEKTDNGGGRAKRDTAGGDNDGRGGLKMTKRERMPNTAQQRRLIKLPDQTNS

SEQ ID NO: 139814 - protein, 243 aa, Heterodera glycines
FNRIVVKAVCECFHMSKDTGYKVVIHMMPNLVIHMMPNLPNVDIERDIEQPNVDIERDIEQFIELFENPEFRPDGLKIYPTLVIFIELFENPEFRPDGLKIYPTLVIRGTGLYELWSANKYQSYPPQVLVDLVAQILSLVPPWTRVYRVQRDIPMPLVTSGVEYGNLREHAMARMKQLGVKCRDVRTREVGIQEIHEKVRPYQVEIHEKVRPYQVELVRRDYSANGGWETFLSYEDPDQDILI

SEQ ID NO: 139815 - protein, 50 aa, Heterodera glycines
QWKPDGEKTKKLERLIAEMIAVDILPIRCVEKTGFQRVLKFLAPNYEPKY

SEQ ID NO: 139816 - protein, 30 aa, Heterodera glycines
MHVYGTAQFPASFPFYPPNMTFLTDILHPN

SEQ ID NO: 139817 - protein, 57 aa, Heterodera glycines
MTQSSADVEADVVENICVKSYTDKNEDQNGQRIKGIKDLIDEQDNYKMIEFLKYEIE

SEQ ID NO: 139818 - protein, 270 aa, Heterodera glycines
IMLLLFITNSLIMLIFLPLQFAVAQSPVAGAGPNIGPGGGATLFTGGTDNLLYGVNLVPFGPEVGDHKNLVPFGPEVGDHKVHPGFLTAGQTIDLYMYFPYYGLYMYFPYYGGLYNYTTLSVNGYMAFATVLDQGPTINVGPEATDWPRQQDPAMIAPYLCKQQIPQSSNVALRAGIYYRLIMRQSIFGRGTATNIGPDIGTMPESSFFGFRFRKCPAASDNYVRCDSNGDYFLDQMMRWLQEGVAGAAAGVAGAAAKGADAALVVTWYN

SEQ ID NO: 139819 - protein, 108 aa, Heterodera glycines
EGGTLLAPDRAAYLRHFNVNVVGTVATTAAFLPLLRKAAATNSEGQTEEQQAAPVVRVVNIGGALGCIGKVFLKPSECPYQNMAYGMSKAKTKGQIDGRRDNLKKWKK

SEQ ID NO: 139820 - protein, 120 aa, Heterodera glycines
MLLKAMPTKSIPKKAENEKISGESAEERWQMGQTKQMADAKCGGPKDEKGKKRSDKLIRHLFIGGKQCQIGRSDRRIDDDQRGNERTREKSDQSAVEREENEQRSEHQIDLAKAYTYHFS

SEQ ID NO: 139821 - protein, 139 aa, Heterodera glycines
KVEEEQKAEEKVEEEQKAEEKVEEEQKAEEKVEEEQKVEEEQKVEEEQKAEEKAEEKVEEEQKAEEKVEEEQKVEEEQKVEEKVEEEQKAEEKVEEEQKVEEEQKAEEKVEEEQKVEEEQKVEEKQKVEEEQKVEEEQK

SEQ ID NO: 139822 - protein, 57 aa, Heterodera glycines
MPPIPIIPSERTAQPHQQQQHRIVPPPPPGPPPPATHGSQSGGGGGAGGIHHQPSLE

SEQ ID NO: 139823 - protein, 176 aa, Heterodera glycines
EYIFKSIDDAESKGAPILPEVLNKLQINSLPDHELKLKTNCVTKLIRNLNVNMGLCNGTRLQILDIEKNVLRVMILTGDRIGEIDFIPRISLIEDKIPYVLKRHQYPLKLAFCMTINSAQQTFEKIGVDLTRDVFAHGQLYVALSRTRSWERIKIKYSNENNKKAKNIVWLETLII

SEQ ID NO: 139824 - protein, 381 aa, Heterodera glycines
ISSFCNCHILLLPLIIVCDRHDMVQDLVLYLYRSNLMKSIEVFVSKVNPKRLPIVVGALLNVDCSEDQIKQLIQITRGKFDIDELVEEVEKRNRLKLLNSWLELKLLNSWLESRVHEGNQDQATHNALAKIYIDSNNNPERFLRENQFYDSRVIGKYCEKRDPHYALLAYERGRCDSELIAVCNENSLFKNLARYLVVCNENSLFKNLARYLVRRRDSDLWGVVLAESNPHRRQLIDQVVQTTLSETSDPDDITITVRVVQTTLSETSDPDDITITVRAFISADLPNELIELLEKIVLENSAFTENRNQNLLILTAMKADSSRVMEYIQKLDNYDAPDIANIAITDKLYEEAFAIFRKFGVNASAIKVTFENSNSFYIPIC

SEQ ID NO: 139825 - protein, 60 aa, Heterodera glycines
MAWMTPNYVRNNANNRNNNNVPQQQRPAGSFLHLLPFSWCIDFLRLFSTFYAERSFRYIH

SEQ ID NO: 139826 - protein, 133 aa, Heterodera glycines
MEQLERKCQANGFSEKPKELKTLGESLHKVETRIYRLRNALNAYKLRIDNARRFKEIIGELQKQTVLLKFINSTILNNTYQNGTTKERSGKAVVQAVRSTDAEANSPGQGNLNACVEHHGVVSFGRKGSSNEF

SEQ ID NO: 139827 - protein, 64 aa, Heterodera glycines
FGHDGRDGRDYVILSKQTTTEPSLTVPEKYCNGHNNDNNGTLTPPTAAETSREAKKGKKGCRKK

SEQ ID NO: 139828 - protein, 39 aa, Heterodera glycines
MVLSMTVVNLFILMAVVIYLLLFLAIRNVSTALIMTTSV

SEQ ID NO: 139829 - protein, 73 aa, Heterodera glycines
MKSLLFFTIFFLFLLFVIATPPASKEPRNVEEMEQINNEIKEEGMKPRSSKNPGLPRPGHGFLNWVLKVTKDN

SEQ ID NO: 139830 - protein, 30 aa, Heterodera glycines
MTRQSTNSKCGKTKLIFYAFSVNFIVTLDS

SEQ ID NO: 139831 - protein, 71 aa, Heterodera glycines
MFTFYCSVHIDSVPTIQCRRFSADDSVTTIQLILLGILSLGPRVGKFSSLNVSSTLFAANPAPILDPEPGI

SEQ ID NO: 139832 - protein, 37 aa, Heterodera glycines
YKKGHYFVKRPALDYFLDMVGYPNFELVIYTSETMMQ

SEQ ID NO: 139833 - protein, 27 aa, Heterodera glycines
MESLIINKKPSERQSTMTELKGHCRRK

SEQ ID NO: 139834 - protein, 163 aa, Heterodera glycines
KFERSSESIDKRAKKSGDSFLDTLLDMEGNDTLEPEELREQVDTFMFAGHDTTSHALIWTLWCIACHPQYQRLIHAEIDATRNECQGNCGGNFVASDVNELRYMDRCIRESLRMFPAVPVVERQLQNDLAVNGKVWPRGALAVVAPILIHNEQVKHSIQNEST

SEQ ID NO: 139835 - protein, 75 aa, Heterodera glycines
VNFVNEKEFDVEELTKFNEKAQELKSKNGRSNDKPKVIGNEKTVPKTDNGGQKRGQNGKRWAEKSWHWGINSEED

SEQ ID NO: 139836 - protein, 171 aa, Heterodera glycines
MALSALLLLLPLLLNVQNIPDESVQSDVKAVDSAISSLEQWKDPRNSLASLDSQLTEPQRALAKMFWELETIEKEKPKAPPQFDLGLFLEALEAMVEMNEEAKEVKLRKDKLTEWAGGEKANEGKEGKTKEEETVPEVRVNENGKVEVTNGAGGDGKMEVKRGKDENGNEQ

SEQ ID NO: 139837 - protein, 101 aa, Heterodera glycines
SSNLICDRSGVQKISFQTGKELAQRYTNINRQYEPMYLAPPESEKGKGVHGCFPRVEDTFRKIVAKCYGDILIVSHQGPVAALQRMLTGSMEFGGSATVSK

SEQ ID NO: 139838 - protein, 231 aa, Heterodera glycines
MPSPIRLFTLFSLFLFLLLLLPFLSFAALSPREKRQFSFTDGFSSGTILQPGGGGLLVTSPEGEETTTPVSGCVPGPPGPPGPPGPAGQKGPQGKCGDNASKRKREAAAVPKEFMTNLEPNVPVKRAKEGEAVAKTHFARGHVKGGCPPGPPGEPGTPGPPGPPGDPAPCPKHMKSEAQSVDGKQLANRNKRGETVLNAAKEGTEVKRQIVRHGFVFGQIAVGETVPKVQN

SEQ ID NO: 139839 - protein, 196 aa, Heterodera glycines
LLFYISTLVFWSLHSQGPGSPSSPASPGGPAGPGGPMGAGSPGGPGGPGVPGSPGGPGGPHFPWGPFCPAGPGGPGGPGGPGTPGGPMSSVPPPPPVEGGVSDVSSVGHSHAHRRRAFWRKMFTLEKQPTPIFFFFEKTGDSQKKGKAIESGLINNNPLGLSILSFLSSFRRRIVFCCFVATSESDINEMDKEQKQ

SEQ ID NO: 139840 - protein, 64 aa, Heterodera glycines
MPTNDGRREPSENNGGMRERTDDTARPIQRGHFAKRTVHRLDNRTKGMPKWEWNYILKIIQNKN

SEQ ID NO: 139841 - protein, 78 aa, Heterodera glycines
MGHHNSATFLFGLLLGYFLPELAAQLSKDEQDYCVKFSNNLRSNVATGNQQNKGGGKLPSATNMLELAYNETIGQTAQ

SEQ ID NO: 139842 - protein, 66 aa, Heterodera glycines
MAKKVPKNVRLLLTCRSVKGVAHAIVGCIHGQSQAVATSVHHRPAKNQYENIHDQDGPGMESIAII

SEQ ID NO: 139843 - protein, 18 aa, Heterodera glycines
YREATPEGFGLPINLGAS

SEQ ID NO: 139844 - protein, 56 aa, Heterodera glycines
MSNSDIKKTIDIWIGEAEKSDLQQREIWVFIGVEEKFVIEGNFEIVGGLAELRTIY

SEQ ID NO: 139845 - protein, 48 aa, Heterodera glycines
KHDIIEIALLIYIPILISQIWHQRIFFPFQQPTAPVNAVPQQQQQAAQ

SEQ ID NO: 139846 - protein, 105 aa, Heterodera glycines
VLPAANEGGTSGGSEQQQAEAAQQKPGQSSSENSAPSAADGPRVSAGNDVGGSSASDEQNRAGPIAAQPQKQGPSNASSAPPAEAQSLGQQEQQPHVEKVEGKKY

SEQ ID NO: 139847 - protein, 18 aa, Heterodera glycines
YREAILEGFGLPINLGAS

SEQ ID NO: 139848 - protein, 87 aa, Heterodera glycines; identical to SEQ ID NO: 129852

SEQ ID NO: 139849 - protein, 132 aa, Heterodera glycines
MAAQQQKANSAFKKKLKDNLRKKMDEKIKRDFEKGWFYNVKLSSEVTEREKLRNWWANGATIIEFVHHSGKKLTNFDHFGLPIGACRVQPFGQGMERRRPNAIGLDISEPIGDINDQSDSGRPLALKFPFLI

SEQ ID NO: 139850 - protein, 54 aa, Heterodera glycines
TEKVGSDQLAIQVFGGKKVKLQSGRYKVKLKRLDGEWESIELSEVPTICTPIRT

SEQ ID NO: 139851 - protein, 867 aa, Heterodera glycines
MERHDDDQFNENANQGDPPPSDQQDERRAIGAQPAKPKTILEAHGLGTSQPGVTPAVTKNLRSGLIAVRSARDQIERAAGTLAARIVDARELMDDDYTRGEALEHAARMMAMERGFGEVKRIFEGHFEKGIAEAGAAPDERQDFFYDSIAAPLPAATKYLRLREHPTPAELLQIAAEHLGDLRAMRQTFEDEERESISRSSRSVETENNQAEEELPRAMPRRSMQEWETSFREAYVRQHDELFGQQQPLVNQAERVATPVMSNMAALIQRRSNAPSVASVRVNNPVREWMARNQGVGNGPPAQAQQPTQAQRPLQAVQQRLEQLTLNDPRANFPRAAPHFHVRREEPPTRDRTRAQGVFPSRPHRPDESAGMLTTFEAVRLQPPTFSGRPEDWTTFWAYFQRAVDDKQIPGFEKQLHLLRCLKEGSPARRAVEVYPPSDGNYPVVVQLLKERFGDTNDLQRAIRAQLLHLQPAKDNVSSLTAVIDEFERGVCQLEQLGANVDDESFGPLLEAKLPVHILTELRIRESTMGANWTVREFRKAVGVQVKCMRAAESALAAMKGPERRHEQRSEPERGGRNARTGQGFQRAFMIRDQPPEKRTSNEATTRTEVAMPPIRPTNPNRVPLGSYSRPMGAHSQAQDGQGGQPRQGCSLCGQTGHQPSRCGKYGSAQAKRRRLIEQRRCLKCLGSDHTAQQCTRKTACRTCEQMDHHWLICWKGERRNEPPSHSRTEDAQQNRTMIIREIEAKHLRTPPPTESSKDGMGAKGEDPPLLDGEQRAFTTVGQQLPAYLMVCPVVVASEDGMTECNTNLLLDPASHGDYGDAALIKQLGTEKVGSDQLAIQVFGGKKVKLQSGRYKVKLKRLDGEWE

SEQ ID NO: 139852 - protein, 1379 aa, Heterodera glycines
MPSVKAIDQFWSVEAIGIRDDPTQDADTEAIIQFERSVRQHDDGRYSIRLPWREEHPELPSNYAVAYRRLIGLLQRLQRTPGVLEQYQGVIEEQLRAGVIEEATVGTGSTEYFIPHQAVITPKKLRVVYDASAHAKGVPSLNDCPLRGPVWLPDLAGMLIRFRACQVPVLADVEKAFLMVGIEEADREVCKFLWARDPLGPLTTANLVPYRFRRLAFGLTPSPFCLAAVVRHHLRKYNSEFAEQLIRDTYVDNVLIPADTIEEATAKAREAKRMFTDAKMNLREFLTNDRGLNDSFSEADALGKTTAKVLGLEWDSVDDSIQISFPGVTPEGECRQTRRTVLKTIARLFDPLGLLAPATLPAKQYFQRLWDTTHNWDTPLEPDDARDWNRVLASWEGGLITIPRAVRAGGVQPGQLHVFTDASETAYAAVAYLRSEGADGRFHSRLLMAKSRLKPKKAAATYTIPRMELMGLVLGTRLAAFVKAQLHRPISEEHTWSDSMIALQWVKNRAPQPQFVANRLAEIRRATATTFHHVPTGFNPADSATRGLSPAQLQNYDLWWKGPKWLTSPWATWPKELDFQVDSAEDEAILPDEATTTALVTRREHSPEQPKEWSEELLNRCSRWVKALRVMAWARRFANNARRKAEDMHGTMGGSDPSRRKAAIRGQIVALPTHDEETDAKWAIVRATQRNCQPRDGMRTELDENGVQRLISRIGWCEEAELSRPVILPKRSRAGALIIDDIHVRLHHMGTDGTLSEFLRSWWCPSARQQVRQVLGQCKRCRRLRGMPYPLPTMPQLPMDRVRRRLPFESVGLDYLGPTVTLDDKGQRRKTWVLLITCLTTRAIYVDATRDLSANSFISALRRFIARRGAPSRILSDNAPTFTVVGKTLAEFGMPGDNPIDFADSRGIKWRFTPQHTPWAGGIFERAVQLVKRALQKTLGSTVLDYDGLVTLLAEIEATVNSRPITYVNGNSGEPLPLRPIDLIQENGRLWVDPPHPSAQRGDEPRDPTHKQLAKHWRDSQQRLEHFWRRWHREYLMTLRERAGWHHPQRRVNAPGAPEVGDVVLVEDKFHPRNLWAMGRIEELRGSDGHTRSVLIRMANGRIWGRPVSKICPLERSPEMGEAQDQPDEAVQEEELGAVAGTEAEGQPGEDNNAPRGLSGSEGEKTVEAEEVAQDEAEEGPIPPSFVQNEVGSTSPVSQTNDRSLLETMNRETEAEKADSPEGANSMRGIEPRRSLRVRRIREVWSPDRYAPKRRGIGGPLVSLAMLIMLVYPTVTFGCQPTIRSEIVGKQSLELPTTMLPCHMRCTERGVKVLSKQRLEKMEICCPDGCWAIVPTSTEISYELPSSESRMRSDQLLLLLGAAGQPDMQPATFKDKFFL

SEQ ID NO: 139853 - protein, 83 aa, Heterodera glycines
RHCDLRGADSDHDGSYSRFVGIRDPPHVGRTSGIKCHRSKQSTSFGRLKRSEFATTQHKTPTRRRSSNSNDQCGNTTTDGTAF

SEQ ID NO: 139854 - protein, 62 aa, Heterodera glycines
MAAAEQSQQNEMGEVQQKTAENAAAAAAEAFDGGCGGRGRGGNVQKHALAQHTAPIWPQSRL

SEQ ID NO: 139855 - protein, 95 aa, Heterodera glycines; identical to SEQ ID NO: 130684

SEQ ID NO: 139856 - protein, 16 aa, Heterodera glycines
EAIPEGFGLPINLGAS

SEQ ID NO: 139857 - protein, 70 aa, Heterodera glycines
MAPPGDENDGKSNAQNDNAAFDDNDDAMLRRDCEGQIASSLLSNWHSDAVTEDQIRPIVARISAIPLCVF

SEQ ID NO: 139858 - protein, 72 aa, Heterodera glycines
MLCMLGFLVMRSICSKRNSFVKSYPATTLPMIIGVNTAVTAPIMSPTLIRSRSFRDLAFSVMFSAEFVTRSI

SEQ ID NO: 139859 - protein, 73 aa, Heterodera glycines
MKSISQISQMIIAMCFLLLLLSPPNAIGQNLCQWDSGKCVDRGCPYGCPYDTEPECGCTSPKPDSVPKIRSKP

SEQ ID NO: 139860 - protein, 64 aa, Heterodera glycines
GRSKPISLEAENETNQQKKGLKQGRRMMFALILTYYIEKTAILINFTSTFETFSPLFREFFAPI

SEQ ID NO: 139861 - protein, 84 aa, Heterodera glycines
MPIVDGNDAVDIQLIRAKRFFQNERSWNMEQILEAILCVFIPPAAVLIHGGHDMLLHMVINIVLWICGWIPGMIHAFWYCFYRD

SEQ ID NO: 139862 - protein, 96 aa, Heterodera glycines
MRILPPYFSDHFMLFIHQPQNTTTNRQHIFHIWITKKKPDDDFDQPHQFFNCFFLQFLNLFKQFACFFAPPSSPPPPTHLFGLYAFIEIFLISFNE

SEQ ID NO: 139863 - protein, 48 aa, Heterodera glycines
MIYNLLFCCMITACFINVGTCIYDINIGERPKGYTGPGVRPGRPDSVN

SEQ ID NO: 139864 - protein, 39 aa, Heterodera glycines
MNVPVCFVANLYNQQQQQPFTVQEENIREHLIGNPRQLE

SEQ ID NO: 139865 - protein, 47 aa, Heterodera glycines
HFLSFLSNAITNHSSNLSLLLSNWVISHYSQMGGFVGVPLIVYVLSV

SEQ ID NO: 139866 - protein, 33 aa, Heterodera glycines
LTKVVAKVPEKGQLLVGDDKVEPVLLAQGTQLL

SEQ ID NO: 139867 - protein, 211 aa, Heterodera glycines
SVSLLTIVAIFCLLCKCCISAPHPCCPGSQKVVSLMAPCCPGSQKVVSLMANYVGTFAHSFSKSSLCSDAKSVAGALKGQLIGCSKGGDATLLADIEASLANHSSDECAHSLGFVRAMFTIAASASSHASNNSEWQALSAKFGQQISEIDSKCAEFGISIAKVSFEGPKGDHSQRNVPGTNNVIAMDHSQRNVPGTNNVIAMPGLTGSHKQ

SEQ ID NO: 139868 - protein, 230 aa, Heterodera glycines
FQQKQLRSAQACAWAAKATEQVVMTQRWPGIRASRTWEEPSRRWTQLRGQCTGTHTSTPDFPVRTLPQAKGLRALMSRVFSNASTLVPRQGVPIHELIGLVNHGNTPLTRIPTPPPTLGSASPVLSSPQHLCLRQHLHKSINSPNFFNTQTSCMFYSFRQLPIAGETEATTKVAPQQQPSPFNAEHKRKQALKPRRPRSPQRNRFFFPATISQKRPNHHTHPRQLTNAKH

SEQ ID NO: 139869 - protein, 132 aa, Heterodera glycines
MSDVDKLSDRMKRLLCTGVDADVHFLVGQDDKKEAKGNEDPIEIPDVDIEAFKTMLSFIYTDDLNGVNGDNAIEVLYAAKKYNLPSLIKACVGVPIAKLDNVFIAFAKARLLAEKVQNKEISLKLIYFSLIS

SEQ ID NO: 139870 - protein, 328 aa, Heterodera glycines
PTAGDKATCLLKFADLPSMLYSQNTGTNQCLELWQKWRLSAGSNLTQSYAELIEFSNKGAKLNGYSDAGAMWRSVYELPAQFGFYSASQIDISRQMDLLYSQLAPLYQQLHSYFRARLAAVYAQKANEDSEKGGQQLSRDGPLPIHLLKSLSGDSWTVHYEQTKPFPEEMPAEEQKIANEMVDSFRAQNYTVRTMFSKVYRFMKFVGFERLPRTFWTSSIFTRNWSKDMICNPATAYNMVKNHGICSNSPDTVLDERTAGRLPGESVCPIDLSAALAGAFGIVALHPDYLRAQKLVSVKTERNAEAEVNRLYREALEDIVKLPFAIVA

SEQ ID NO: 139871 - protein, 90 aa, Heterodera glycines
MYKMMSSPRFSRNAAGMKRQIGPGHRRLPTTSSSRAASIHSSNCSLMFRQSKFWTPPAKRNSRRCATNTFGRALENGIMKALLDLDYSLD

SEQ ID NO: 139872 - protein, 128 aa, Heterodera glycines
MINSASTILIVFNITFQFLFTCSNANPSGDDKILIAIMKGYPKIKISEYSKHKYEAHLGILYFIKTNWQCDKIEAEFEEHERTECQKYRKYLDILYEYLCREYFGTPTIKPKFVFKGRIEIEGPIIDA

SEQ ID NO: 139873 - protein, 92 aa, Heterodera glycines
MIGRAVRNRHFIFEGIFIFILYPRKMAISFFEKFYTSQKRLGMSRRAVHNHHFISQRIFIFRGYPRKMDIFFFDKFYTHTNALEHDREGGAQ

SEQ ID NO: 139874 - protein, 85 aa, Heterodera glycines
MIGRAVRNRPFIFEGIFKFILYPRKMAISFFEKFYTSQKRLRMRRRAVHNRHFISQRIFIFRGYPRKMAISFFDKFYTHTNAQRA

SEQ ID NO: 139875 - protein, 114 aa, Heterodera glycines
MLTKRILVTFSGQKSPVPKCPVISGRKFFSSDAFNVDRNCTRHGGELVANVLKVIECIKLGLVTTFVMKINSFISVKKYFFNIFKYFNFILRIHLCPDGTKILCMIFSGWLLFS

SEQ ID NO: 139876 - protein, 121 aa, Heterodera glycines
MRNVPRNTRGEICELRFLPLEDTQRPDLLMEVLIQHLLDRVLDGHPPPSLVGLQLHPPGFDRPYVIRLRPPEQNNAAALAAAIERLNEQSAAGIDLLAGTTVAKVLAVWPLEQIRADPQRG

SEQ ID NO: 139877 - protein, 42 aa, Heterodera glycines
MTSSEREQETAFGENPQIGTGEDSANALGNGQNRHIQFVWTG

SEQ ID NO: 139878 - protein, 170 aa, Heterodera glycines
MRNFGLSSDQRPLIWSRTDRRFSHNSLDPNEDPVSGIERVSSTSTLFSRRRREERLREQEEVRRRQFSGSRKLSDGASEHTLSEKYESLDYELIENELYRAAEKDKGHQEGPMIHSGAVVAAGISQGRCLSLPVDFGLFKYFRNDREKRDFVSAGAAAGVSAAFASPIGG

SEQ ID NO: 139879 - protein, 110 aa, Heterodera glycines
MQNFLSQKGFDLRKLKTEAPTAKLLKDIPLADALRPSASDLLYNEKWRHISPIHMKEIDASDSVITDEGFAYFLECRNIEKLRLNFCDYFADEAIARLAQGRQSKTLKGI

SEQ ID NO: 139880 - protein, 337 aa, Heterodera glycines
PLFISLMTLPPSLFAFDMPTLDPAIPTQSPHLAPSSDSCVGQCALIFTDQMRSQLGSEHSTGLLNLNYNEFLAAFSNSSFFDSFCNIYHQFNFCIYHQFNFCYTKCPQGFMQELLSRSAEIVDHFCVWNYKEIKTKFGCLVALDREMSKKCLHSCAGVTSLMQNFKHLAMNSDPTEAEKYLGESCEYVGCTLHCDVPAIDSLCGTDTAELVVNLTKKSFDSLQRMALDVVNLTKKSFDSLQRMALDTGAIGKWPTLCDDIRTYVVPKKHEKPSQNDKNESSINGALQTDGVANLHLVIGILIRHNNILVVRVTVWLIRHNNILVVRVTVWLLVPMLI

SEQ ID NO: 139881 - protein, 48 aa, Heterodera glycines
RISQFFHKESCGQCTPCREGTGWMHRVLERIVAGKATMEDLHQLKAVA

SEQ ID NO: 139882 - protein, 70 aa, Heterodera glycines
MLRGEADCAVHSLKDVPMELDAPFALPAMLTRHDPADGFVSNLYASLEALPIGARVGTSSLRRQAQLRAL

SEQ ID NO: 139883 - protein, 67 aa, Heterodera glycines
MLALFASIFECIFLLFSTFGALASVMRPKMKGFLLLALLPLVTFLPETMAKSIQAAEMSEMNDELSD

SEQ ID NO: 139884 - protein, 49 aa, Heterodera glycines
MFASGSTDNIKLWKFPNGDFVQNLSGHNTMINSLVVNENGVLISGVLTA

SEQ ID NO: 139885 - protein, 234 aa, Heterodera glycines
MANHSSEHNRVTDEAGSTATDHQPLTAKDKALHNYVFRSMKRAHDMFLHDYEKFPENDEKAERIWRNTKIRSDFRHVMNAVEEAKKRKAAEVLRLPKSNREAIAAVVSNENAPLAITAGDGADFTGNLMVATVPSKPQQDNANLRALLPSRANLITKPKWHAPWKLYRSFIGCLPLKSKVLYRFRVISGHTGWVRAVDVEPNNEWFASGGADRIIKAYLGLGKQTFEIVVDRTH

SEQ ID NO: 139886 - protein, 96 aa, Heterodera glycines
MVISQIAKTLWSHKKKSIFAVIATAYGANALRARLRDDRIRYSFAERARKYGLVSFGPAQRLRRVTVLVNRESGGRRAADLFKRNALPLLNLAGLQ

SEQ ID NO: 139887 - protein, 28 aa, Heterodera glycines
MCSGCSTSTFRNQRQNRAEKCIGLLKLL

SEQ ID NO: 139888 - protein, 145 aa, Heterodera glycines
MPAADSPPTFTFSFTELVPMESSTAHQRKTPGESGRDNGGHSTRGKQFHALFAEVHIPVEEDEAKLVAELQEKNSNRLLAAMNSLNEETDGIGNEEECEESDEEKEGKYEGSERREATASQSPAENPKGEEKERVEGNEEENEEE

SEQ ID NO: 139889 - protein, 106 aa, Heterodera glycines
MSLLIKSKTNASLFLFLLVLFVVQAFRFVSADLLCRNCGHSVTTASALKNVVSPKAFEHWNMTVLGVETVVQVFKNSVPEKFNLITVNGADLKFAGKSYVEDTWYL

SEQ ID NO: 139890 - protein, 85 aa, Heterodera glycines
MALNESEGTVVNGKLSAKELFTRCVNEIIAQLIVAQKEGRDVNLNKLKCEIASKYGIKTQPKLVDIIGAVPPQFKAIIEELRDAN

SEQ ID NO: 139891 - protein, 88 aa, Heterodera glycines
  unsure (1)..(88): unsure at all Xaa locations
CETECAIFGINASSEFRAGDSEHWSALFPGKLDYFFLPIGLRLINCMAISLLICTLLQTXLLRLRSGIFKDDEEEGKKIIFIPKNGLL

SEQ ID NO: 139892 - protein, 34 aa, Heterodera glycines
WPFGGLKQLWGAKIQRKIKGQAIGKLFPKDSVSP

SEQ ID NO: 139893 - protein, 114 aa, Heterodera glycines
FVAEGKNFEAIAASLGGKWSADDVANFYSLNQLELRLDYLISLYERAKADERNVPALRANTARNNGQQQKKVPAANGGKKNNNNGVPPVVKQQIVVIRQAEQRGETVAKREDGG

SEQ ID NO: 139894 - protein, 55 aa, Heterodera glycines
SQLPPASIRPFGRPPFTPGRSELRQIELRRFIQQIEAEESLKTKRNERTSHRPSV

SEQ ID NO: 139895 - protein, 20 aa, Heterodera glycines
MIIRISNMLWPLIFGAFNFK

SEQ ID NO: 139896 - protein, 132 aa, Heterodera glycines
MADVLEAFSPPCSLGTFLQDMTIYAGCPSLHMSLMVFLLRNQLLVQLHTFFFLLPLPSNDANDNCKANQQQQQHNHSQRERGRRDSGASNDDAKEGEEGGEEDGTETAAEQPQQQWVGPPPPPAAELGLSPE

SEQ ID NO: 139897 - protein, 50 aa, Heterodera glycines
MHSDVIMEWKVRKEFVEVVANAMRNYAAISQAMDSEEISTYFKIWIFPWK

SEQ ID NO: 139898 - protein, 18 aa, Heterodera glycines
YREATPEGFGLPINMGAS

SEQ ID NO: 139899 - protein, 143 aa, Heterodera glycines
MVSTRNKTGKFMKLSNSGTEANRKRKEWRQERARKGGSTPKTLKQTEAEATADGEGTSTQAAESGPSTSALDLRPRSSPRPLSATPIRRHVGVRPKTTDKATNMDLTTTDNATNTDLTTMDKATDVNLADDDAATLTEQLDRQ

SEQ ID NO: 139900 - protein, 19 aa, Heterodera glycines
DCWGRGFESHRASYLLCST

SEQ ID NO: 139901 - protein, 94 aa, Heterodera glycines
ISALAGVVPYPVTDDSSLLLLDPALATACPLINIIDSPKLLEGTDNEKTENLEAELIAMEESLKELDNNQLKMETMGEEKKTEKAPVEEGKNSP

SEQ ID NO: 139902 - protein, 99 aa, Heterodera glycines
MNFVNDRVEGDLYRTNNSVEAWHRNLNALFRSPSPRLSIFLRKVRQEESHWRQQVKDFANNPANGIRGKGMKRKQTYVDQDMNLNELYVTRNNRHPLQY

SEQ ID NO: 139903 - protein, 55 aa, Heterodera glycines
MHYIPGGAAAKPFTTHHNALDLDLYLRVAPELYLKRLTVGGLERVYEINRNFRNE

SEQ ID NO: 139904 - protein, 27 aa, Heterodera glycines
IDLRFKKTRAMRRELNKHELSLKTHKQ

SEQ ID NO: 139905 - protein, 140 aa, Heterodera glycines
PLSHWNGLTLLAVDGTLWRTPDTPENDAAFGRTANEHARSDWPQLRMVCQMEVTSHLLTGVSFGSVSETSEVDLAAQLAEQTPEHSLTILDKGFYALGLLHHWSASGAEKHWILPLRKDAQYRVRVKGGAGQELVELKLS

SEQ ID NO: 139906 - protein, 176 aa, Heterodera glycines
NVKLINSNKCVNTDNLFAEKRNPGTGGLKCYDEIKHQSYDCSCHGDKKCLAEEKWAHDAFLCPIIKVNSIQIKGSRQRVFTNPKDFRYNWTRIEVDCYKADAGTVSFWGYSNPETKEIIRVDEVHCLTYETARVPKRFKSLQVEEQPPMKKLSPSPFLANNASSLIHVFVPFVGHP

SEQ ID NO: 139907 - protein, 89 aa, Heterodera glycines
MKKIYLYANLTKSSQNIRDRYFEKSLDLDLDSMLDLDFLDKNPGKSRSRKNPGSSRPGSRPGPGFFEIFLKSKQMPEKINYLLEASKNI

SEQ ID NO: 139908 - protein, 62 aa, Heterodera glycines
MIIFSMFLKNKLCQILIGKIYKSMCLALVLFKINYFYGIILANLTHLRSELLAMDLYNINKY

SEQ ID NO: 139909 - protein, 87 aa, Heterodera glycines
EVIEVEDAKVEQYKNKSLSGAKLRDFVGFWVLGLDMIPWDAQRMRLFVIRHCNCSLEAWFLRPSDSEPTDPKEASMGTGRFEDRYGI

SEQ ID NO: 139910 - protein, 178 aa, Heterodera glycines
IAGHEATDIVESVGPGVHGFCPGVHVIPAPIPQCRSCEHCYAPESNLCKLFQFGPEAQTMLDGTTRFKCRGQDVYHFIGTSTFSEYTVVLESCICKINPKAPLINPKAPLDIVVALGCGFTTGYGNPFNVAPVVPGSTVGIWGIGAIGLGVMLGCKERGAKNIIAVDPEPKKLQIGEK

SEQ ID NO: 139911 - protein, 56 aa, Heterodera glycines
MGVEKFILKKTLYKIIPLGENSIKITFTVRKMGFDKFIGGKKTLQNNTPGRREWET

SEQ ID NO: 139912 - protein, 21 aa, Heterodera glycines
MPGPGPGFHVGPGPGFPGQKS

SEQ ID NO: 139913 - protein, 30 aa, Heterodera glycines
MEFVLEWQNLENEHSKKNFKKTDHLINMQK

SEQ ID NO: 139914 - protein, 164 aa, Heterodera glycines
MSILPAAVFLFSKHHHHITHSRSIVLLHHSFIHRLSSVTRRIMRKFAYFKLCQAVLTSVFLWQILSTHQFCGEFDEPTAFFNSAVSSSSAGGHCDHQFTLIGMDSTTGEYGAVPDKQKWHMQLMASSGGGQGQPIDEQQQQQKNQMEEFSSKLPTVGRHCIPIA

SEQ ID NO: 139915 - protein, 145 aa, Heterodera glycines
MRMRTALVNEEEKLKLLPLESQTNRIDGVWNLSSDQYNVSIPFLQLRSCRIRDSRFGHALVLETSLRSGEYILGFQIKPEERLEFTCKAVQALLSAFQSSPIFGVQYSRQEAAFSQQQEQRQAMVPNITEEKEPEEKALRVDAFA

SEQ ID NO: 139916 - protein, 15 aa, Heterodera glycines
LKPSIACSVLGTAKH

SEQ ID NO: 139917 - protein, 38 aa, Heterodera glycines
MRENVHQNVVANPSEMWGIIIVTNIYKSFSKNLSVNKN

SEQ ID NO: 139918 - protein, 41 aa, Heterodera glycines
TSLFCVETGQLDSRHLDSGGVWTVKHIWTEVDNFVQCTLRK

SEQ ID NO: 139919 - protein, 44 aa, Heterodera glycines
MNRILSKNLFNRFFVGYENLPSCRHYPTLRSSANAPKPDDLYEP

SEQ ID NO: 139920 - protein, 277 aa, Heterodera glycines
MYFRPSPTDGGAQLEVNGLIYDNSHVVPYNPYILLRYRVHHNVLFAYGNKANIKYALKYPFKGPGHCYVECKQESGNKIGIDEPAQYAKMNFRGATEAYAIVHSLPFAKLSHQVVKLSIHMPNQQPIVYRAFQLVSKAQQIQQGELPETQCSAYWKQWQNEWKHDPKLKGMLFEKVPEHFIWAKDKWNKRKYNLTKRPPIGRIVPVPPSDPERFALYSLMRHFPGDPDHLKMVNGLLCTSFTEAAIMHGLLEDDKIWDKTLAEAALSRWPDQMRWLF

SEQ ID NO: 139921 - protein, 1415 aa, Heterodera glycines
MNAEQIQQLLTALLQGNAASSISQANLASSIDSRISKFVYDPENGQTFEQWHKRFGILIEEDGKDLTEQAKVRLLLGKLGDEEYTKYRDTISPELPDKASWAESINRLKELFAETRSLFVRRYECFRIRQHPNQDISSLVAQINAACEHANLSLTKEQLKCMILVISLRDEHHDLRQKCLKMMEEAEKSGTTVTLKKLEEELKAIQIVKDSALSLLSTPASTNAIRTRPQQWRESKTKAKSANAVQQNHPAQQKPATGGKAIRGQPTQPCGSCGGTDHWRSDCRFREATCHTCQKQGHIANVCRKGAFTTKNQRRSFHTVQVKATCLQIGTTQGRWWKILVEINGTKIEMNVDTGAQATVLTIETWTKLGQPKLLPTDIETRNCNDVTFNTIGKFICLVSIKGQPAKKLTAYVTEELNYDLFGLPWIEATELIPKEIMFPETHTSVGIRASSAAPFQEIADVKSLTTALKENFPDVFGKELGQCTKIKAHLILKSDARPVFCKARPVPHGSLEAVNTELDRLLQIGAINPIEFSHWAAPILAVKKKNGKIRVCIDFSTGLNNALELNRHPLPRPDDIYAAISGAAFFTNLDLKDAYLQMELDDESKQLCVLNTHRGLFQCQRLPFGVKSAPAIFQHLMDQICAGIPGAFAYLDDGLIASKTLEEHLSAIHQLFTRFKAYGLCIQLEKCKFLQKELLFLGHIVSANGIRPDPGRSDAIRKLPVPHDKSTLRSFLGALTYYSRFIKKMRELRAPLDQLLRKDELWNWGEDQQKAFEKAKEIMLSDLLLTHFDPSLPIIVAADASKDGIGATISHIFPDKTEKVIEHASSVLSEAQRNYSQVEKEALALIFAVQKFHRMIFGRKFTLLTDHKPLISIFGSKKGIPIYAACRLQRWALILSNYEFDIRYINTTAFGQVDMLSRLIANYPRPEEDILIAKICTETECFIGTILQARINHLPVTATEIAEMTEKDEILQKVAKFSKEGWSQKCNDPDLAPFFPKRNEILQIENCLLYQNRVIIPTILRDRTLKALHMAHPGIVRMKALARQHVYWPGMDSAIEKLVKSCEECQIAQKAAPKAPLSPWNATKRPFERVHIDFAGPCQDGHVYLLLVDSFSKWPEVYQMNTMTAKATISVLRLIINRLGIPEEIVSDNGRQFRSSEFSEFCKEFGIRHMFTPLFHPQSNGQVERFVDTFKRAMQKCSKKDKNWAEKMLLSYRTTPNSAINGHSPDQLFFGRKLRTQLSLTHPTGKVNETIDKTIFHQKQEKYRTKMAQNFNEKHGVKSNEFLPTDPVLVLNYQHGKTHWLQGTVIERLNNSPTYRVNVPRLGRNIHRHANQMRRRYVFEESLGFVGPAQVANDPNHHSPAHQNHPTPARQNTTPKCQKRKQPDEIHPTTANSPPMALRRSSRNTKPPIRFSPG

SEQ ID NO: 139922 - protein, 288 aa, Heterodera glycines
KPLNTITVIPVILIEYQYDNESIKTYRNGKNIKIQKFPLLLVEIPPMVNQAKQVAMSPRDQGNSVRWRDANDRLLDSVRSVGDAITGMPSARGTQPPPAQTRYQPTVTPVPVEQYNHAASAYPPGEPLVHNRLIVREEMPAPRRPTPPVEISPAPRPPPPPELDEEEETRAFWERYQLPNAQYQPILSAAHNLHQLRQWSSNENDIVAAAKRMAILMARLSQLVRGEGGNKKDLIDCAKAIADSSEEVTRLAVQLARLCTDIKMRMDWLYKSTRKKWRSSSLKLLMDG

SEQ ID NO: 139923 - protein, 153 aa, Heterodera glycines
MDTEHAEVDFEDEGDYEQLNANQNRKQKKAGGWQSMGLDHSVFKGILRKGYRQPTPIQRKAIPLMCDGRDLVAMSRTGSGKTAAFVVPLLQRLKQRDARGIRALLFSPTRELALQTFKIVKELGRFTGLYCACLIGGDSMDEQFNALHQHPDM

SEQ ID NO: 139924 - protein, 341 aa, Heterodera glycines
MKPWLSYVKRFYDKDNWVLSWKSRRILDELHDLKNEGRWFLYHATNGAQLTISRTFDGTRPFAEFRYVEEGHLVDLTPNQVIFRQTVPDEPEESPVSNNKKLEEKAEKPARNDKRTTLATRKVEEYCTAEMKQNSYCYDIFKPCDATHETCAKSATYSALAENRHKLEEFNNCHASCLFEALIFSWLSRNTNLPGNEVSRMHEELIKPTTELEEVAKLFHDEQIVKNKRGLGKDQQVMKVIEIWRNSCDRFGELFTKPAMQQIKFRPILIEHNGQYNQWINRQNTRMAELFSKMRTKAQHPTYLSYNCTTVIVGDNVAELFPPHYLMMPNGSRISQRTHAD

SEQ ID NO: 139925 - protein, 51 aa, Heterodera glycines
MQTLHDASLVKSLLKNAQISCRRCENSRLLQGYNTINNINPAYQNDQNYHT

SEQ ID NO: 139926 - protein, 72 aa, Heterodera glycines
MPKMRCLGVLSRALGVQPAAVLSWPIITAVMMLGATATTGFRSAIEFRRLGDARNSEIRVRISPLALTATDT

SEQ ID NO: 139927 - protein, 23 aa, Heterodera glycines
MRIMRKAKCEKRNLGPSLICSCN

SEQ ID NO: 139928 - protein, 159 aa, Heterodera glycines
KSTELANKFPAINPIFLHYHFNDHMKLISVVKTLNDISKCFWQSNIICNKLVLVNEVDFNYEIKEEENWFSKFKQNFMEKINGTKNGPKNVPSNEFEENIRQEFEQKMNKMYENTKRNSKDEKAKLEKAIGNSENNEEKKILEKEYDDKFGTFISSPFS

SEQ ID NO: 139929 - protein, 20 aa, Heterodera glycines
MKEKWSDNRAAIDFLIKTKL

SEQ ID NO: 139930 - protein, 273 aa, Heterodera glycines
SKNIAILPRRDSDLEAFSHNPSDGSFAPLVYRPSTTKCLNLRFLSYAGLLLATGLGKTNLSHDGLNPAHVPYWWVNNPTLGEFCFAMIGRADIEGSKSDVAMDAWPPQASYPCGNFSDTSCWKLYTLKDRATLSRSVFVLKIRIKAFAFLLYERFPSSLSSLGHLRYALTDVPPQSNSPPDTVIGRGSPGNRVARLNTKMDTRRTPVLPIKGIDESSGISLAPCGSHLCYTSHDSSQSQTRVKLNRVFFPAKFAKPVPLAVVSLDSRGQWESR

SEQ ID NO: 139931 - protein, 25 aa, Heterodera glycines
KYNVSYEFSFICNHAKTATRKWPRE

SEQ ID NO: 139932 - protein, 267 aa, Heterodera glycines
MKFAKKMLMIPEAEYLALRSAMNSGDYLQNEKASLDAKISQNLQDPDISEDLKAKRHDWLYKERRTVKGILENRPQKVVIENHVPGPNVAPYLGLNNQSKPQETEEPRKIIIPRKRLKEQTPDPESDNDTLEELSPEPQTTSTLKTPVPIKTIIHPTLLNGLFRYVKENKDLFKITAAGKVQSNMNLPIENSNYRDVLLYLAGKKDETPRGAKFLKDRLLKDPTVKDMVDKSKVMWGRGRKKAIKSIKTPGIVRVKKPFKPLIWARL

SEQ ID NO: 139933 - protein, 146 aa, Heterodera glycines
EKLDEYCSNDTDILMKARIKLRKIFIDITKDKETPNGIDVMRLSTTIASSCMKNVIETYERAGKLLSEKLWGGPALNRRLWLSGPVFYQLNYRPCPLQLRLKKVVFGDLIMVRKNMDSQLKWNGWGYNHSFFALSASGQIMMHSDE

SEQ ID NO: 139934 - protein, 419 aa, Heterodera glycines
MMRKKRKRRRRRKRNRGKDRRKEEKLDVESEGTEEDKEGKEKEEGEEDKEEKTEVGKMERKKRQKKQKKSCSPEKLVKEKKEKLEGCREKKDEGEEASSVKEDEKKRENDDDEKEGEKDTNKKAEEEEKEKMRKKSKRRKRNRNGEAQLKKHFYEMDGEEKDKEEEKEEEKEVNGKKKERKEKMEGEKKKREEEKEEMEEEEKKREEEKEEREEEEKEETEEEEKEEREEEGNKREEEKEERKGHEKQTEDEEKPKRISKKKKKYKVEAAQVKEEKTKIWERKWQGLSKEERLECRYRKSCYATGTKPPIRRWATQEEGDEDEKRGHGWEEWHNLWVTMAIKNEVKEEEAIEGWHGMDERHKKLKCQYRKSCYERMEQRTEDDGTANETQRNRRKEAKQREKPKKVEDITRKTKARETS

SEQ ID NO: 139935 - protein, 377 aa, Heterodera glycines
MDLLLFFLFYALFFCASFNRMSASPRKDRRGPIFDVSPPRGRLCAAASEDRQNDQTPLIDLATSEDRPNDQPPLINLPKEGQSSSKRQSKHRRGSSAIPLFADAYFPFLAQSSDTNRHASPPTVPRQFMAPMDGDISGTNNQPSPPKHRRHRSDILIFASSTQTNDHSHKQNNVNVAKSRRTRRPSISQSDAIAKQLNELVIQERIYNQTPTQYPKMPINKWTNLRLPVHSEQLRAGGKFDVKEKCPEATNEFDKIVEFMDDTGKWIKIEIEQGKAVVIYLRDLLGNPLQIEEPMNLSFGGKKRFLRTNGTEILYPTEIIYSWMNFQLPVNAEHLEMGGQFDVKEKCPEETREFDKIAEFMDDTGKWVKIEIIQRKA

SEQ ID NO: 139936 - protein, 18 aa, Heterodera glycines
MLFNFFVILFKRNYEKQK

SEQ ID NO: 139937 - protein, 133 aa, Heterodera glycines
MNNSTNTTMDPTNTTLGYVISSNFVPLCFLFGLKIPILVMAFFLSTTPIYLTFKSKILRGNCNFLIALNFFNLSLQLPAALISATVVLTGQIQIRLANCFPLQIGPYIGATAQWTICFAIALDRLVGLFFPFL

SEQ ID NO: 139938 - protein, 83 aa, Heterodera glycines
MLLLSFLFVFFLSVSKSEDCCDVCFNAYVLCNYSCQTLRPAEGGAAGDGTKFRHCRANCRMDLAECAFRCGPDCPRPNDVLIG

SEQ ID NO: 139939 - protein, 104 aa, Heterodera glycines
MAKLKIFFFAFLILSQNLTISKPIRRKERELGTLAAIAIISAIVLTPIILGSVATGIVIGYTLKDGSGREYLKGTKRRHTRSGQIEIFLFYLSKMELPVSLNSC

SEQ ID NO: 139940 - protein, 31 aa, Heterodera glycines
AMIVHLRSCANRREQKQLTHRKDAFCSLNII

SEQ ID NO: 139941 - protein, 161 aa, Heterodera glycines
MVEMGTEIQTSRNELKSFQEEVDKAKNITLEHVEKNDMKEAKKSADVAKGIARQAKTKYTSTLEEYNDKSEKGFSGMVVRLNEALGGHFKQAEKGPQKRERLANEDVQFNYDSIDQKFIVYLSFAVTHIDLSKHLAYVLGFKNTRLFHAEEATYMPDLTGG

SEQ ID NO: 139942 - protein, 266 aa, Heterodera glycines
MKFAKKMLMIPEAEYLALRSAMNSGDYLQNEKASLDAKISQNLQDPGISEDLKAKRHDWLYKERRTVKGILENRPQKVVIENHVPGPNVAPYLGLNTQSKPQETDEHRKIIIPRKRLEEQTPDPESDNDTINELTPEPQTTSTLKPIPIKTIIHPTLLNGLFRYVKENKDLFKITAAGKVQSNMNLPIENSNYRDVLLYLAGKKDETPRGAKFLKDRLLKDPTVKDMVDKSKVMWGRGRKKAIKSIKTPGIVREKRPLQPLIWARL

SEQ ID NO: 139943 - protein, 99 aa, Heterodera glycines
MSPLRFFVALFLITLAILAGTHGTVENSVDGGPNMASPIIRERRLFREPQLHSSAECLCRVGDDAKSAKQKGQQMLGRDGQSGDNSKNGNEMYYLQLRF

SEQ ID NO: 139944 - protein, 218 aa, Heterodera glycines
SWILSKVCTNIGQLSIEIYNNNNNKELPEINELKQIVTEICKEKSDVQNAIKSFYAKNDIGTIVEKAMKNGQHILEVMKQKEDENELECNNQLNEFSQFAKKFQMEFPEILKNSTVNELMDKELLKPSDLFEFVLNKLEFEHFASERNSTGANGGAAKKLSADAKKVSHRRRKRSGDPIPFPLLIIAFFVFAYYTHIFTSPILFIFMAFCLFLAARLS

SEQ ID NO: 139945 - protein, 135 aa, Heterodera glycines
MNSVLEGIYNGVPMICVPFFGDQFYNAESLARQQIGLVVDRLHYKGTVQQQLTLALAIALKLNESNVSENKIEMDKLTTISAALHQKNIPNIISDAFRVIEDEMCTNDRKTTVIGDLLTRNEASYEPVGWPELII

SEQ ID NO: 139946 - protein, 50 aa, Heterodera glycines
MTFYASLVGYTGRNNKILSVKSAFGILMSKSVTVNDILSSLVGYTGRNNS

SEQ ID NO: 139947 - protein, 48 aa, Heterodera glycines
MTFSASLVGYTGRNNKILSVQSAFGILMSKSGTVNDILCFSCWIHGKK

SEQ ID NO: 139948 - protein, 42 aa, Heterodera glycines
MANKFLIAAFILTIAIFVNGQSEAPNNSSEMASEESNSEESG

SEQ ID NO: 139949 - protein, 71 aa, Heterodera glycines
MGRSKSMPSLRGPTNIQQLVDKMWEKDTERVNESMGEAPMNEQRRAKFDTLWALITRSEIYRMAYDYLDRL

SEQ ID NO: 139950 - protein, 159 aa, Heterodera glycines
MLGQFISSPPRTLIMAFLLAIIMPIFVVGPKIGSIGNQYQIHPPEKYKIIVVFYAPAEFQTNAQGEIKFSFDDRVFKNPFVNQELQDSNTVKVAVYVYGGQNNELRLLHPFKMFEYNHANERKLVRKVNYTDFEKDRKRNDYRLHEVFHVAFKDLPLVE

SEQ ID NO: 139951 - protein, 17 aa, Heterodera glycines
MRIFILGLPNLPPFYKE

SEQ ID NO: 139952 - protein, 30 aa, Heterodera glycines; identical to SEQ ID NO: 126607

SEQ ID NO: 139953 - protein, 22 aa, Heterodera glycines
FLWIAHTEIFCGSPTLSFFVDR

SEQ ID NO: 139954 - protein, 20 aa, Heterodera glycines
SRRWMLLLNSLNFSWSIRGL

SEQ ID NO: 139955 - protein, 130 aa, Heterodera glycines
MAAFGAKMARKVQFVERDGLFEDPEFPVETIPMYFTEGPVPIRWLRPGEIADHPQFINQGPIAGDVRQGSIGNCWALAAASVLAQYGPLFYRVVPPDQGFGQNYAGINCVLGQLHLTMSQFCLGQLRLRI

SEQ ID NO: 139956 - protein, 68 aa, Heterodera glycines
MHAFCARAIHHRACQSKAKQQRWCFERIKGIESVNRLLEKYICNLSTILRSELEMINFTIQTSFRCSN

SEQ ID NO: 139957 - protein, 15 aa, Heterodera glycines
MKIKIALPPENLLEV

SEQ ID NO: 139958 - protein, 62 aa, Heterodera glycines
MAIKYGPKIAKYGHKMAKIAKYGHKWQKCQNMDINFSKLSAKFLQIYWLKLHMRYISKFFDS

SEQ ID NO: 139959 - protein, 47 aa, Heterodera glycines; identical to SEQ ID NO: 132970

SEQ ID NO: 139960 - protein, 76 aa, Heterodera glycines
YQKGRWRKNFLKIFPYILVISFCFWWGAWNSGIMRTRPIWQVKQRLLTSQKVRCRDETNQHCLPRGTRHGPPKEWI

SEQ ID NO: 139961 - protein, 64 aa, Heterodera glycines; identical to SEQ ID NO: 129150

SEQ ID NO: 139962 - protein, 113 aa, Heterodera glycines
MPVQLEMVNANQKSSGAILIWSPGREWTKKQTLAQNGLRKVLKRVLTMPIIGPMFPEENLGQEINLLNAQVIRWKMQEAIIHLWHGNDLSALNELNKPTEFIETVSYTFVALF

SEQ ID NO: 139963 - protein, 97 aa, Heterodera glycines
MRKNFNNSIAAAAGGGELCQQAPAFSNKLRSLVFIFTTTVWTALSLLPFRLLMLYWMYLVDIDHFCVEKCQWLQWIYNFAWAFLCLLKLNPARKRIG

SEQ ID NO: 139964 - protein, 185 aa, Heterodera glycines
MSVHNDSHGEDCNATSNCHASRWLEDSSQNLFDNSLIGLSLISIVANILVIICARRLFVYNCDTIHIYIASMTFGDLVVVFCQIFESFESRRPFLGVVPCICVYLLRCLGIAVSALVAGVAERRQTAFFYFPIYYRVIKSVRRALRMCAVIWTVSLGRENFLIFVELRKASIILKLKRKLIKSLT

SEQ ID NO: 139965 - protein, 64 aa, Heterodera glycines
MLNNFLFRLDPICCESPQGHSLLAPIQSKRHTGRFCVENGNLPIPCQWHRHNGIGSFIILSFIM

SEQ ID NO: 139966 - protein, 80 aa, Heterodera glycines
CNHGYRISSIRRVNSAHQRKGIVLGSFAIECQPIVSSGKTNLKVGNGENKEERNGRKRNNTPKCQIIYIKTLAWSDGFDF

SEQ ID NO: 139967 - protein, 68 aa, Heterodera glycines
AVLVRFITAPNLLASQQSLLNLPDRTGAHDSTVPSTPPKAKRYNQNIKKNFLKNFFSIFLLVGKASEC

SEQ ID NO: 139968 - protein, 116 aa, Heterodera glycines
MFPGDDGYESEDDEIHLPPPPIPPQIDHPPPNVLEIRVGPIHDGQQPMPLRVLPQIVHRPLNFPAVRVQPVQQPIPLRDVPLFVNPPPNVPVIRVQPMPQPLPLRDMPQIHHPPRN

SEQ ID NO: 139969 - protein, 62 aa, Heterodera glycines
IIFIQKIFFWVFGAVPLNRCAQIYGETESFGNSFPIVCTLILRWIFAPHNCLSTPNGHLKKS

SEQ ID NO: 139970 - protein, 20 aa, Heterodera glycines
TDQKRTKLCRDTERKRNNLF

SEQ ID NO: 139971 - protein, 36 aa, Heterodera glycines
MSEFKKWGRENSKSEVTYSVIADNAHIPLGNTVASA

SEQ ID NO: 139972 - protein, 36 aa, Heterodera glycines
ARTARRTDGQRMRRDEKEVCAIQAEDENIVDEINIH

SEQ ID NO: 139973 - protein, 61 aa, Heterodera glycines
MASQPPNLVEETEKPIIDVTKAKEWRSAEDGVETGRRPENSSGQGRLLLRPLRAHHQRKRK

SEQ ID NO: 139974 - protein, 365 aa, Heterodera glycines
MDVWDFGALALFHKIGTKNVVLTHNFPIMSHMYKYMEEAGWQTENSELFNYQKQILGKGVPELFSAVINDKNVGKAGAYKEKHNESSDIFSKVYEIADQKFKDLFTDNAFPTLEQLFRDAKALFVNTRPLLDYDIGSLPKRVKFIGGIDLMQPDHKDALPQVFGQQKPVIVFSMSSLLEPSKMPLDKFEAVIQGLGMCKEKEVIWKYAKQEDNGRKSFLQMHAPNVHLVEHYDQATVIGNEKTELVISECDIRIVMDALSSGKALLCLPMFAEQFYVSEKLRRMGAAVVLDPRSDSFTPEGIFKSIGEALTKRRVARVFGSKVEEFLGFLGSRVATLGVNDSRAQSQVLENYDSSLSSSPNNLLY

SEQ ID NO: 139975 - protein, 81 aa, Heterodera glycines
MANFDDVLALCSHHKVVPIVRANAMGASSKFGSQQQRAGVMPMVAPTWHGGSVQLWPNNSNWPTNEHFRFWHKQRRHATLE

SEQ ID NO: 139976 - protein, 38 aa, Heterodera glycines; identical to SEQ ID NO: 130615

SEQ ID NO: 139977 - protein, 24 aa, Heterodera glycines
ITGVSIIAVLFLVFLMPSQNLVRF

SEQ ID NO: 139978 - protein, 41 aa, Heterodera glycines; identical to SEQ ID NO: 134937

SEQ ID NO: 139979 - protein, 30 aa, Heterodera glycines; identical to SEQ ID NO: 129978

SEQ ID NO: 139980 - protein, 133 aa, Heterodera glycines
IHVKKLLIRRPTTIWSEFIKYSISVSKIFVYVKKQVVDSFDPEEAQCIAKSQKCFSMATVLLDIAYIEANFGCLPGAITRLEKKGFTIHESANNLCEVREDVFSFTGEIGAKIRRKFDSVIAKNPGFDTICDI

SEQ ID NO: 139981 - protein, 66 aa, Heterodera glycines
ILPGIVLTKMSQEVTHLEKPGFFSPTPEKFVNSALRTVGHADETTGCFAHQIQAILFCRLFLGNQT

SEQ ID NO: 139982 - protein, 36 aa, Heterodera glycines
IKVNVEASNQVENVLFMLNMSKLVRRKKGICLKSRS

SEQ ID NO: 139983 - protein, 70 aa, Heterodera glycines
MKSFSWNQTNWTMFFLIRATKFSIQHRNLVLLFMTTMAQQQKAHFTTFMESVVLGIICANDSVKTAETQR

SEQ ID NO: 139984 - protein, 179 aa, Heterodera glycines
GLIFSFSVFIFCLLSLIHYHENYLSVLYLSIKMLFLSIVFLQSCLMNRFLQTDDYPRREAHTKETLFVHLAWSDSGNFPRVTFCDIDVRILGAMQRHTVQCILVINIFTEKVFLLLWLWYSLLLLITVFNLFGWLFALLPFSARRDFILRHLRMANVKFEKEEEVRSKGTERVKRTQFK

SEQ ID NO: 139985 - protein, 210 aa, Heterodera glycines
MQNPFSTRKPKFQIRKQLLSLIDAAYELNKISIFFFDSKFSEENKYKLKNLFKNSNGPELLNEEELNYKINEEEKEEEEEVKESKEKMEAKSAKKPEERIKGQSAIELDQRIKEKSAKNQEQRMKGQSAKESKEKMKEQSAKKPEERLKGKNAKNPEERSKEQSAKIFPDKITKKVKRKTNEKIGKKVEKKSTEEKKDDNKAKERINKKG

SEQ ID NO: 139986 - protein, 41 aa, Heterodera glycines
MPQKPTAATKEPLDKKENVARHLLDVVDKGISDQSDHEKTE

SEQ ID NO: 139987 - protein, 399 aa, Heterodera glycines
KRTELKLSQSLQLVGIIPGSFVFGWLSDLYGRRLTMLSALVLWVFAMLATSFSASLVIFTVLRFVVCFFNAGIAVTLIVFTSELYPKKHRFCLMNLITWAPNYILFGILASFIPNWQHLQRVLALFALPCMGLILFLSESPRFLISARKMKEAKEAIIRMHKFDGKRRPYDEKALDALLEKELQQMLELSDGKRRPYDEKALDALLEKELQQMLELSVTKKKYNYLHLFYNTKFTMYTLSVSFSLFVVTLITYALVYNIEKMSGNIFLNMIWMGMFKYTMNLAIAFADLKFKWLGRKLSHLLSEVLVLAALGLFVTLRLTGVSKLPMALSLVAAVGFCGILFNSSLVAAVGFCGILFNSDKLAGSELFPTGVRNLSCSFGQICSRIGVVGAPMLFFLVR

SEQ ID NO: 139988 - protein, 103 aa, Heterodera glycines
MSNNLADKISGDERPKEATETKPLLSDGIAGEGIHGQSQRDGTAKADLVNDAERTEEDERKEDDLKLDDCFRMGWYMLIVCTLSQLLLFVEVGQQKPIPPICQ

SEQ ID NO: 139989 - protein, 341 aa, Heterodera glycines
RRKSTAWTLTLLSCFAGGVFMGTCFLDIFPHINEHYEHYEHFRDKSQWEIEFPLPQFFICCGFFLVYLLEELILKVFASRFYYLVRKMHISTRSVSNANRSKPWPNLVPKHSPLLCSVDLLKSFTFAFAISFHSVLEGLAMGFQETPTGITTLFFSETPTGITTLFFSLIIHKAIEAFSVGLQLSKSRSNSLVCCLISAYALMTPLGAIFGDFITTLNMDEIKKEAIITLNMDEIKKEAIIIILESLAGGTFIYVTFLEVLAHERAKEHSHLIQLGAIFLGFLVIQLGAIFLGFLVINALQLYEQHRMNGHWHSKSERKSDESSVRRMPLHPNTFPKQQMA

SEQ ID NO: 139990 - protein, 34 aa, Heterodera glycines
CLSTPNGHLKKSIFLFSGQSPRTDAPRFMGRPNP

SEQ ID NO: 139991 - protein, 133 aa, Heterodera glycines
MHEIFARLQSIPSARIKLKELSKANSQHSQYAIAMDNIKHICNLADTIEKTHDFILDGKLLLAHKNVMELENARDDLMFELLKTYFSDVDKLIEDLGKQIWYICSRALEAVQGNDSALQQLVSALRIIEREER

SEQ ID NO: 139992 - protein, 210 aa, Heterodera glycines
FQSLGTQPTNIPIKWHSTHQHFNHWGLNPPTFQSLALNPPTFQSLALNPPTFQSLGLNPPTFQSLALNPPTFQSLALNPPTFQSLALNPPTFQSLALNPPTFQSLALNPPTFQSLALNPPTFQSLGLNPPTFQSLALNPPTFQSLGLNPPTFQSLALNPPTFQSLALNPPTFQSLGLNPPTFQSLALNSPAFQSLGLNPPTFQSLGLNPR

SEQ ID NO: 139993 - protein, 219 aa, Heterodera glycines
MHPTEIPRQMHQQPPREERGWQQQNSVLYRPVARQQQNFPVYENQMLPPQSQNLAVLSSLEYNMVLERIPDLNGKEGTDEVKRFFKKFDAYTDSWPDEKRIKGIESKVYGRAERAFEAAKAVIPIRYELLRGEMMRQLEETDSKNLNAFDELMLGVRRKPNESIDDLAGRISGLVKRAYPGLSFQLSDEFSIKYLIRSIGDPTLSLNLELIRIINNFEK

SEQ ID NO: 139994 - protein, 188 aa, Heterodera glycines
KWTANVGAANVGPQIGPQKSGPQMSGPNVGPQVGPQKSGPQMSGPQMSGPQMSGPNVGPKVGPQKSGPNVGAANVGPKVGPQKSGPQMSGPQMSGPQKSGPQMSGPNVGPQKSGPQMSGPQMSGPNVGPQVGPQKSGPQMSGPQMSGPQVGPKVGPQKSGPQMSGPQVGPKVGPQMSGPQMSGPQMSG

SEQ ID NO: 139995 - protein, 1223 aa, Heterodera glycines
MKRKVRMFGVAITGAGLAFPVWVPYRAYPQNNADVIMEEINELGQSGDGDENKKMLLLSEPITMKITCVTMPSGEGPRNVHKFDFGFKEHQRIGIVNTDKFCLFYALASSMNYLIMDKYSFIRFMKNLARQKEAAVELLRNCRIDGNEISYGVEQLPNVQKYWDEIYPGKYRVVAFEKSADPRKSICVLWKAPMGREKVVPIFLENGHWDGLKNYVCFFNRGRKFCIDCECFFDKDVKHTFECRARCYYCNRVRGMPCEKESGVKIECPKCHRYFYNWECYNYHQGHQTCKLWRRCVICDKTYRFNPKKGHECGETYCQLCSVSHDPKRGCYIIPIEEKEEKDVYRIVVWDSETSQDSIYKGDQKEHVINYISVRVTCTECCDDKNRTNCKICGEERIKDWSEAEGHEPTKDFVEWILTAFTNYDTYIFAHNAGRFDGHFVFNYLCRTGKNPLPLINGLKIYEFKVQNSKKHSKLIWRDSCLLMPVKLESLKATFNLDCEDKPFFPCYYNKKENYGIRLEHLPPMEDYSPGSMNKDKFIKFEKWYNENKETPFYLDEELRNYCRNDTEILLLSIIEFRRILINDITKGFDPLPRSCTNAGVAMNIFKAMFLLTEQLSIVPEKGYERCDRASVMAIKYLEWRSQRDRIEIRHAGNGREVKIGNYKLDGFIANNGARDKCIEVMGCYIHGCLNCYDPAAELIGGRTAQELNDETQERLVELRKTLDVEEVWGCQIEKELKKDEEMRGFFDDRGNEKGPIDPRMAYAGGRTGPMKLFAKSDEKKKISVYDIVSLYPSVNYGTAYPIGLPEIIIPKSDEINVNWTRPEDLKFNGLYKVRVHPPRGLRIPVLQLKCDERLLFPLCWRCASTFKKETTRCDYNCPHDEAQRRYVATYTSVELAKALECGYTVDRFYRAWHYEEEADDLFKGYVRLFLKLKEEASSFPKGVETDEQKNIWREEYKEKYGIDIELAKVKKNPGLRYISKLMLNSLWGKFSMRNCLNKNAVIDRASEFYKIACDHKIELCDIVEYSEEAIRLIYRDKEDFVMEHKSSNIVISLWTTSMARLKLLEFMREAESNGGEILYTDTDSIFVLHDRDVEPITTGKYLGEMSEEYGGYEIEEYCCGGAKQYALKMRSKQTGETEYVMKIRGITFDVDNRKTLHYDTFREMVLNYGKGEVDPAFFVYKNDFGPTRDSKVVTREKHKMYRPVCQKGIIDEELNVMPFGFC

SEQ ID NO: 139996 - protein, 231 aa, Heterodera glycines
MRNCLNKNAVIDRASEFYKIACDHKIEMCDIVEYSDDAIRLIYRDKEDFVLEHKSSNIIISLWTTSMARLKLLEFMREAESHGGEILYTDTDSIFVLHDREVEPITTGKFLGQMSEEYGGYEIEEYCCGGAKQYALKMKNKQTGETEYVMKIRGITFDVDNRKTLHYDTFREMVLNYGKGEVDPAFFVYKNDFGPTRDSKVVTREKHKMYKPVCQKGIIDEELNVMPFGFC

SEQ ID NO: 139997 - protein, 47 aa, Heterodera glycines
MDDGERTMSINIQKFVNGWCFFVIPMTSTLEDTPGFELIRNGTTSIK

SEQ ID NO: 139998 - protein, 27 aa, Heterodera glycines
NSALVLIWQKIKPFFLRTHGCSIHPTK

SEQ ID NO: 139999 - protein, 43 aa, Heterodera glycines
CFAVPRTGRQWIALNLQEIRLAISGCKQLLGNELFFEVCQTPY

SEQ ID NO: 140000 - protein, 90 aa, Heterodera glycines
GGRCAIYLLFLREFLNLYSIPEKCLSLFFEKFYTSQKRLRMRRRAVHNRHFISQRIFIFRGYPRKMAISFFDKFYTHTNALEHDREGGAQ

SEQ ID NO: 140001 - protein, 23 aa, Heterodera glycines
YIRMARNRNNNCGIASHASFPLV

SEQ ID NO: 140002 - protein, 221 aa, Heterodera glycines
MHIERISCAAHDLNLCVKDCFSKEKDEMAQIFEKCRKIVGTLKHSAKLMDDLKDVQGELGLPKAKLLQELLKPTEEVSLHYCKEILSARIPLARTLVSTLERVDLSVTIDGEIKIINEVEQMRTRLIEAVKKRFLQKENSTFLDPRFKDRFSDESDIFFARVARFLKDEGTEENDILENLEDEVNSTRILPPAKRACSIVEIMQNIASCTKKGGTKIAILI

SEQ ID NO: 140003 - protein, 103 aa, Heterodera glycines
MNGDCTGAAWRRPIPRCKTVKELNMDVVIEYSGRAAELKLIGEATSGSGKDITKATDECICALATALDESPMWEMNEDELKKFFDDWDAKSALLLPAALPGQN

SEQ ID NO: 140004 - protein, 221 aa, Heterodera glycines
MLLMVVLFGFISMGHGTYQRKLPSAEERAEVKAFKIELHGTGTGAENPDFFPPPVRPPTASTLLPTAPAPTHVRPQTAPTPSPTATAPTPSPAAPTPSPTAPAPTPSPTAPAPTPSPTAPAPTPSPTAPAPTPSPTATAPTPSPAAPTPSPTAPAPTPSPTATAPTPSPTTPAPTPLPTAPAPTTTPETDPMKIALSILRKLGKEDGNKDGDYEKHQNLKL

SEQ ID NO: 140005 - protein, 27 aa, Heterodera glycines
NSALVLIWQKIKPFFLRTHGCSIHPTK

SEQ ID NO: 140006 - protein, 38 aa, Heterodera glycines; identical to SEQ ID NO: 130624

SEQ ID NO: 140007 - protein, 196 aa, Heterodera glycines
AWDPIPQIADICTRHKLWLHVDAAWGGGLLLSPEHRHKLAGIEKADSVTWNPHKLMGAPLQCSACFVRRELLFQTNQMSADYLFQQDKPYDVSYDTGDKAMQCGRHNDIFKLWLMWRSKLWLMWRSKGMEGYRRQINQLMGMEGYRRQINQLMDLAKDLAKYFTDKIKRTEGFEMVLDEVIIHRREKWRYCKKVVG

SEQ ID NO: 140008 - protein, 38 aa, Heterodera glycines
RFLNVWIFFWLTKTSSNLVLSILFQIAPNFFYSLTRPY

SEQ ID NO: 140009 - protein, 50 aa, Heterodera glycines
IFKCLDFFWLTKTSSNLVLSILFQIAPNFFYSLTSPIKLISRKSRMNSHF

SEQ ID NO: 140010 - protein, 44 aa, Heterodera glycines
IKFLKIFNSFLNRPKSLGLTFFSETDQKRTKLCRDTERKRNNLF

SEQ ID NO: 140011 - protein, 174 aa, Heterodera glycines
MRTKNLPSKLSNSEVLTSDASSSSVESPAGTIYESFDALSIDSSKAAASPEGSANVGAEIVIEGTESNENPAGSGYDEVRNEGSNVTFKAMEVALDQVDAEGFANNGFDDEEPEACPPAKDVSKSSLLYLVSQAGDGYVIACKKSPKSKPNWPFFMNIEDKLIESAPGFQRKLE

SEQ ID NO: 140012 - protein, 63 aa, Heterodera glycines
LTSKNNSLPKSFLQPLIANIISFRFKAIHCLPVSAQQSTNRVFDSLQKIIPYPKVFYNHILPI

SEQ ID NO: 140013 - protein, 59 aa, Heterodera glycines
MAPGGGTTSTQKGGKQGDGGGGSGGEAANGGGGIAITTGEGGGSGGEAANGGGGIAITT

SEQ ID NO: 140014 - protein, 181 aa, Heterodera glycines
FPPIDCPVALAFNPPPPAFPPLPLLSHSLVTPIPAGPLLFSPPPLPPPVPVPAPPPPPPIMFQPLSPPQPLPPKVFCIAPAYCAPPLPPPLPPPPPPTVVMAMPPPPFAASPPLPPPSPVVMAMPPPPFAASPPLPPPPSPCLPPFCVEVVPPPGAMVAAAGPPLAPFPSPPPYPLHPIEG

SEQ ID NO: 140015 - protein, 292 aa, Heterodera glycines
MEIRWPGRSPSQWKHSHGHSPNCPQSFATTPDWTVPKSFRMCEPNTAKGIANLALGLSFVAGALRHFDLLRLFVPPENVAKDEPTIGVWHILPASLSAEKERSMDDAEMEQSLNEGPNALFIYLHGNSFDRTTSHRCELYNILSAMDFHVLAVDYRAARRGQKSPVQFALPLFALVQHDHCPPADSVGTENEFGRANPTVRSREVACPILVLHAEDDHIIPVNLGKKLVKSAREAHREVTYLEFESILEYKHKYIHRAPELPDVIREFLERGHLQKRSKNRIEQGNEGVKVE

SEQ ID NO: 140016 - protein, 161 aa, Heterodera glycines
MDDAEMEQSLNEGPNALFIYLHGNSFDRTTSHRCELYNILSAMDFHVLAVDYRGYGDSTGHPNEDGVNADAHAIYDYARLKAPSKDIYVWGHSMGTGVATRLVAELSDAGRAPKALVLESPFNNVWFPFSLPFRFLPWFNTTIVHPLIQSGLRMNSDERIQ

SEQ ID NO: 140017 - protein, 160 aa, Heterodera glycines
MVRAICIHNHPIPNTNDAPSCQIIIPQKQVGRSFDIYVSCVSNSNQVTPKPWFIATVSTTVETENPEAEIQPALQLLGPIFEKLYQEELKMRRFFRFVTISDLYEPVDMGYESQIFISRSFDATTHFETTCLDVLDIFKRGTTEEFDFSKITHLSLEDNE

SEQ ID NO: 140018 - protein, 18 aa, Heterodera glycines
FLCSLHGFNTQIFVEFIS

SEQ ID NO: 140019 - protein, 134 aa, Heterodera glycines
CAAAMPMPKMPCRRLPFRSFPVPIPGHTGINQLGGVFVNGRPLPNYVRNQIVEMNSRGVRPCDISRQLRVSHGCVSKILGRFYQTGSVKPGVIGGSKPKVATREVTEAIARYKAVNPTMFAWEIRDKLVEEGIC

SEQ ID NO: 140020 - protein, 253 aa, Heterodera glycines
QSFNEFRLLAMAMFCYGLALKWACHKSVKGSDGADSALLSLCAAELTTLLRTNLHADSQLEAEMHECDRNMVLLSFLRCYSSSVPSKDCAQFGTSVTSFLQIDTTDPIALSELRFDVLPLLLANAWPLRRNIHFLRRLAFILAYSSNLNYHLVLDPLLMGLSKCSTRENVFLCCSPENVAITDVKIFLVRLSSYMKLCKLYDEGVFVFPWIFHCAPNVQQQQFWSYINSLLDGKQESERSQFYSSKYKSRDRR

SEQ ID NO: 140021 - protein, 34 aa, Heterodera glycines
MNLFISLTGLLQEYLLPEFCTCCPTIRRHLFPFI

SEQ ID NO: 140022 - protein, 66 aa, Heterodera glycines
MPLDALLKNALPFLASSLNDSSGGGGGSATDYPAKAPDQILSFSTMFYCEKVLQIRPKFAWQFATV

SEQ ID NO: 140023 - protein, 63 aa, Heterodera glycines
LANFVTSSTQISKIFSRRRLSAPPDLHFPLFLQVFCLKTAKIWSFLVKKCSCYPAVEKKLLVK

SEQ ID NO: 140024 - protein, 127 aa, Heterodera glycines
VFDNGAVYSPDVLDVTTADLLARFQQGVLNVAALSLGIGYPTKASAPHLIANAFKNLLAVAAETDVTFKEAEKVKEYLADPSKFVSAVAAAAPAAGGAPDAKEEAAPAKKEEEKEESDDDMGFGLFD

SEQ ID NO: 140025 - protein, 51 aa, Heterodera glycines
GIFWQIFVGCNHPPKTQLTRPVLPWLARYFVGAGDRELHFLDEPQRGLNRP

SEQ ID NO: 140026 - protein, 86 aa, Heterodera glycines
KNRFIFVFGAVPPNRCAQIYGETESFGNSFPIACTLILRWIFAAHNCLSTPNGHLKKSIFLFSGQSPRTDAPRFMGRPNPSGIASL

SEQ ID NO: 140027 - protein, 75 aa, Heterodera glycines
MGQNRRIDGLGGQIGLGGRAVGSSEAEDADAGRSAGERFVEGKQRAMDKVRGQFGRRGEAVQGKSTRPIVSLGVL

SEQ ID NO: 140028 - protein, 39 aa, Heterodera glycines
MANNHFWTYPYPYWARHRGYLDYAAIPYTYWSRAYCTEL

SEQ ID NO: 140029 - protein, 37 aa, Heterodera glycines
ILINIEIKTYKKIYSLLFRLSSSRAFGRYQIIRIRSF

SEQ ID NO: 140030 - protein, 75 aa, Heterodera glycines
RFGKETSPRGVTTLSFCSWDIRLGICPSGAYNGRTFAHGLSCRAPSAYGHSTLALRESPQAKGKNLDALGTFCDK

SEQ ID NO: 140031 - protein, 48 aa, Heterodera glycines
DCTYLIAEKIQDQFPNVDRLIAKRNPSLSKRLTESKNLEMYLICNFNQ

SEQ ID NO: 140032 - protein, 88 aa, Heterodera glycines
MPKQKEIVLKYSFLDLTWFLDIEAVFYAISKTKKCLVVKTIFHISLHNFVSSARIETGIRPLERAARALQEGMERKNSYFWDFFRNQN

SEQ ID NO: 140033 - protein, 96 aa, Heterodera glycines
MPKQNEIVLKYSFLDLTWFLDIEAVFYAISKTKKCLVVKTIFHISLHNFVSSARIETGIRPLERAARALQEEIRINSPMWANILGPQPQALCFSQF

SEQ ID NO: 140034 - protein, 93 aa, Heterodera glycines
MNIEIFIVGVHEPVFQNSNRANLELALPSNIDFKHILKLINHTYQCAVFLRLSKVLIAFLLLLSSIEYNHKQFQLLPMKLCKKNDVDFYARVY

SEQ ID NO: 140035 - protein, 15 aa, Heterodera glycines
MKFSASLVGYTGRNN

SEQ ID NO: 140036 - protein, 48 aa, Heterodera glycines
MKFSASLVGYTGRNNKILSVISSFGILMSKSVTVNEILCFSCWIHGKK

SEQ ID NO: 140037 - protein, 98 aa, Heterodera glycines
MHPSSSSSPKITSIGQQEPKTPKHEAKNAATTVDGCDGGTTATTPKSTANSQQQQSAEKENNRSSSRTRSSRERKKQNSSGEEEGDREDEKGKDREKN

SEQ ID NO: 140038 - protein, 348 aa, Heterodera glycines
MIAEVERLLTRKRSAPVHESFGNIDDDDEEEGEILDVSFVEEEEDNTGEAPLNPLSYLTKQSAAQQETLRHEKWAQEERKRREEEQRKQRENERRRREEEERRRKTEEDRRKTAEKAAKEKKAKEEKEASEKKAREEKLAREKKEEQRIAKEKKGDKETKDKKAEEERVAKERKAEDERVAKERKAEEERVAKAEAERVAMVTKAEEERAAKAEAERVAMVTNAEEERAAKAEAVRAENETKKKQAEEKQLEELKRQQQAIRKQKELELLKEFRPWRGGYMRLVHGKDPTPDVHYLHETDDYHFVNAVHKYRVWHSELPWEAPEFNPSAHIQQNIGEFRELFEQGGVR

SEQ ID NO: 140039 - protein, 95 aa, Heterodera glycines
MDESKRENFSPQNDDDVITIGDNNTQTLLDLQPGPSKSGRKPRLDKIHEEIASAMKKVKAMEAEVDESPKKQPTNVFEYPTIFWKLARPKVLANI

SEQ ID NO: 140040 - protein, 130 aa, Heterodera glycines
MVLPLTAALSKLLNCKPENLAEYLNNPEAVNKANAYLAGKKLKTTYQGRDSKTKEVKFGTFSVKAAAETYAFEGFLGKFPKIQFRSNTHAFRELLAVEEGSESEPVERPAAETDYLDYLNFRSGWQSTLY

SEQ ID NO: 140041 - protein, 66 aa, Heterodera glycines
MDESKRENFSPQNDDDVITIGDNNNNTQTLLDLQPGPSKRGRKPRLDKIHEEIASAMKKAKAMEAE

SEQ ID NO: 140042 - protein, 130 aa, Heterodera glycines
MVLPLTAALSKLLNCKPENLAEYLNNPEAVNKANAYLAGKKLKTTYQGRDSKTKEVKFGTFSVKAAAETYAFEGFLGKFPKILFRSNTYAFRELLAVEEGGESQPVERPAAETDYLDYLNFRSGWQSTLY

SEQ ID NO: 140043 - protein, 87 aa, Heterodera glycines; identical to SEQ ID NO: 129152

SEQ ID NO: 140044 - protein, 104 aa, Heterodera glycines
MWLEFIAKLAQKENPEKLGSSLLFRKCEPNSPRKKIQKNQGRRYYSENVVGIHSQTRPERKSRKIRVVATIPKMWLEFIAKLAQKENPEKLGSSLLFRKCGWNS

SEQ ID NO: 140045 - protein, 110 aa, Heterodera glycines
MMTASNVFESMFRFDDKKPETETPSAKTDSSVEIPDISANAFKVMLSFIYAEDLSGLNGENAMAVLYAANKYNVSSLVKACLEFPINELPNVFFAYFQALLLNENVKFGF

SEQ ID NO: 140046 - protein, 228 aa, Heterodera glycines
MCAAHHEWLTKQKGPKLGKKMNALRIGGLMVNILNGSTRLMEVTIWVNDNPIKFVLDSGADLTVLDEVAHMAIGKPRLTHCNEQAVYHDGTSCKLLGKGTARFSFGGKTINGQYYVTKKGSLNLLGIDMLDAFGLLDAFRREVEKAMNVNLVKKEAKKSPILQQETTLAALQTKFPLVFVEGLGHCTKAKAHLELRPEAVPVYCRPRPVPYNTRLVVEEELDRLLEQK

SEQ ID NO: 140047 - protein, 114 aa, Heterodera glycines
MFGLTEFASNSSAFDGGEIRCVLKRLYSDFIVIEIPSDGHVLRPNSAAAPAAQNGAAGTECEKCQEDATTTTTVPPSDDGKGEKPTRLTDQQFDQMQRVAAGTDEEGKMDIDLK

SEQ ID NO: 140048 - protein, 130 aa, Heterodera glycines
MKEEVKKITENLDTLQSRVQILEFEMDGEIQRTEWIDDGHSVEHDQLPLHSANGKEPNGGEGQNEMHVDDCEIMIMDPFLGGITPLEGYDGNPGISFSRWVARFEDMLALSQYTETQKLSRLRILLKGQA

SEQ ID NO: 140049 - protein, 263 aa, Heterodera glycines
MFVNGLAECGTKNCVAELAKRIKSKQVSQANAVKALLALTQLPAPSDNILEEMEQLCSSEPVESQPTTKQSCWLTFGALVNEVCQHKTEKNAEECAGETANCAQSGFSKKGQCPMDKKQKYKEAMLAVYQNSGCIYDKIVALSALGNAGMDNSLKELENIIKDPREPRVVRVMAIHATRRLQVTEPWEVQSVLLPVFLNTREQPHVRIAAFANLMNENGQPEPHVVDQLMYTIANEPNKEVQAYAYRMMKAMAKSQKPNEKQM

SEQ ID NO: 140050 - protein, 211 aa, Heterodera glycines
MRTFALLALVAAILCLSAGRRTFPNTSPRVGFLNFGTRNSPNSAIKPFQQKNTEYTFIYNAQIASGLQSEENAANPQQKAVTRIQCLAKIQFASERHGQLQLEECQAGQQNEQMSEAQEVQPMELFEQVIGQVCGVGGSKLINRKTKHNECPDQITLEGACQTTYTINRAWSGQQFNVTKTINFKKCQKIADVANGFQTDPPQAQCAQCQQ

SEQ ID NO: 140051 - protein, 76 aa, Heterodera glycines
MGTGKLDTGKLDTVGILDTKGKLDTVGILDTKGKLDTVGILDTKGKLDTVGILDTKGKLDTVGILDTGKLDTKFLF

SEQ ID NO: 140052 - protein, 28 aa, Heterodera glycines
MPPRPPPPPPPPPPPPPCPSPLMLLVLE

SEQ ID NO: 140053 - protein, 254 aa, Heterodera glycines
VAAGILYELTDAPTWIIDPIDGTTNPIDGTTNFVHRIPFIGICVGLAINKSLCAGIPFIGICVGLAINKSLCAGIVFNPITDELYTAIEGKGALKNGFPISVSSAKALDQSVICQTFGQHNIKEKGEKWLDNAFGNLRSAVLSGTPLVHFVINFMFLAQGSLDAYVEYGIHSWDMAAAVVIVKDMAAAVVIVKEAGGTVTDPTGAEFDLMSRKVLCASTAEFDLMSRKVLCASTSQLAQQISKVLTHVDFEKEA

SEQ ID NO: 140054 - protein, 98 aa, Heterodera glycines
MEPNQNLYAKFVLFPHLAIVYYETKIIKNNRNISTISIGIWTKSDDTFYKYSNNGFIFGHSATGLRGYPSFAEGDTIGCGANLTSMEIIYTTNGQKFE

SEQ ID NO: 140055 - protein, 80 aa, Heterodera glycines
QQKQIETNEQIENEAQKTVEKTHQCPEKRTKGKNGRTAKQSAEKMGQKKGAPGQSDSENNPTKELPYSLYFNSALDFCSP

SEQ ID NO: 140056 - protein, 123 aa, Heterodera glycines
MIFKIFSKRIFALFKVRQQDDQEAGAAGRVAVMKEPRSRADTLPPQHPICTLSLTLPDYIGPLPCISAQADMQRGDKQQPPDGGAPRVPSVSERYAEALHANLAEAYPNVPLELVAKRIGGDW

SEQ ID NO: 140057 - protein, 61 aa, Heterodera glycines
GHDDAFSVITLDRVVEQFFRWRLMLPRVKIVKNGLCSGDNIVYANPCKTRSYIRHAEQMGE

SEQ ID NO: 140058 - protein, 25 aa, Heterodera glycines
MPTAHFMRYVLITGATDGIGKQASK

SEQ ID NO: 140059 - protein, 76 aa, Heterodera glycines
MNVMKTGEEHDITNFKLGKTQKVCICLWSEVPLCHDTRPFPTLFLKSAEAPIDKWTQRDQLEISCTTCEFWGSNIQ

SEQ ID NO: 140060 - protein, 952 aa, Heterodera glycines
MLHETSTQDTRAVLEEDRREHSVVLMGVPESDSGLSSTRRAIADQQQVLDILDVCEIEAMPTKVYRMGQRKEGRPRLLKVEMPTRKMTQSFLRNKNRLKNSKFQAVSVRPSLSPEQLKERHNLINCCKTARDQFPNHNFIVYAGHVIPRNDVSVFRDDPENCCILGDFNLGTKDLTIKNKKPFPLSNFGNLFCDFFNKYNLTSCINEPTREQSFLDLILSTKTDLINAVEVKGGLLDTDHLTILFDFCVLKQNATKKQIILRNFTKSNTFLFDAYLSSFLPQLLQKFYTVEDKYAIFFSSVRRNLEINIPETILSIKSAKNFYPPHLLASIREKARLYKLMKENRGKYEPLYKSISLHIKTQIRNIQSRKENKILSGDKNRLFSYLRKYFKPVEDPPVIQYNTLFVSDSTSKAEIFAKIFSENFTVNNYSLDFDTSFSSPTINDVEFNIISVGKVLKTLPNRNNTSPDGITFRLLKNCSLSFTPFVTEIFRLSLDTGKLPTIWKQSIIIPLHKQGEKSNPMNYRPIALTCSLCKIMEKFIVWAISDFLLKNNLFSEHQFGFIKGRSTTTQLISTLENWYDGIYNNKNIDCVYIDFRKAFDVIPHNLLLYKVHRIGIRGKILNWISDFLSNRTFRVRVDNTLSSEYKMSSGVPQGSVLGPLLFLIYINDLPELIPKQISIKLYADDVKLYSVHKTKNDRIAMHHALNILSDWSKKWYIKISINKTFIIYFGKNNPREQYKINDNAICEVETIRDLGILIDNKFTFSEHISKITRNAYYRMRLLFRVIKSKKISVWKNIYVSYIRPLLEYSPESWNPQLKSHIIKIEKCQKYFTRIAFRKCCLPYIPYDQQLQFFKLATLEKRRKIFDLLTTYKILHGFTHLDPNSLFKRTNLNTRNKSFFRLNVKLQSKKSSKSFVNRSVKAWNALDKTLMSSSLNTFKKLLELTLDSESANV

SEQ ID NO: 140061 - protein, 72 aa, Heterodera glycines
MSRGQMDKNKGAQSNNKVISSRDSDQMEEKGKKGKVIKWKKRESDQMEEKGKGSNGRKGKVIKWKKKTRKGK

SEQ ID NO: 140062 - protein, 122 aa, Heterodera glycines
MERENLDSSGSDFRGKPIGKSTKLLQYPKDRKSLRLIPEGMGISNFVCAKSTVSKKSAWPKIMQDCAEDALGNAPIEESAANYQAASVRVKKAIDLRGPAKYVPSFRQFLKNCCVVYQQQQI

SEQ ID NO: 140063 - protein, 16 aa, Heterodera glycines
EAIPEGFGLPINLGAS

SEQ ID NO: 140064 - protein, 60 aa, Heterodera glycines
MFAPKFLLALLVCVAFAIGTKHGKTARKMAKNNVAKDELEQHKIYTNPWKGVNKKLIPIS

SEQ ID NO: 140065 - protein, 88 aa, Heterodera glycines
MLFWASLAITKPQKAPVAPAIQTPQTNVPTLAKENGPEPKEASEDTSKSSQVDKTITENENPNPLSNIDKFLLQLESFRKQFPQCFDK

SEQ ID NO: 140066 - protein, 56 aa, Heterodera glycines
MSKAMKCLLMKSERTFSQLSQIYSAKRTSLSADHSKNGNSIIILTIKFVKYFNFLD

SEQ ID NO: 140067 - protein, 108 aa, Heterodera glycines
MFSEFEVNYLRNLANQIAQNAYVAKPLTVQTNIHNLTITLAIFRKIIAELETNPNVFILDSLKSDKEIATNFLHLCVSLLDAKFEHFQNQVLARLNEFDRIRKGILDG

SEQ ID NO: 140068 - protein, 339 aa, Heterodera glycines
MDEEKRKQRQKRKKKFLGTLSYKLEYDFDKSNLTVLTVGIVSAESLPAMDLGGTSDPYVKLFLLPDKKKKFQTRDKKKKFQTRVQRKSLNPVFNESFVQRKSLNPVFNESFQFKVPFNEINSQTLVLNVFVPFNEINSQTLVLNVFDFDRFGKHDQIGQISIPLGKIDLDFDRFGKHDQIGQISIPLGKIDLATTIEKTAPIEAPPENRLGDVCLALRYVPNKNKLTVVVMECKNLKKMPYVKIYLMAQNKRLEKKKTTIKMKTLNPYYNESFSFEVSPEKMQRRVHLHVIVSDYDRVGSNERIGHVRKGGKATMVETSEFTRDRDLTLEKSNLLFLSE

SEQ ID NO: 140069 - protein, 119 aa, Heterodera glycines
MFLSNLLAFYSSVFPFLRMFYMFNILPDDFWRDALLCREFGGHVRQNHEPRGDVRVPGGHRHQRRGKGPDLAADLCPRDTARQKWAGRLPGPSVLRRHRLGEHPKRSRLVEAPLLFLTP

SEQ ID NO: 140070 - protein, 89 aa, Heterodera glycines
MVVTSALDDLQRKARLLENEIDAQLISLNKFNPSDALSSYSYNSNQTKGQGKRAVFDSLTTDIENKLSKLSEINDARRINGHRIGVIGE

SEQ ID NO: 140071 - protein, 15 aa, Heterodera glycines
MRIHARFSGNKLNMA

SEQ ID NO: 140072 - protein, 36 aa, Heterodera glycines
MTFIFSHNVFYVTFYAKNFDFLFEFAFKVLIGSKWM

SEQ ID NO: 140073 - protein, 36 aa, Heterodera glycines
KCMREKNEHTFPISISLLTFVVKCHQLILIKIIWWY

SEQ ID NO: 140074 - protein, 265 aa, Heterodera glycines
FLSRDKRHLNKNLFKDPSGIFDLIEVVGNGTYGQVYKGRHLKTQALAAIKGRHLKTQALAAIKIMNINEDEEEEIKAEINMLKKYSHHPNIATYYGAFIKKLPSSTGKHDQLWLVMEFCGSGMEFCGSGSVTDLIKSFKGGYLKEEWIAYICKEILSGLSHLHKNNGLSHLHKNNVIHRDIKGQVIHRDIKGQNVLLTDTAEVKLVDFGVSAQLDRTVGKRNTFIGTPYWMAPEVIACDENPESTYDSRSDLRVETSHLQLAIFH

SEQ ID NO: 140075 - protein, 133 aa, Heterodera glycines
MATLCAKEPNWLDETHQCRRRLSILVSDGEMKASEMTECRAKKAGSTNAEDLADNEEKPTHTELIPLYSSEQQNNSGKMDSGIFEWTGSDGENGGATTADREENNEKEDTDSNCENHADDSTTRSRKRFAAIT

SEQ ID NO: 140076 - protein, 58 aa, Heterodera glycines
MPKAAKSNAVLNRHWISKFPEGTYSTDGKINPGLYKLIDIAKILIGGFLAHKNPSPIY

SEQ ID NO: 140077 - protein, 40 aa, Heterodera glycines
MLMKDANGKQKEIHKDEENLPLILLYCLANGKRLDLYVCN

SEQ ID NO: 140078 - protein, 873 aa, Heterodera glycines
NQFCSHCKDFIWGLNKQGFQCQVCTLVVHKRCHEFVSFACPGADKGVDSDDPRQQHDPRQQHRWEATTYSSPTFCDHCGSLLATTYSSPTFCDHCGSLLYGLIHQGMKCQCCYTSVHHRCVHHRCVKYVPNMCGMDHTEKRGRIDLGTFIQVKYRGKEIQARNLIPMDPNGLSDPYVKLKLIPFEDEQGKAKQKTRTIKATLNPIWDEHFQFKLEPSDKDRRLSVEVKLEPSDKDRRLSVEVWDWDRTSRNDFMGSLSFGISELIKEPMNGWFKLLNDEEGEYYNIPIPPEDEKDIERLQKKMADLHGQRKGALGEEGRAKSVTKQRQSATALENRVQRHKEVVKAADFNFITVLGKGSFGKVLLGEHKHLKELFAIKILKKDVIIQDDDVECTMVEKRVLALPKDVIIQDDDVECTMVEKRVLALPDKPPFLLALHSCFQTMDRLDRLYFVMEFVNGGDLMYQIQQVGKFKEPVAVFYSAEIACGLFYLHSKGIIYRDLKLDNVMLERDGHIKITDFGMCKEGIQGDTTTKTFCGTPDYIAPEIILYQPIILYQPYGKSVDWWAYGVLLFEMLAGQPPFDGEDEDELFTAITEHNVQPPFDGEDEDELFTAITEHNVSYPSYPKSMSKESVLICKGFLSKAPSKRLGCSADGERQVKPSKEHCPSKEHCFFRRIDWHKIETRQVQPPFKPKISNKFATENSNKFATENFDPLFLRLPLKLTPPEWDILEGMKGDEFILFDHFNSQYFADISLHCTFKVKFIRHNSKMSFAVLIAASFFVICAFLVLIFGIGVVFSSLCSMFAFLFCVFQRSADDTSNFDSEFTGEAPKLTPVDRLFLMNLDQNEFEGFTFVNAEFNEFEGFTFVNAEFTPQG

SEQ ID NO: 140079 - protein, 149 aa, Heterodera glycines
MLELLNQLDGFQPNDDIKVEWWSKPINSHSFCFHLTQVIAATNRVDVLDPALLRSGRFDRKIEFPAPNEKGREQILRIHSRRMNVDKNVNFVELSRCIEDFNGAQCRAVCVEAGMVALRRDSTKILHEDFMDGILEVQGLKKNNLVYYG

SEQ ID NO: 140080 - protein, 124 aa, Heterodera glycines
MQYNAFKPRREAGQFQNFVPHFTVESPSTLLDNYVSMSTVAFGQLWNGKMGISDGLLIILYNAFKPRREAGQFQNFVPHFTVESPSTLLDNYVSMSTVAFGQLWNGKMGISDGVRSFLKIPLFV

SEQ ID NO: 140081 - protein, 76 aa, Heterodera glycines; identical to SEQ ID NO: 128275

SEQ ID NO: 140082 - protein, 16 aa, Heterodera glycines
SPLFIRRITGEIDGIM

SEQ ID NO: 140083 - protein, 221 aa, Heterodera glycines
MMVMPTPLMEELYELLLTTETTVIEALKPGTSMSAAYEAGIRHFRSKKPDFLQYLVKNFGFVTGIEFRESQFLINDRCAHKVHPNMAFVVAVGLQNFPNQSTENGKKMMSIFLSDTILICEDGPNDVLTMVAKSRLRSNAIRFREDEQQQQHHQQQQKANRDTQEMANGGRNKRSVVLQEQTRHKQTNEEKRKERQRELAEQLNREARERLSIKSGGVEAQ

SEQ ID NO: 140084 - protein, 30 aa, Heterodera glycines
VAFQNFAQHFLVNLQKSLRFDQSVGIFVNV

SEQ ID NO: 140085 - protein, 120 aa, Heterodera glycines
MSSRASDAIQELRRMDRAGRGNFRLRYSPMAAVELTLLGQRLEDRARRHRMAIGAIASTSTSNGANGAGGSAEGDAANNENDNVPADQNAHGGNASGDGNVPSFGATIERTWRDLVDVAA

SEQ ID NO: 140086 - protein, 56 aa, Heterodera glycines
MHWPRKCRKLRPNWKNKLKMASILAMCLLFAAVTLATSNGSEEIIADANNGDLAMT

SEQ ID NO: 140087 - protein, 52 aa, Heterodera glycines
MPFFVTGGGNLALMTMLTSNRWKKKSKMECAKPKLCCPPNWKTKLKMASIFI

SEQ ID NO: 140088 - protein, 24 aa, Heterodera glycines
MEKACKIWRDYIDFSALELLELAS

SEQ ID NO: 140089 - protein, 70 aa, Heterodera glycines
LFEYPKRTLEKIDFFVFGVVPLNRCAHIYGETESFGNSFPIACTLILRWIFARHNCLSTLYGHLKKSIFL

SEQ ID NO: 140090 - protein, 93 aa, Heterodera glycines
MPTMNTKVYEQNHALCFSTEPVKQCPRGTTTNGGEEADQQLSGEKPKRVHFVCMDRAESEARRLMRQLRRGQRSVKVSSAQGESFSEMMDEPQ

SEQ ID NO: 140091 - protein, 424 aa, Heterodera glycines
MLFLFPLPLILLLLVAIVLVSQCCGGCVKKKGGSKTDKPTEQGEGPAPEGGSKEQPTDKGATAATGDSKTKTRPGPTPCQEGGTTSKGDSKTDKPKAQEEGTSKGGSINTKNAPNAQVGPTASRRPKQTSGGSQMDKLKAQEEGTSKGGSSSTKNAPNAMVSTNAPSIAKGGGTTSKGDSKTDKPKDKKEATSKGGSSSTKNAPNAMVTTNAPSIAKGGGTTSKGDSKTDKPKAQEEGTSKGGSINTKNAPNAQVGPTASRRPKQTSGGSQMDKLKAQEEGTSKGGSSSTKNAPNAMVSTNAPSIAKGGGTTSKGDSKTDKPKDKKEATSKGGSSTTNNAPNAMVDEATSKMRQSINNLTNSQVSTNAPSIAKGGGTTSKGDSKTDKLKAQEEGTSKGGSSSTKNAPNAMVDEATSKGGRASIT

SEQ ID NO: 140092 - protein, 28 aa, Heterodera glycines
VFLDSNRQNDFDTHSLLIRLYILFQIKE

SEQ ID NO: 140093 - protein, 56 aa, Heterodera glycines
MCLNRVVLGPEITRRPAAMPFWADLAQGNNDNRDGANWRGSAAFRTLAKGGGVEPI

SEQ ID NO: 140094 - protein, 218 aa, Heterodera glycines
MSSLLLSIFSMVFLVCCHAMPKFPCCPGSQQVVAVMSKYIDTFSAADVDKSTVCSTAKNTVDGIKSDLFSRGGCPSGGEAQIVGEIDRQLKNIAKMEINYEDECPYNLGFARAMFDLAAAAAGHAGTDTKWQNMKGQFEQESQAIKAIGQELNITVTDVHVGHPSKGKQKNLSKYLFKMISKDFPRIKMCQVQAMWLPTLAKRVRLAMERMANRCHLI

SEQ ID NO: 140095 - protein, 40 aa, Heterodera glycines
MTFFVHFFHFLRKCRKIAICEIPIQIRFCQNWLPPSVFVL

SEQ ID NO: 140096 - protein, 439 aa, Heterodera glycines
MFYNSTKKCQVVPTIGENVRPIAFNELHANANAFPFGHRSANVAKMAQMGKTIMAPFAPFSEHSKRKLSTNSAAAAEEANGTKAGTAIDPREYPQAPRRNVADNYHGIEVPDPYRALENPDANVTRQFVSQLNQISQPFLEASPLRQKMNQTLTNMWNYAEFFKPSFHGDLFYYYRNSGLQSQSVLYQSNSMDEPGKVFLDPNTLSKDGTTAVTMESFSKDGTVFAYGISEKGSDAATVKFKQSNGDELPDQIADVRFSGLSWLSDGTGLFYSVMARYGQVSSDGRFLFVSFGGNANDQMFYCDLPADNNRITGPLKMKPLFDQFDADYEVSKKSIKTQNSTMVNSIFELINHLINLTYKWTDGGLRRTLGTDFHQQRCANVQIDQSESRGQHDTEAARGHKGGPKAKNAICLPREQRQTVGLLHGQCEGANDQGTIIK

SEQ ID NO: 140097 - protein, 33 aa, Heterodera glycines
RDEPKRGGGGSQFGEFGAAGLDGNETAPFEPEQ

SEQ ID NO: 140098 - protein, 38 aa, Heterodera glycines
IFFSETALKRTKFYLQVILGTQMLSLSKREMNKKSKNF

SEQ ID NO: 140099 - protein, 150 aa, Heterodera glycines
MILKLKAPILLYCFVQCLSVYLKIDGKAEGVVRADIGKKDAKSVFTVEGAEFILNFNVTQVGFWQLVGATVERIEVKGSSDFLNKNLNVDKKWTLEPSVVPSTNINGFKDYSFACGQTNPIVWALKDSNDYAVGITLNNVQVERKKDHQL

SEQ ID NO: 140100 - protein, 318 aa, Heterodera glycines
PGSSNNGFWPRPVNNALPLGTNRQQLTASSFANSAQVRPSTAAKTSNVPFNASVGSIDTSVGSTAPGLVIQEDYSMDEAESDNDARLHTDSAKTDPMLKTAFASGHQNGIPEQPPLDLLEPDNEPLSLHQVKLSNMDRRAFDSAPNKEFTPHELELRPHLSFLERYREDPNSNSCIRLENVPKMVYAEQLAEFLGVQFDAPYENIARMQNGVLYINLPNEAMATKAAIRNMNILNGHQIAITQLKRAEMADAIRQNMIIIREMYRVSVVARGFPLVTQLNEVVALFERFNLNKDGAEKCTVKPSDTVSTFLLTFASSQ

SEQ ID NO: 140101 - protein, 637 aa, Heterodera glycines
MEQVIADAQALAGAAKQQSAPSGAVQHLGQQQTAGVKFTADDKSAKLADQSAKDGAQWKFQSEVALPAVSSSPSISTAFAPQQTIAPLYQQLFGGDSWKNPQLQLPQNVPSQQLAASGQGSHSQLLFHEQAAPPVSQSAPVPVFPGSTQPSFGGVPPSSLGRLLGSPSKTQQQLPNIPQQPPGFPPPLNVPSQPLQAAGVAQQSQPRPSNPSYAGDGFFNQQPAAGYHNQRFQTPNQPIQVYNQQQNRPTGQAPSHHQAQFGMPNQGPIAGQYRPSRPPFGRRGGAHGGAVQQQFGGPTHGVGGFPNAYSESKPMGGAHYQQQQHFQPRQTHYQQRFEGGINGPKRKRSRSPSGPMDPRKRFYQGPSAHGNEFKPSAQFSPNSAAFQSEPLVKERVCVQLSNVPYKATFFDVKQYLSTTNAECVKVTRVYQPDRNYSDRWIVEFDNERDARSVIRYHGEINNRTIRTERITARKADEQYAVMEPDDKDRGDKRSSDDPNSRRERGRGERADRDRPRERERDRGTNRSRSPRGRNGRGRSNDQSRSEKGAATSSTSSSTAAATTTVWAKEERTKPSDEKKEEETDRDKQAKEQQQRQRPAQQQQPPAADSANPMGPLNLVSNAAVFGAFSFPENHANN

SEQ ID NO: 140102 - protein, 128 aa, Heterodera glycines
MNVFRSALLNAGFRCSISHCNPRAVKTDAPTSFLWDVCREWAKRNGITAKGMAEAGEDSPRSRILAKETKCEINFSTHPGCRTKRPFQANDNKPKHLLPLDNGKQMTKFEETKSKLEAEFEKLRNLEK

SEQ ID NO: 140103 - protein, 116 aa, Heterodera glycines
MTCAYAKLLGPCFKTGRTDDRLLHRERTTESPSWTELVAGTCRTRPPPTPSSSQHGPETIAQFTQSKQHSPDPGTRPRKAGLNTELTQLLRASQRTPPANAPFATEQKDSKPQSGG

SEQ ID NO: 140104 - protein, 18 aa, Heterodera glycines
YREAIPEGFGLPINLGAS

SEQ ID NO: 140105 - protein, 224 aa, Heterodera glycines
PKKMPDLCGMIMRFRLKKYVLIGDIEKAFLQVGLDTSDRDTTRYLWIKKETINELNLTKRDVEMKDIEIRRFKRLPFGVNASPFLLAAVIELHLSKIEPMYENFKNLNTHDTDLNLSDKKDKFEKLCRELAENAYVDDFVMMCEDHNEIKFKHFWIKEIFKIASMNLREFISNHEESNNEIQKIEGSEIPKLSKLLGIKWNVENDELTIPINIPIIAKGTTKRN

SEQ ID NO: 140106 - protein, 316 aa, Heterodera glycines
VRLCFAQQFVFANSLLKLISSVCYAQLAPPTTRNFRCFSNGCCDQHEWCRFWASIGECLSNADWMAINCQLACSTCSRANSASAPPTRPPPPPAPAATRPFITEVITTATMASVTARTSAETIAGSCEEISRNPSTAATQLAKSGLLNPIESRQSLSLDDITRAVSSGCVPEVCAVARDDCSRSLCYHLSFRTMDGMCNNLNKPLMGASFRPYLRHLPAEYSNGFSEPVHLAGVGKPNAREASVHLAGVGKPNAREASRLILASAQVVSHDQLNSLLMQWGQFISHDMARTVSDCPPSSPPLSDHFFRRFPLNDRF

SEQ ID NO: 140107 - protein, 65 aa, Heterodera glycines
MALGGWKRKRARLRSLQNLNRLFVRPALTKEQLKEEYEARNQFSKSDSLHHFLLYFFTCPVDIAI

SEQ ID NO: 140108 - protein, 50 aa, Heterodera glycines
PGLKCPAEAKNFFYFREKIEIFPKKIPVDRARKTMFWKWSPFFWENSLKI

SEQ ID NO: 140109 - protein, 133 aa, Heterodera glycines
MNSTVWHTLTGFVMYLGKSGKCKIDENEKGWHIQYIDQEEELRRQKLQQRAKQEKDDEERMHEQLQRQIERQAEGGGWIAKEKQGTEDGDEVAKEPQELIRNDDTKIAFSVGMKKPMITDIKPTTTAFFKIGG

SEQ ID NO: 140110 - protein, 18 aa, Heterodera glycines
YREAIPEGFGLPINLGAS

SEQ ID NO: 140111 - protein, 76 aa, Heterodera glycines
MTNKCETTEKGQLSAEERMAKRLTRKEAWNFEKKPGTGPGFMNRTRTGFRIKKSYFNRTPDHFTFSKKNTGPGLPD

SEQ ID NO: 140112 - protein, 36 aa, Heterodera glycines
MGIENVAANLIGGDKLQWTAEEKEQIDQIWHFIGRH

SEQ ID NO: 140113 - protein, 176 aa, Heterodera glycines
VVAVFQEANLDPAYLFSQLDPGARKQNIARSKPQNQLQISQPLRVLVFRFRNGECFLLVVTDIAARGVDIPLLDFAVNFHFPPKAKLFVHRVADSVLIGAFPDTMAHLETEFLRSIEQNSIEIRKAENAMAKYQRTRQQPSAESVRRVKAEFRHISPGPHPFFADPVLFPDLALEQ

SEQ ID NO: 140114 - protein, 125 aa, Heterodera glycines
MKIALGKEERRKRKRGKGKIRSKKRKRRKRMKIALGKEERRKRKRGKGKIRSKKEGRKRRKRMKIALGKEEKEREREKGKIRSKKEEEKEEEKDENSIGEGGETEEKERKRKNSKQGGGERRGKG

SEQ ID NO: 140115 - protein, 117 aa, Heterodera glycines
MTGIERTFDALYVPFSPYLFAACFLPAESPCLPRVIESLRLFSSILTNWFQSIHLVGCPLRLVTILMGQIQQFLLAKHCPNGCTLREKMANPSNCIAKITTNKRTLIGSTISRSYLA

SEQ ID NO: 140116 - protein, 236 aa, Heterodera glycines
MLLKSPPPSMHALRTSRRRSADLNAYISPSGERTVSSSSLLNRTFLTHLILLICIFTGSPVWADLAATIRNPSVCPIRPLSKAISLDRSVEHTKRSTSIDVNANECEKKREDKDKKLTDPMLRSRQSAFTGQKGKPRRFCGRKKCASENELIDGGDQLQSSANFYLSHHSTTSSSVSPSSFCPSKDSHNSSGIEGPSSADSESFNAKTKQSADRATENVGQSRGNVKFDDTIMKGN

SEQ ID NO: 140117 - protein, 165 aa, Heterodera glycines
MTSRECIVEVKVAYLQFLLHCYIDTDIELKDASNGEYLDAILEDAIADMGKLSTRLRQMDYQPKFGPEIVALERYVCQTVTEVLVRVFEPASYGHSAHIDIRVGHLDNGTPKRGAFAHLAAAKTLFDHNAAAERVAERRAEGATPLELLQELVPYCGMCEKTDEI

SEQ ID NO: 140118 - protein, 113 aa, Heterodera glycines
MEKIVYFKLMQIVLTFAFIWQLMSLHEFCGTFADPKACIHDISVGHCKRFAFIGKDSKSGEFGVVFDHHKWHDQLSMSSTNGRSFEEQQHQFMDELATKLPPAGRLCIPITVN

SEQ ID NO: 140119 - protein, 84 aa, Heterodera glycines
MSAHPTACGPLASSGNTLPTGGGGGGEVVPFGGVGGGEVVPFGGVGGGEVVPFNGGDGDGVVLDGNNPITNIDMKNLNGINYFR

SEQ ID NO: 140120 - protein, 312 aa, Heterodera glycines
MAIILNGEFHRRISSMQAGTTQIPGFGQLYILDPVEAMEQRRKNPTFTGEKITNEEEFVQGHQLSDETLEVLEQMIQENHPAASAYKQAREQLQELLKQQRTEELRFFRMTLLDERSAPGAMKDPKLHPHQIITPSTGEGMFAIHADLNGAPAPKGIWVENKQGQLNEIAPLSPWTDSLTYPLIKPKGDDGYKIGIPYAKPAQRKRKSDMSDDMFDNQAMSDDDICDTESIASSGSEASMQSVTSRYDKSKRFVSLRDYCKYHLAIRDENLEWQYHHILSCGGGLGQRWVLDQASKMTGKLPLFCAVQTWTG

SEQ ID NO: 140121 - protein, 226 aa, Heterodera glycines
MYVNPKNILFLLQKYFEKYNEETPLNGSEIAIAKNFASEIERCLKNNEELDFMEELVFDQNAEYVKIEGQLSDSDFDYNSEEEIDQINSSFGSENSSGSSFFTSPVKKVPRDDFASFSDKKKALQFYRSADKGHRSLSCMKSTYKAKNIYAVANTSHIMTKQLMVEWVDKVLCPALRPNQKSLLIVDSWTGWNNFHPKNGIELAVKQIPKHGTGICQPLDVYVFRH

SEQ ID NO: 140122 - protein, 581 aa, Heterodera glycines
KTVRGAQQIDDDFDDDWSEEDEEASMSSQKQAASVGAAKMKNINRSRVTVGSGGGGGDSMDRITARFSNFVKSGMESYILATTKFSGQPGESHEIILVGSSLKWKCADDYGYTCMVTKPKKESKLKGLKSFIAYSLTCSLTGIQVARRYKGLKSFIAYSLTCSLTGIQVARRYKHFDWLHEQLSAKYLPIPIPPLPEKQVAGLYEDDLIQHRRSVLQLLYEDDLIQHRRSVLQLWVNKICRHPVLSQSGVWRHFISGVWRHFISCTDENQWKKGKRLAEKDEYVGGNFNQWKKGKRLAEKDEYVGGNFFNCITAPTEQLNLQDFEQQIENFARSEQQIENFARSSRSLEESCKILYERITEAQKRLIGPHKSNWQKLAQSFELVGQSHKSNWQKLAQSFELVGQSLDMDQTLANNPVKSAIKVSANNLHTLANNPVKSAIKVSANNLHRIGSQHEDHGKKDLEQLLEFLYVSKGVYASIPDTVNIFKMHENKRLQKEGKISDGDVMLFVGRVDVCAYAMLAETHQQEERLAETHQQEERDLDLAIAFGSFFSQQSAFYHNQQSAFYHNIGNQFSQLAELFK

SEQ ID NO: 140123 - protein, 150 aa, Heterodera glycines
MGLLDQQLALRWINDNIAQFGGNPNKVTLFGESAGGASAAAHLFAPDSHRLFRSLIAKSGAIVNNWATKPKVAIRDISMRLAHRLNCSMSTMVDWKRRRRHRHRPRRQRHDRRRRSGPSPDNNSDDEEGTVAVANQVIACMSRVPAQIIQ

SEQ ID NO: 140124 - protein, 27 aa, Heterodera glycines
LAIHIYAKNGTIGIIPNQKICKKFVLR

SEQ ID NO: 140125 - protein, 165 aa, Heterodera glycines
MGVHFVVDFVVLSLPSIPKLNFGAQNLRPILKVLENKLQNLIYETNLIEEYDPKKRAHLKWKLEEELFLDDTDEDKVQRILNQIDKMNNEDASKKYHELNNVSNETKRMNQIKVERHSYELKILEFLLPKEELSRLNHLLDETVMIGGTLTKFRAVYAILELWAK

SEQ ID NO: 140126 - protein, 40 aa, Heterodera glycines
  unsure (1)..(40): unsure at all Xaa locations
NKXKRKKINLFFLINKKHCQRQCLPKKDKNFSKKAKKMKI

SEQ ID NO: 140127 - protein, 53 aa, Heterodera glycines; identical to SEQ ID NO: 126996

SEQ ID NO: 140128 - protein, 44 aa, Heterodera glycines
MVAAKKFLRILPIQTESYRLLEDEQIYLFGLLSIAKEFILFANI

SEQ ID NO: 140129 - protein, 87 aa, Heterodera glycines
MSADYAKRVIENEQLKNDLTNGRTDGQQRNKPKRQQKENGNGNVIKHHFEINGEYAIDPLVLGQFPPKYVQGSNNTYPHNSMSNEKS

SEQ ID NO: 140130 - protein, 25 aa, Heterodera glycines
MNFYIIFFLVIFSTFFCQLLIVGAT

SEQ ID NO: 140131 - protein, 29 aa, Heterodera glycines
GIRFSNEEKMNKMNIYSKMKNEKPSLSYK

SEQ ID NO: 140132 - protein, 247 aa, Heterodera glycines
MALVRFDEAKSNRGKILLSRLGFEYSFENFSRLEEGWEYWKCPRRPPYCPGRASVQIPWLVDENGSRYKMGRITAEHNHGAIFGQLAVGDVGLDVLPVENIVLPDALLNRVICNEIFNGHRMIVFCSASALEILRQYNTECAIDAIRDSVGNNWAPQRLMSDFESAAINSTRIVFANSTQSGCLFHFGQAIYCRIQRLPNLHTQYLQNVELQRNIRSLQALAFVPVDLVYNYFCILVSTLHPTAELQ

SEQ ID NO: 140133 - protein, 97 aa, Heterodera glycines
TTSPVSTAGAGDSLPNGTTTTAATAGDVTPKTGGGGDEDEKMEEDYVGGAAAGGATAGSVPPKKTSTGAAATGSATAAGAKPTAAAEQRIILFTVVW

SEQ ID NO: 140134 - protein, 46 aa, Heterodera glycines
MFEQGIALEVIERTLNVPTVELKCRFARLWMGILCNTYFSWIPQML

SEQ ID NO: 140135 - protein, 92 aa, Heterodera glycines
MFVVKQTRNGHERGGTEQQNVQHNKKVGDEQTTKAGQNATMDVNLSGKTNGLRPYEYSNSSMLILVRYGKATVMKKRYDKEGGEKEGGGGVS

SEQ ID NO: 140136 - protein, 37 aa, Heterodera glycines
MDGAALLPASDNPVLKKKSSSLNPILDIDAIVEAPKT

SEQ ID NO: 140137 - protein, 93 aa, Heterodera glycines
MDWIGRMNHLQFKGSINRSKRTLVENALKSESWAYKAFKPTRPFDEAAERGKRELLEKYTEEYNALQEELRQAEEQQRNGGMPKRRKRERLSR

SEQ ID NO: 140138 - protein, 48 aa, Heterodera glycines
MEKKILIKLILGLAGSGYPTGSRPGYPVFSIPGPGLGFLKIQYPVPDP

SEQ ID NO: 140139 - protein, 76 aa, Heterodera glycines
MSKGETSKNSKKEVKREKEKAHKKKYERAPSPSPSAVKTRQKAEVELNEYLRDQKIKSRANPSLYWETNSQMAIDW

SEQ ID NO: 140140 - protein, 31 aa, Heterodera glycines
MYGTSLENAIASDCSGAYKDGLVAIVKGYYH

SEQ ID NO: 140141 - protein, 86 aa, Heterodera glycines
MFKPTIKLCAKTRKYSKIGLQPRRRGWKIRGSGLSGLEVSGFGVGVAKSFGKKTSNGIELTTESNVNGTNLYTTFQMSEIEQIFFI

SEQ ID NO: 140142 - protein, 153 aa, Heterodera glycines
MVDSPTPTRRWLTRRRRLADGRLADADSPMVDSPTPTRRWLTRRRRLADGRLADANSPMVDSPTPTRRWSTRRRQLADAHLLGRYNTDANFALHSRMITAIAFIPEEDIIRSLQELEDHTLDHYPELATIFEWFTNTYVGRGTRAPPKFSYDM

SEQ ID NO: 140143 - protein, 119 aa, Heterodera glycines
MRIFIVKITSAAKCVELFGVCNNYRVDYRSFDAQPILGLEPHFHTVMELAIGTAQFSHFLLEISNGVTLLELNGQLGLVKNNVNNFRVTLLTFSKNLVTPSPTRTALGQKRAKLFGSNT

SEQ ID NO: 140144 - protein, 46 aa, Heterodera glycines
MPTCPLIRHWVRGNVVELIERRIPSTKKGVEREKSRTNLKETDGMD

SEQ ID NO: 140145 - protein, 286 aa, Heterodera glycines
MSSPILDIIHGLVNRIEVELNREIPINPGQNATPNTIQRHLYRAKNACDELSEILEEIQGKRVEMAESLQKIAVAARENKERVYVDFCTQLDIEAKINRAVIKKNEWQNKKEQLEDIFDINPQNSLNSTILTPRNQPIKRVKILQIQLKNLMEGEAKELIEGIPISEDGYQIAIDLLLEKYGKSTKLIRALNQEINLFPQSDTVEEDEKLYIKFEKICRQLSSLNQDMDLSPHYLSLEGKLSPLVLDKYFVIKDAEDNQNWNTTKFRNALSRAIEQIKNRQEVRQK

SEQ ID NO: 140146 - protein, 1415 aa, Heterodera glycines
MDPNQLKLILEAVLKASAGQVNNSAALATSIDARLSTFDYDPELGHTYDVWLKRYGQTIAQDGQALSDQSKVQLLIGKLGEVEYKRYIDSIAPKSQNDFNWDETTAKLKHLFGETRSLFLRRFDCFQIRQDAHQDVQSLIALINSSCENADLSLSKEELKCMILIIALRDEFTDLRQKCLQRLEDSRTSGRSTSLQELGEECRKYQIIKESALSLGSNPCSTSAIRAKPQQIKDKQKPKTKPQQSHKGQNFLPKNSTAPKGKVDQRDQPCYSCGGKSHWQKDCWFKNSTCEKCGRNGHIAKACKSGTEIRRVRAVATDSVKDTHIHTVSIKPKCMAIEGSSNKWWEVIIQINGMDHPMNVDTAAQITVIKTDSWQKLGKPKLGKTAITVRNCNEKAFSIEGKFKCQVSYKGRTASLIAYVSDEIHQDLLGMPWIEELEIIPKELMFPNSSQIVNSLPTKPISSQISDEKSLISALQTNYANTFGPELGHCTKFRAHLILKKEAKPVYCKARPVPHGALDEVNAEIDRLSKIGAIKPIEFSHWAAPILAVKKKSGKTRVCIDFSTGLNDAIELHRHPLPRPEDIYNAVGGAKFFSRLDLRDAYLQLELSEASKNLCVLNTHRGLFQCQRLPFGVKSAPAIFQGLMDKIIAGIPGAFVYLDDVVIANKSLTDHTSTIFAVFDKISEYGLRIQLEKCSFLQKETLFLGHIISENGIRPDPSRAEAIEKMPAPTDKSTLRSFLGALTYYGKFIKPMRELRGPLDELLKKEAKWEWGVEQQKSFEKAKEIMLSDLLLTHFDPELPIVVAADASKDGIGATISHIFPDKSERVIEHASCTFNAAQHNYSQIEKEALGLVFAVQKFHRMLYGRKFTLLTDHKPLLAIFGSKKGIPIYAASRLQRWALILSNYEFDIKYVNTNSFGNADVLSRLIANYPRPNEDILIANICEKTECYVNFVFQAKVEQLPITAKEIADQTKTDEVLQQISKFTNKGWPQKCTDTDLMPFYPKRDQITEIDGCLTYGDRVIIPTTLRRQILKSLHFAHPGIVRMKAIAKNHVYWPGINSEIERTVRQCDDCQMAAKNPTKAQIQPWKAADEVFERIHLDFAGPCEDGQTYLVVVDAYSNWPEVWEMSRATSEKTVAMLKSFVHRMGIPREIVSDNGTQFRSAEFANFCKEFDIRHTFTPPYHPMSNGAAERFVDIFKRAMKKCRKEGKDWIPKALLAYRTTPSAVLDGHSPDELFLGRRMRTKISLVHPTNQKMPKVDLKNFGNFQQNYRQKMKRQFNDKNGAKPIIFQNGEPVFIWNLKGNKANWLPATIIERVGNSPTYRVDVQTLRRAVHRHANQIRRRFPMEMETSQIGQANGNILAGNQPNRTPIKEIEKAKSPIGQNQNAPRRSARAKRAPQQLNMDPSKRKYDVFRP

SEQ ID NO: 140147 - protein, 212 aa, Heterodera glycines
LSKPNLSPPGSPKVFEKICSKCDLIKCPNGKVCGYFVGIAKLGKGPFEKNEYPKCVSDPSELNVTTPNDGNAHIEVDGPGCKSVECAEGFQCQCKSVECAEGFQCQVRITIDKHGDRPYAQIIGGFPQCVNASGSFQEPNYFIVGGPGCDQLPSPCPSGTKCVTIVGICDQLPSPCPSGTKCVTIVGIAKYGKYPWAQFFEPVCTFFEPVCT

SEQ ID NO: 140148 - protein, 67 aa, Heterodera glycines
MSVSPVISRMLSVEMKEKQQRMITLDELGVDMDQFMEFLEAITYLNGPFMPNPTNVLMLLKLADYFQ

SEQ ID NO: 140149 - protein, 70 aa, Heterodera glycines
CNLAIHRSLKTGASRPFFNFLGDIRPLRSLRTGASRPFLIFWGIFGRFAASGWALRARFLIFWGTFGRFA

SEQ ID NO: 140150 - protein, 97 aa, Heterodera glycines
MMRKFPDIPAEFLTVLLQIREDIGRSEAKNIAEEALNNTRYHPRGDAQVRRLFQLCKSGGSGGRRALPALESTVQNMFATIITTTKSTTVSSNLGFK

SEQ ID NO: 140151 - protein, 24 aa, Heterodera glycines
MEKACKIWRDYIDFSALELLELAS

SEQ ID NO: 140152 - protein, 27 aa, Heterodera glycines
KELKIFKIFIHLPFDRKSIREPYLTFN

SEQ ID NO: 140153 - protein, 31 aa, Heterodera glycines
QPFRAVTEFCSCCTQSWSAARVMVSRRALSN

SEQ ID NO: 140154 - protein, 37 aa, Heterodera glycines
MDNFCTVKENMKQLLQLFPWKTTQIVCGTNLWLAICI

SEQ ID NO: 140155 - protein, 49 aa, Heterodera glycines
MRIMRKAKCEKRNLGPSLGKKGPKKIHIIITFMLIKKPIAPSDQINPSG

SEQ ID NO: 140156 - protein, 72 aa, Heterodera glycines
MSSFRKSMLRCLEMFLCADQGTISDKCLCLEADPCPLAKSKKATISRTNHFKRYSRPKVDSEAGAYNLEKII

SEQ ID NO: 140157 - protein, 126 aa, Heterodera glycines
MKLYFIHILPLICSVHVVLTEVDSTDLLYADYILAPSDFPEEKRESIKRLIFFKYYDNSIDTTIANMTKTVIAVSQLSYNTNASNFVLSKVLQKLNKLNETWKEYQASFNLSEIVGKKVDSLKTVQ

SEQ ID NO: 140158 - protein, 56 aa, Heterodera glycines
MRLNNKQNFMSPFLNKQFMQAGGGLVNDYGGTEGMFSGEDDAYPPAGDDSCIPFLY

SEQ ID NO: 140159 - protein, 152 aa, Heterodera glycines
MAHLSLAQIFGDADAVPKLSPPIQLYDFIAPRAYANWPKVVGQALNKRKQLHEKIDDNEDKEQLQQGERFINIPSIKNIFNKALPYLVKVMPNVAPTLCALKGCPPGMLGQFGGIGGFPGGGGFPGAYPGGGGFPGGFQGKKYPGMAYDPYA

SEQ ID NO: 140160 - protein, 89 aa, Heterodera glycines
MKNYYRNSFIQFWSGFVPVLNRMGGKDVSEDHHLLPSHFDRTTFFGVPRPFGAISNIPFPPPPPPPPPTPFPKELHDKMMAQGAANGWA

SEQ ID NO: 140161 - protein, 24 aa, Heterodera glycines
MEKACKIWRDYIDFSALELLELAS

SEQ ID NO: 140162 - protein, 194 aa, Heterodera glycines
GGPNSVYVDNAPVYDPELLGGRLPLLGICYGFQLINKHFGGSVSLQPRREDGRTQIQVSPKSDLFHSLKPDQFVLLTHGDGVTPETSAKNGFQPIGFSGEFVAAIENTERRIYGLQFHPEADLTDQGIQIIDNFLRRICSLKCHYTLRNREQMCEERIRSAVGEKGEVLVLVSGGVDSTVCAALCTKALGAEKV

SEQ ID NO: 140163 - protein, 219 aa, Heterodera glycines
MTLPSCSKDGAASLSPMSFKEPNACPMLERMHYQRITGRFCDACIFVKDRQFSAHRMVLAAHSPYFDSILRHNKIAKEKIIVNCQDPTVFDRILNYMYSGSVTIDRAIVVELLKLANNLLMIRLKNYCADYLMRYIDVANCLAIRDLASRYNLPRLQKHANEFFDSNINGLFGLLCVKSKSRFRCLLENADVLGWEPIKLVELLEMPRHASNVRADVYL

SEQ ID NO: 140164 - protein, 134 aa, Heterodera glycines
MLNSRFKNRIAYGGLGTIDLFKRTWKDLSEYINVECDGVDITAKIREFKFHCILFHNISFYAGGTVPWGAGDGVQENCGEVFSRPSPCDGKIEVLGFTTATLAALQMGGKGERIAQCSKVRIETSKPIPMQVDG

SEQ ID NO: 140165 - protein, 268 aa, Heterodera glycines
LRTGDHLILADDGYGGTQRYFRDISVPQHGVQLSFVDLTNLNELRKAIRPNTKMVWFESPSNPLLKVVDIAAVMVWFESPSNPLLKVVDIAAVSKIVKAHNSECLVLVDNTFMSPFFFMSPFFQNPLALGADVVLHSLTKYINGHSDVVMGCLITDSERLEAHFLFQQLAVGSVPSSFDVYLVLRVGSVPSSFDVYLVLRGIKTLHLRMRQHHSNAISVARWLETDPRVERLYPELESHPQHEVHKKQTSGMSGMITVYLRTDWKDLE

SEQ ID NO: 140166 - protein, 436 aa, Heterodera glycines
MSDDEDYMSSAFLAKVEDVKPGVGTGREGRRILRINANREEAIERQRVEKPKSKAELERDRLMEGLNDPIRAESKGFQLLAKMGYKEGMRMGRSAADEQQMDSRTKEPILIQLRIDRSGVGMDEHRKEKQRDLCEAHMERMKRQADNEVGRNWKMMGGESIFKGRIGHRFPKTQKGSNGNEATDLGDPKTEKDVPRDGHAVGIARELSETLDLFRMGKTIPDEFWFWPIYSNNNELVDMVEVVDKSNQSMDENKRTKREPSEGAEGQVERYTYGNGEEAPMALNLNELDNRHLEERNHRVLLEAAQHVTRFIGLSPVDNAKKEKWLYAFGIVPMRNLPRGELVSQPQNCSEFPYMEILQDYLRQKAEENERRKAAEGAAVQFFYDMQTVEEDQTDVGEGRKRRRGGGRPTDGQRRPRLDPKACWFCLSNAEAEKHL

SEQ ID NO: 140167 - protein, 171 aa, Heterodera glycines
SLPLLFSAWDGSPGRFLPVIFSHFSLHLQFQFVPIPKTKSKALRSTFLNLARLKNIEFSFLKDEDNLWDLVGEGSPYFYAEFPDGSKMLSRSMAQFPLQFGREVFANKALLDCEEKVDWRNCVFANKALLDCEEKVDWRNCSLGKKEEEKLTIALKEGFKPFAFTGDSSGD

SEQ ID NO: 140168 - protein, 27 aa, Heterodera glycines
MPPPPTAMTLGDEAGGAAVGNGPPPTA

SEQ ID NO: 140169 - protein, 272 aa, Heterodera glycines
SNTGVHHQQQSYPAVGGGPLPTAAPPASSPSVIAVGGGGMLHPGSNAAAAAGMARAPTFNHHTQQQQQMFNNQSAAAFYAAYQHQFFQMAPHNFVNPQAAHLHHQQPPNNPLAAAASAAAAAADAAQQHHQPQHHHQTAEWASSTTAATCSSQSVPATAATGCCPQHGAGGQSVRDLRTVELPFYDQIKVIVPITELPPYPVPIRPGDARASHSFSVPSEDIQKVHYRIEEQPLPRYELQLRMFLLETSEEQQDAFPPGSTVRVDEHGVQLP

SEQ ID NO: 140170 - protein, 52 aa, Heterodera glycines
MKKPSVTIQKEEEKQPAQAKSKSPSPRPAKSPSPNPKECVLISHLSIHDTVS

SEQ ID NO: 140171 - protein, 63 aa, Heterodera glycines
NRNYAQKASQTILALPIPSTIAFIHPIMSAKIIRVPKIACDLSLAKNGVSKIVITLKKLLKQF

SEQ ID NO: 140172 - protein, 180 aa, Heterodera glycines
NSNGFTCAEPMYESLSDTEEVELKVKKVEEAKAKRLEDSQKMLQNEVEKLKKELVELKKKEVSRKRKRLTKTEKVEGNKVPTNVKEVQETEDGEKKDEKELKGIGNERDLKEVNEEEKEKKDKKGKEEAKKKEIVLIDSEEDWKKVSQHEDEVSLGPEEEDDEERKLLIFSLPTNRLIFI

SEQ ID NO: 140173 - protein, 142 aa, Heterodera glycines
MADVQIAAGGGANFRLGRGTIIVPQISCVLFDEKVHPALSFNFIYFRFLLKVFPNARRFLPERFLNQMGQLERFEELIPFGLGKRVCMGESLARMELFLFTANFFRNFTVGPDHTGTGNSRSGPGPVQLYLLNVYKIKGTNL

SEQ ID NO: 140174 - protein, 66 aa, Heterodera glycines
MDEEEGKEVRIGLRGEKGEKWNGRRGGGEGSGRVKMRERNRENEKRGKEKKRGTEKGRGKAKRNGN

SEQ ID NO: 140175 - protein, 50 aa, Heterodera glycines
PKKSIFFQKMIYQKLICKIFKCDSKPILVVFMAFCAYFTFYEEFFSKNNH

SEQ ID NO: 140176 - protein, 54 aa, Heterodera glycines
KSFLQPHIANLISCRLKAIHCLPVSAQQSTNRVFDFLQKIIHYPKVFYNHLLPI

SEQ ID NO: 140177 - protein, 154 aa, Heterodera glycines
MGEIKIMKNNLNKMRRDLYRNFEETKIKILEILKKDGEKMGKLKEENDQKFEVQKATHRKTFENVTKNIEDEAEIGQMKRECSLFFQRFEECHRFTEEKIYELATKNGEIRKNLMQINVGGKALQTVGLQIRLTLFDGIERAMESEQSIWGNEK

SEQ ID NO: 140178 - protein, 92 aa, Heterodera glycines
MSSSTAELNPEDGGHPPQNTAVAIEQSQQAIHPPAQSGSGKIAAWASPNADDTEPYGICAKILIVLSYIITIITFPISVFMCIKIVQQYERA

SEQ ID NO: 140179 - protein, 95 aa, Heterodera glycines
MFEYPKRTLEKIDFFVFGAVPPNRCAQIYGETESFRNSFPIACTLILRWIFAPHKCLSTPNGHLKKSIFLFSGQSPRTDAPRFMGRPNPSGIASL

SEQ ID NO: 140180 - protein, 16 aa, Heterodera glycines
EAIPEGFGLPINLGAS

SEQ ID NO: 140181 - protein, 131 aa, Heterodera glycines
MIFAFNCGLMAMFCAAFDRLFAVALPFKHSVIFTKYKYQYLFSHLFICINYGAFIVYNLLKFAFQNAGKPTTGLVSESFQDYVNDFFTDGIYILSLCSACCYMAIFVIIRCKNGGKNVPILHFCQLKYIYY

SEQ ID NO: 140182 - protein, 126 aa, Heterodera glycines
SKNIAILPRRDSDLEAFSHNPSDGSFAPLVYRPSTTKCLNLRFLSYAGLLLATGLGKTNLSHDGLNPAHVPYWWVNNPTLGEFCFAMIGRADIEIKSDVAMDAWPPQASYPCGNFSDTSCWLYTFK

SEQ ID NO: 140183 - protein, 26 aa, Heterodera glycines
MKHQQQRHQLTNKMPTSMPATTTTTR

SEQ ID NO: 140184 - protein, 224 aa, Heterodera glycines
MNQAGAPLVQHQQFVLVPAFPFHTEHRHQQQQQQQNVQRRQQQPQFLPFTPTQQPQQNIAYQRHQFVQQPQDHDYQHLDHHQQQQQQLQQFQNAAPEPQQPQQTILQNQSVGSPQQQQQQQQSLIQQQQHEQATSQQILPHQTPQFQQQQPQEEQTNRLPQPPAPQQQQQILYQLQPMQPYQGEVQHIYNEIHADEMLIQSTSAGANRATGGGPNAKIIESLNS

SEQ ID NO: 140185 - protein, 44 aa, Heterodera glycines
HLLELKSAGEGQQNPFVFIAEARWNPSDHNFEVLNTETPRGIQK

SEQ ID NO: 140186 - protein, 159 aa, Heterodera glycines
MCGRTVLFVPGCDHAGIATQVVVEKKLKRERGLSRHDLGRADFVKEVWKWKNEKGHIIYDQLKKMGAGVDWDRVVFMMDPVEKREITGRTLLSVPGHAEKVEVGVLVLFAYPLEEEVVEEDGSKTREIVVATTRLETMLGDVAIAVHPEDARYKRIIGK

SEQ ID NO: 140187 - protein, 172 aa, Heterodera glycines
NSQKILLPSLLSIKFSRPFLIKNSPILVNAPSSVFQVTYLGNMLTIMGKGDTSIDRPLEGAGATFGQQQAQQLAMRLCVCRSGLRAETTLFSVTEYFTHRITWSAAPSQYPRVFCWIYKRVFCWIYKHEGKRMKPELRCHAVLCRRADEPQQMHQTLRRHLQSALQVSNRRE

SEQ ID NO: 140188 - protein, 45 aa, Heterodera glycines
DRVCSPAGTTIAGLRELERSGVRSAFIEALSASTRRATEMAPKTN

SEQ ID NO: 140189 - protein, 36 aa, Heterodera glycines
MANPIATKKQKRCEFKKSFDIIFGVLRGILALSNDP

SEQ ID NO: 140190 - protein, 187 aa, Heterodera glycines
SARLPPIPSVQPATDCQTCRGVPLLVEHPAGTYRCPRQFHLRADELRLAIVKEPRLIQFGVGPIQGLILALNQTCGFTQQCLQQIVLKDPRVFLSEKPHVLTSYNYLAYVMRITNEQIVAFPLALRCPLSALRRRHEFLFRLRKANYVPETADHITLEQFCHPSDRFFAEEIARTPIADFNRFIKIV

SEQ ID NO: 140191 - protein, 168 aa, Heterodera glycines
MSQAFGHQLLLLRCRRPSFSPSSSSALFCPLFRATAAAFATVGAKKQSTAQHQGEQQQKQAQQVQQQPLKNAKLQMGNNRRMARLAHADDESADQLAAREDWAHFEMVERQLDELLEHHADKLDEEGDVLGVDMVADPLNEAGGLEPGLLPYKKTTWSFFSFIHSLSY

SEQ ID NO: 140192 - protein, 366 aa, Heterodera glycines
DAMHAEMFIIFIVSMVVHKIILMLKRRHFRSYRFATLVGLWFATLVGLWLIPFMVSLKNGWWFILSWTVFTSSNIFVWRRVNQPAISGSTQLVYKYFFMHKLSYIFGILVYKYFFMHKLSYIFGIVGYFSLVFTVIGINSVFGISSNLSLDISSNLSLDFGVHLLFYCLYYGVLGRDLAHSLTDRLACKIGYFTHDGLPKRYQYFTHDGLPKRYQQNGICAVCGNNLHTVVQPKQFQQNGICAVCGNNLHTVVQPKQFQFVGSEWRKTYALACTYALACNHVFHEFCIRGWCVVGKLQPCPYCKEKVDLKRMFKNPWEKPHLFYGKLLDWTLKPHLFYGKLLDWTLDWEAYLMYMHVKDAITYLLF

SEQ ID NO: 140193 - protein, 49 aa, Heterodera glycines
CLSTPNGHLKKSIFLFSGQSPRPDAPQIYGETESFRNSFPIAWTLILRW

SEQ ID NO: 140194 - protein, 125 aa, Heterodera glycines
KTLTIKNVNLISKIKNGECGKKKHSRENQGFLGKMLNSSDGGGRGNNERGLRLPMGEEKDEPAETERGSFSPCANQQLEPNISGGGGRGNNERGLRLPMGEEKDEPAETERSSFSPCANQQLEPN

SEQ ID NO: 140195 - protein, 269 aa, Heterodera glycines
HDGLRMVTETQLRPALLLIEKDKMNLYLFCPVFLPPFFSYYLIQLYIPCVMLVVVSWVMLVVVSWVSFWLDKDAVVSFWLDKDAVPARVSLGVTTPARVSLGVTTLLTMTTQASGINSKLPPVSYIKAVDVWIGAVDVWIGACLAFIFAALLEYALVNYYGRREFMNIEKRGKSGIQECLCPPSQHLSPGLFCPKSPTKSQQQPQKQLLTVPGLRHLFGSGVDLSKRVDIVSRVAFPTLYLAFLWSVSRVAFPTLYLAFLWSFSLLFRP

SEQ ID NO: 140196 - protein, 20 aa, Heterodera glycines
FLFAFEFGYILPIDHSPTPT

SEQ ID NO: 140197 - protein, 104 aa, Heterodera glycines
RGWTPLWSGYSFAMHTAAGAEGTGQNFESPGSCLETFFAVPFIECHGKGTCNYYATNHGFWLAVVEQYNQFRKYNQFRKPMPQTLKAGGLKDRVSRCQVCRKGG

SEQ ID NO: 140198 - protein, 64 aa, Heterodera glycines
MSNCGSDQQIDQQNRPLHDQPQRYIDEDISLTVDQKFEQEAKKPLIEQNVIKTLILLSMSLNLL

SEQ ID NO: 140199 - protein, 67 aa, Heterodera glycines
MLVFTTIFLSLECLEIFTYKNNLHKIYFLIVFVICPRFCCFKKNVQTGSIGDAKYVLILMRERKRNK

SEQ ID NO: 140200 - protein, 51 aa, Heterodera glycines
MVDLEGDKDDDDDNINNNEDAQLDMIFNEGGSGSSRRKEFFFLWKTVLLFF

SEQ ID NO: 140201 - protein, 97 aa, Heterodera glycines
MPSLNGLGEFMKLFKKSPEQQHFQQMGRPCSSGTVNVQQRHNGCEVTIGTKRQRSTCTKRSIGTDEHSDFIGAEVVKKAALSKPYEQFELQKPSQIG

SEQ ID NO: 140202 - protein, 33 aa, Heterodera glycines
MAERKEFRRMFDETKMPKANPHFDQLLISFKSG

SEQ ID NO: 140203 - protein, 36 aa, Heterodera glycines
NEFCILSTPSLSRRTAVNARFLASDSRSNSLNDFFN

SEQ ID NO: 140204 - protein, 74 aa, Heterodera glycines
MKYSLLRPFVNRIFTPGKEQQQLVQRNQNEFGMVKTNAGQSAILLRFVSWISGREQIEQHFSRFGKIKETLMFY

SEQ ID NO: 140205 - protein, 331 aa, Heterodera glycines
MGGGDEWRPMECQSKKKNSFHFFGILRQAPPAFARLRSFTDSSFSSVTLPPMGAYEAEEDDALPASGPNRPLPTPAVIGAIEASSGATSSDADQTEVDDELSQFVPMQAARAHWMQLHKQNMQTSFTLIMDNVDDEPSLCQILQELGANHFFYDANETHFKMMREEFLLSLDECVVGTNEQINDELEQDWDQLWAKMESNLAFGLAVQRHNYLAHCVTGKEMDTVRSQWQNLLEAKCRMDALGASVREGGIQTFADGLNRIGLGIETNNEVKRQFTVAVNDLLWAMAQAIELWEPGTGFLRLCAEIDSRCGGAFDVIRTSSSALLRTAFIA

SEQ ID NO: 140206 - protein, 252 aa, Heterodera glycines
DICNCSILRGKELVDKFYFTTAFKIPDWNVRTSLLLIWRNITARYSDFQALVFDENNFALVFDENNFFSDQMLELKNTTLSSLGTAILAMIFICVLFIADSSIVFWVSFMLVSMDIGVCGYLVSMDIGVCGYLSLWGSDLDPTTVVNILMSIGLCIDFATHVGYRTYRSRCRDPDQRISDSLGAIGWPVVQAGVSTFLGIIVMLLVPSHVVRMAQTMVLVVATGLFHGLFLLPIIIRSFAYGVGDPVHQCDS

SEQ ID NO: 140207 - protein, 100 aa, Heterodera glycines
MHSITTTAITIPAIITAMVATIIPTTTVMAAITMAMGIITMGTVAMATTTVTTTEATPATQAMEVPVLTCPAFIAPMPKCADGDERRKAGKREAESEEDK

SEQ ID NO: 140208 - protein, 244 aa, Heterodera glycines
TQPINISISETQFSGFPIAGTQPTSISISETQFSGFPIAGTQPTSISISKTQLSDFPIAGTQPTNISITGTQPTNISITGTQPTNISIYEINSQAFQSLELNPPAFQSLGLKSPAFQTMDSNLRHSKHWDSTHQLSMTFQSLELNPPAFQSLRLNYQTFQSLELNPPAFQSLGLKSPAFQTMDSNLRHSKHWDSTHQLSMTFQSLGLNPPVFQSPGLNPPAFQSLGLNPPAFQSLGLNPPHFNL

SEQ ID NO: 140209 - protein, 121 aa, Heterodera glycines
KKPKGAADDQAEPKKKPEGVDEKPKSEKKPKEEENQADEPKKAPELKTAENSEKPPVAQEKAPPNGTAEDDVQVGKQGEEHKKQEAMQQAADQQPNQTKRRPRVGTDADGRQKSGKKDLIF

SEQ ID NO: 140210 - protein, 113 aa, Heterodera glycines
ATTSQHRKLFIGGLSHETTDEQLRDYYSKWGKVIDCIVIRDPVTRQSRGFGFVTYATIEMADSAMADRPHTIAGKVVDPKRAIPREQMLQATSCPPAFLDVEPPSDCKLFLSG

SEQ ID NO: 140211 - protein, 32 aa, Heterodera glycines
MINGRKVDIARQQGTAAQHHRHVKPKSPPLKC

SEQ ID NO: 140212 - protein, 111 aa, Heterodera glycines
QQVHTEDISVPWGQAPDPLDQQFGKWRLSVFQDVQESWDASKLYFLYDPVADESCQTTGGRKAMTCLAVFDTNRKCFVGEIPLRAPTRLKRPFTIRCPWEGGKCAGLQWYV

SEQ ID NO: 140213 - protein, 147 aa, Heterodera glycines
MLRPNTAVPGITHQLRKKPSLSLRLWVLNTQMTCAYAKLLGPCFKTGRTDDRLLHRERTTESPSWTELVAGTCRTRPPPTPSSSQHGPETIAQFTQSKQHSPDPGTRPRKAGLKTELTQLLRASQRTPPANAPFATEQKDSKPQSGG

SEQ ID NO: 140214 - protein, 99 aa, Heterodera glycines; identical to SEQ ID NO: 135530

SEQ ID NO: 140215 - protein, 180 aa, Heterodera glycines
MAALIQRRPNAPSVASDRVNNPVREWMARNQGGENEPPTQQQPQAQQPMQAEQQRFERLTLNDQGQAFPRASYHVRTRREEHPTRERLRTQGAAPSHHHRSETRAETLTTFETVRLQPPTFSGKPEDWTTFWAYFQRAVDDKPIPGFEKQLHLLRCLKEGSPARRAVEVYPPSDGNYPVE

SEQ ID NO: 140216 - protein, 45 aa, Heterodera glycines
MLRRVDINVANNTPIAHGVGKGRTPKIFGGTAGQLKDLGRKPKED

SEQ ID NO: 140217 - protein, 115 aa, Heterodera glycines
GSVALFDTLSLSPLSVLRQTHCSFVTALSFLPQRSCDVKDLGHIGETISHNLPSKRCFLPGICADFRCALVSVSVDRTIQVHQFPFPTQSSFSAFLFRLSILTSVLYVLLWTLFA

SEQ ID NO: 140218 - protein, 101 aa, Heterodera glycines
ALPIPSTIAFIHPIMSAKIIRLPKIACDLSLEKNGLSKNRNYAQKASQTILALPIPSTIAFIHPIMSAKIIRVPKIACDLSLEKNGQVKIVITLKKLLKQF

SEQ ID NO: 140219 - protein, 1514 aa, Heterodera glycines
MVVKTSTFGVETDSMLDGGAQISLISANFLYQLVKEKNLDFDSLEPSQTNVRVLDVNGKMVPCLLKVNLPIHRRGLKSEVKIAVHVTKAPIGFDMLIGTNGLGKLGFKLYDEANDSMVEFENSELNSKNLLTVIYGTTIEPRSTKILEMGVNENYEASELLISSDNSNDLHVEPTVAIANEGKIIVPVTNRSHSKIALEKGQKVGEVEPIFELGESDDMLISPVIVSMLSEPNGETLEKQQLLWETVQKNVGILNEEQSEELRELCEGFGEIFAARDEDLTQTNLVQHKIETGDAPPIKIKMRNVPYAYREKIAAMLQDYLGRGVIQSSISPWASPIVLVPKRDGYWQIKMEDNSVEKTAFTTEYGLYEFKVMPFGLTNAVATFQRFMTRLFDGMINDFVFIYIDDILIASESFEEHTKHLHEVFERIKAAGLKLKMSKCKMCAEELPFLGHILTRSGIKMDADKVKPVVDLPIPKNKKELHSLLGFLTYYRKFIHSFGTIAAPLFKLLSEKVEFKICDDEIKIINYLKGKIVEDVLLYFPDFEAAQNDQSRRFIIMTDASKMGISAILSQPDAEKRIRPIYFASRQCNVHESRYSATELEALAVRFGVKKFAQFVTMIPTRVITDHKALIWMFRSKNETGNARIDRWLLELNSRFILKVEYQPGKKNIIADVLSRSGTGNEIEESEQNSEEIAFIGKIRTTENDLENFGLMEERQEWVEQTKIGEMKPIYEFLERKVLPNDQRDQQRVIDKCHKFVVFKDLLYLSEKEGKMRLFVPQKFRNELVKNRHEGICAGHMSGKKLFKQLSEEYFWPNMLTDCIRAHESCRICAHTRISRANEPPLNVVKSLEPLELVCMDILDVGPSQSNKKYICVIVDHFTKYLVAEPIPDKSAESVAKVFVEKFILVYGTPQKIHSDRGKEFLNATMEEISKVLDIKRSFTAGYDPQANGLAERINRIIIGILKKSTASNWTWDERLAYGVFAYNITPSNVTGYSPFLLMFGRNAKFPLDKHVPFRVNPVYTIDSGKYIQLFRENLLNMLEEAQKNSEEAREQSKIWYDSRPKVTANKFQKGEKVMVVFPGQNRRSPHKKLLWSHFGPYLITEIGDSSANLVPIDKKEITPIKVPIERLVKVPKGVPDISTLPKGKNPFKNDLKLLSMYAGIRSEICEMTGNKCREIGGKSESQLGTIASDCLGGNWKSDSFSEPMDVGSVSAGFGWTSECSGGGSGHELCEKITLGSIDPVLNMSNLGSAVVKTPLQALLSIFLLRSGVASSLTAAQTLVQTIVGAEPKLELCMYTGKRGDQISTGKYPTEEDQRQALEKWVGSCFVARQALTESGYKPLSMQMPEGVNSLPDSEKNKWHEVFKDSSWALERVRATIVHKASRFLAHDRVLLGDSSAEMLAKHINSSYCIGGESSMADLIRQFQPIVLSSRVKALLILAGRDSLMQGETEKSIAAQFEMIVSLCQRFPHVQIFWCPPPYVHAKATECEELITKMHAIISKSPITPIFAPEKGRS

SEQ ID NO: 140220 - protein, 564 aa, Heterodera glycines
MIIRSPPLTRQRALNLRTFAQNQNAAVEEQQQQQQVEGVHGENEPLVNAPISPGLNRNLMKWKQQQQIEIRRRLLHVSIQSNLPPRANGGGNNGAEQQQIRNANVGHEDFVEGLREVLRPNFGNLLVREEGVRMRFVENGTENRHFERINRNLVRETAPNSRHVSQSELIGCTSTPINFNGELHNFPIVSNQIRHREIYEDFGPYREHENFRSSQIQIRQQPALARQQQNANFGFLPCERQHNEFVGRHLFEDGRQKMHPTEIPRQMHQQPPREERGWQQQNSVLYRPVARQQQNFTVYENQMLPPQSQNLAVLSSLEYNMVLERIPDLNGKEGTDEVKRFFKKFDAYTDSWPDEKRIKGLESKVYGRAERAFEAAKAVIPIKYELLRGEMMRQLEETDSKNLNAFDELMLGVRRKPNESIDDLAGRISGLVKRAYPGLSFQLSDEFSIKYLIRSIGDPTLSLNLELIRTPRMSLDHFVSLAARAESTQRATQRFVSAEKSKIDRNETQFREPRRNFSREYQRQHEFQPIFRDWQPEFQPNNGPIRQNNPSFEPKLWKCYNCNE

SEQ ID NO: 140221 - protein, 71 aa, Heterodera glycines
MYFNLLLFCAFFVSLARTAAQTVQQHEHVHLWKITHSEMKKPSYLLGTTHVPWKILYNKCKFFNYCAVLQK

SEQ ID NO: 140222 - protein, 98 aa, Heterodera glycines
MNRRWICNDVWMDIFPSFDHAQLGLKLALISPRFNALVDKHFNGKSELTIWRPIEISKGIGTKPKLSVITINYGTSAYFPLPDRPLPKKIRFKHLQIK

SEQ ID NO: 140223 - protein, 25 aa, Heterodera glycines
PRDCPLSPIDCPLSPRDSSNRLAVA

SEQ ID NO: 140224 - protein, 249 aa, Heterodera glycines
TNASTVRHFAVDASSPLADAIPPPGEQQRQQPYDNGENGTQIERTTALGHQQQGEEAKEGTTTNNLATQMEALCRENALYRRTNERLEYWLTALESENESIGEYIALYRFQRTQIQQRIAEKDAALLQLQQQNTQLTAILTELRNAMLAIMQKSDANAATLPTATAKLSVDNCSAITEGNDEHSDCANPTDQQKQQIHPPPMDQLSADRLMRILERSEAISRQATCMAANQAQIHCTGCVECQGELFNI

SEQ ID NO: 140225 - protein, 283 aa, Heterodera glycines
MKAQLEQSIEQQRSELTMRDIYIKQLTRQTANNTTEFEKCADAIGQQNVAHQQSSGGEIQQKRDDDLKWHRNKVLELQKQLQLVQEQQQIENSLANANAKRLVEQLDSVKAQNAQLESFNNVLEERLRILQQKLLLNDNSPPPSNNNNRNENANLTNSADGQQNLLPETEHLSEMNGLMKSVKELTGENEKLASKLCESEQLVQEKDVSLLAAQLQNEKATVSRAVAQNVELKSQLKELQDRLIAVINESAAKEDERTTAMATVERLTKQLLNANNNEEEDEL

SEQ ID NO: 140226 - protein, 141 aa, Heterodera glycines
MQQIPILSLSNFLPIFSLISVPFLLSFPSTAFGCSCAPTKFNESMCVAKWVSHVKVLQNTTTTNSHRIFTVRHLEVFKSPNGTAHNDQLIGKESAVWTPIFTAACGVRELDTEKEYLLAGTVDNLGTKKINLCLFIPIEDG

SEQ ID NO: 140227 - protein, 26 aa, Heterodera glycines
VDRLRIQFDGHRLNSGGGLTDQRVGF

SEQ ID NO: 140228 - protein, 19 aa, Heterodera glycines
SISNIVCVFGRARLEKANV

SEQ ID NO: 140229 - protein, 19 aa, Heterodera glycines
TFAFSSLALPNTHTIFEML

SEQ ID NO: 140230 - protein, 19 aa, Heterodera glycines
TFAFSSLALPNTHTIFEML

SEQ ID NO: 140231 - protein, 19 aa, Heterodera glycines
TFSFSSLALPNTHTIFEML

SEQ ID NO: 140232 - protein, 19 aa, Heterodera glycines
TFAFSSLALPNTHTIFEML

SEQ ID NO: 140233 - protein, 59 aa, Heterodera glycines
MKQQQMMDELSSVKTQVEKIGQEQQQQKKEQQEKQEEDAKGKYGNIKGILRKKRRILRF

SEQ ID NO: 140234 - protein, 46 aa, Heterodera glycines
CTPSGSEPAPSPLKMMPQNPQSHRDSEVLSMLKVKSDHVFVISVIK

SEQ ID NO: 140235 - protein, 95 aa, Heterodera glycines
MFEYPKRTLEKIDFFVFGAVPPNRCAQIYGETESFRNSFPIACTLILRWIFAPHNCLSTPNGHLKKSIFLFSGQSPRTDAPRFMGRPNPSGIASL

SEQ ID NO: 140236 - protein, 161 aa, Heterodera glycines
ILAEDGFDFREIKEFTQLLHSPEFTQLLHSPRRVPPPRYICHICYQPGHYFLSDCPARFNSPYEELTPYQGRKKCYGEFQCEQCKRKWTSQNSVANEAQSCIKCHVPVFPHKQLPVDLPVDKAVALGLVRIFCSLFSCFQKRMLGHGFLEARKKNEWYKLS

SEQ ID NO: 140237 - protein, 122 aa, Heterodera glycines
ETTSGFVGIVPQRFLNIFFDATADEESHFGESSTRENERSNDLTDQLKPWDVPIFQSSNVPSIQKQGSFSCRSSLSGYDSAQWVDSTDAAISHRPPPRPPPPKLCQTTSEVTSPRRHFHQSH

SEQ ID NO: 140238 - protein, 195 aa, Heterodera glycines
MGVPVPTRPPLPRRPPFRPLPFRSVIAKFLRFFVSVPTDGLAKYVTNLWRIVASIRAKMVLLALSTRTVPSASSVVVRTDGEGFYLFVLSSPRRFPLRFRAHRPAAVLSVRLSLLPQCRLFRFFPHRLFHFDNFTTKECFRPPLSLRVVGKCQLRTRAVCVRADLQNRTTKSTALGRKGTVSDGRTKGTAADNGE

SEQ ID NO: 140239 - protein, 115 aa, Heterodera glycines
TLPKDSVPVEWEHFSAKEVIVDPKMAHTYVTELAGGIPSARGTKYSYTYESRVEEEGNNELLEQSQRRREETDEEEMKQQQPITELRREEEEHELGRELRRGEDGTERHCTSTQK

SEQ ID NO: 140240 - protein, 119 aa, Heterodera glycines
MRLYFGDSYQKIYKTKIGNSIKEIMMPLADLHRVAVHLNFNPENLVVSNKNNAVSVRRLFSKVESTPLKLIGLEGAFFLEMGRNIEKINDDEIEGHHHFSQTANGRYMAPEYLDKKVYT

SEQ ID NO: 140241 - protein, 20 aa, Heterodera glycines
MSTSWTYLAMVKLAKKARAN

SEQ ID NO: 140242 - protein, 282 aa, Heterodera glycines
MPITFQGSLGGAPPPPPPPPPPLWKGGGGKSPVSFADAIRQKAIDRGGSVGAEPEEKAPQAKAPPPPPPPAKTAVPLSPIAPALSPIRSRRPTPFPRNLAPISDESAQQLTPISRRRGTPLVRKVTESAEEDPQRLGRVRRIFASEESDGSQVEKAATRRRHSTASVSSALSFAGSEVTTPTKSRKRKGTALPKRKAAQRAIIETEAEEQSEEIELGRKGRNKWTEDQMEEIELGRKGRNKRVDVWVEEQRTMGQKADESAEFVPFSGELVNERFAYDKMPG

SEQ ID NO: 140243 - protein, 19 aa, Heterodera glycines
GSPPEPMRPDLWGDRILRE

SEQ ID NO: 140244 - protein, 105 aa, Heterodera glycines
MKNLLQKCRELDKWATAKAIVLALVSSYNELRLIPQDTVDHESGDSQALPNQETIVDQDSEHFQALRELAKRLALSFGVDSFKNREALAVIHHVNKRNVSKLPDF

SEQ ID NO: 140245 - protein, 152 aa, Heterodera glycines
FFSFFSANWVPTVAFFGLALSNNLTILKTQTKKFLTKNGYLFFSFFTANLVPTVAFSCLALSNNLTIFETQTKKFSKNGYLFFLIFLPQTWYQQLPSFVWPYQTILRYLKRKQKKFLTKNGYLFFLIFLPQTWYQQLPSLVWPYQTILRYLK

SEQ ID NO: 140246 - protein, 41 aa, Heterodera glycines
LKITILAFCHYFFTISTFFGKFLNKNAIKPKNTPLRIDLKK

SEQ ID NO: 140247 - protein, 139 aa, Heterodera glycines
MPTTLGIALVHGYQRVDPDLILPTMRANVERQLDLIAKGKADYQTIKNQTLEIFRQKFLNFVQNINLVDALFGGECRQLIGPINQLIRPIKQFLNSPFYPIRFIYIAGRLGQTVSNVAMAALHEAARDAGPTIVLPDLR

SEQ ID NO: 140248 - protein, 88 aa, Heterodera glycines; identical to SEQ ID NO: 124691

SEQ ID NO: 140249 - protein, 73 aa, Heterodera glycines
MARVASPPLPADGTALAERIKEAEAREEAALTVDADETVADRPPFVVDGIDEVLADDSEHLRVVIVAKGNKSD

SEQ ID NO: 140250 - protein, 67 aa, Heterodera glycines
CNGIAAGLAFLSTTVLDLCADAAAGAGDLDVMARVASPPLPADGTALAERIKEAEAREEAALTVDAD

SEQ ID NO: 140251 - protein, 199 aa, Heterodera glycines
CDFQKLNYFNYELFPRVEQREWRLRPLYYDNTIQRMLTLFVVTTSEGWPGIRQNSMDTTYEDQGPSPYYRVEVALFYVMFFIVFPFFFVNIFVALIIITFQEQGEAELSEGDLDKNQKQCIDFALNARPRSLFMPEDKNSMKYRIWRLVTSTPFEYFIMAMIVLNTIILMMKFHGNSPEYEKVLRMFCIYFIKFINQLF

SEQ ID NO: 140252 - protein, 77 aa, Heterodera glycines
MVTLGQFSFALFLESDDDQGDKNVDEEEREHDEKHHIKQCHLHTIIRRWALKRVKMGICDWLSAHKEHLDLSNDSKD

SEQ ID NO: 140253 - protein, 206 aa, Heterodera glycines
EESPFGGPKPLVPYSSMFLAPQTQFPCWVHSVVATKYFEMVVMAVICASSISLAAEDPVDDDNPRNKILQYFDYCFTGVFACEMLLKLIDQGVILHRGSYCRDFWNVLDGVVVACALVGFAFSGTAGATGKNLSTIKSLRGTAGATGKNLSTIKSLRVLRVLRPLKTIKRIPKLKAVFDCVVNSLKNVFNILLNVFNILLVYFLFQ

SEQ ID NO: 140254 - protein, 207 aa, Heterodera glycines
CFYMLKFYFISLRNLVRSLLHSMRSIISLLFLLFLFIVIFALLGMQLFGGKFNFQNMHPYTHFDTFPIALITVFQILTGEDWNEVMYLAIESQGGVYGGGMVYCVYFIVLVLFGNYTLLNVFLAIAVDNLANAQELTAADEADEKANGIEDESETLGNKYSNNNDYDEHDLEAGPDGEFTRELDGLEEECDEEESPFGPKPLCIFRM

SEQ ID NO: 140255 - protein, 86 aa, Heterodera glycines
MAPLLQIGLLVLFAIVIFAIIGLVSASNKSSSTGAYNCDVTNDSLGSTYNWAYFIPLIVLGSFFMLNLVLGVLSGEFAKERRVQLI

SEQ ID NO: 140256 - protein, 222 aa, Heterodera glycines
IRRMSSTKSSHVVFETSMGAMSIELYWQHAPRTCMNFQELARKGYYNNTIFYYNNTIFHRIIADFMVQGGDPTRTGGGDPTRTGRGGTSIYGSRRGGTSIYGSRFADEISDELRHTGAGIISMANSGPNISMANSGPNTNGSQFFITLGPTQHLDGKHTIFGRLATGMKVLQKIGQVTTDNSDRPTNDVKIVKAYPRSEILSNPTNDVKIVKAYPRSEILSN

SEQ ID NO: 140257 - protein, 303 aa, Heterodera glycines
MGPSRGPTIAKTRGIRDGAGRAMGGHWGIERSQRRVEMYPIQKPELFQHFGTSAQPQGILLSGPPGCGKTLLAKAVANETGMSFISVKGPELLSMYVGESERAVRTVFQRARDSAPCVVFFDEIDALCPKRSQRENSGSSRLVNQLLTEMDGLDGRRNVFLIGATNRPDIVDPAITRPGRFDKILFVDFPSPSERADILQKATKNGTHPRISPSVRFDAFASNSSLDFFTGADLVALVHEATLCALRERIDQNDSRIDSVQSHHFEEALRRIRPSVRQSDREHYDKLREKYAAGTETKPMDNE

SEQ ID NO: 140258 - protein, 109 aa, Heterodera glycines
MGVAVTAVAVTVGEATGVGHTVAAVTAAEIMEVAVTAVAVTVVEAMGVGHTVAAVTMVEAMASGGYGGRNFGNVGLTAGRGTMALVVVTVVADMANSLCKMKQGFLSFR

SEQ ID NO: 140259 - protein, 382 aa, Heterodera glycines
IQCKKQFYLLKRTIRLRFINSCGRLEAIINGKNVDCIYIDFQKAFDSVPHELLSYKLEKIGIRGKLLMWIKDFLSNRTFRVKIGDDLSSSKVGSGVPQGSVLGPLLFLIYINDLPDALPSEVRIKLYADDVKLYISDTEIMHKALHNLSEWANKWQIRISIKKTFVLHLGNKNPKEIYKIDGNIINVADTIRDLGINIDNKLQFSNHVTQITKNAYLRMRSLFRVIKSKSSRIWIILYKTYVRPLLEYAPEVWNPSLLKNIKKIEKCQKYFTKRVLFKCSLPPIPYQNRLEYLQLPTLESRRKLSDLFMAHKIIYGRTEIPLKYSNLLNALTFPFIDLTRNINAKKPFARVTKIWNQLDKKLIEINSLSFKNTTISFPVIPE

SEQ ID NO: 140260 - protein, 27 aa, Heterodera glycines
MFFIYLLIENKIQFNSVDLSVDNLFFF

SEQ ID NO: 140261 - protein, 34 aa, Heterodera glycines
IFRLHHGEVIAGMDRAMTSMCEGERRRVVIPAAL

SEQ ID NO: 140262 - protein, 267 aa, Heterodera glycines
MKFAKKMLMIPEAEYLALRSAMNSGDYLQNEKASLDAKISQNLQDPGISEDLKAKRHDWLYKERRTVKGILENRPQKVVIENHVPGPNVAPYLGLNNQSKLQETDEPRKIIIPKKRLEEQTPDPESDNDTINELTPEPQTTSTLKTPIPIKTIIHPTLLNGLFRYVKENKDLFKITAAGKVQSNMNLPIENSNYRDVLLYLAGKKDETPRGAKFLKDRLLKDPTVKDMVDKSKVMWGRGRKKAIKSIKTPGIVREKKPFKPLIWARL

SEQ ID NO: 140263 - protein, 131 aa, Heterodera glycines
MCFGGKGTSQDYPSFMAKIRWPMEASSHGLCGNILWKDVSRHCRRIFQVARNIRDEFHRFEPLRLIRQGKGGFNVFMVHLVLFKSATFVSLMKWIKTVPLLETNNKSPMSPTNKSKFDVQNVNGVQQRNWI

SEQ ID NO: 140264 - protein, 91 aa, Heterodera glycines
MDPKNGQLSRAMRNRAVELAFGMDTVSVTAAASAIKPPVWSANAVDVVSAVPLLPRAELLSSSLNSIATPIVPASSKQLQLVSQLQHKLDG

SEQ ID NO: 140265 - protein, 135 aa, Heterodera glycines
MNLILWDLINIFCLLNNKFFKGQLNTISIGIWTKSDDTFYKYSNNGFIFGHSATGLGGYPSFAEGDTIGCGANLTSMEIIYTKNGQKLNTSNLFVFDNELLPFVQVNTLGDVIEADFGPVFEYKNVSDLFATQIA

SEQ ID NO: 140266 - protein, 222 aa, Heterodera glycines
MNFWHFAIVLLHLCMQMLSEPTAEVQENVKNIRVEINDLRENISRLFTKFTKIELEQKQIEEALNDQLLVTQEQKSAVNETRETEQLKTLEFKPKNQWSVNKSDSELFIFKPKHLKAIHRGKEIGRRRELIAESVLLPYFEVVYYETKIIRKQLNIEGSSSIGIGLFGKSLYMYGDNGFIFGHNVNGFWGYPSFEEGDTIGCGANLTSMEIIYTKNGQKLSE

SEQ ID NO: 140267 - protein, 53 aa, Heterodera glycines
WSFFKKSSNIIKIITKRREYIQIYKICISKWVIEVSNQGTKLFYVHFNKLFPA

SEQ ID NO: 140268 - protein, 47 aa, Heterodera glycines; identical to SEQ ID NO: 139606

SEQ ID NO: 140269 - protein, 53 aa, Heterodera glycines; identical to SEQ ID NO: 128752

SEQ ID NO: 140270 - protein, 49 aa, Heterodera glycines
ACHKSVKGSDGADSALLSLCAAELTTLLRTNLHADSQLEAEMHECDRNM

SEQ ID NO: 140271 - protein, 48 aa, Heterodera glycines
LMPIKIRPSIVFKNLIFCKSRLSFEFRSARRSIGLLHLACARTPLLRR

SEQ ID NO: 140272 - protein, 44 aa, Heterodera glycines
MANVANDYLMRRYPSRRKACRDPLALPCVGSPYSALNELNFDEK

SEQ ID NO: 140273 - protein, 30 aa, Heterodera glycines
MPLSECQKHQKNEGSKGVDKEDKYVNNIIL

SEQ ID NO: 140274 - protein, 95 aa, Heterodera glycines
LNVSTNIFLSQFLLKFCQIQTSAFMNSIMVNDSLLLNNFIWDKISQQNETKIMTPYTEFLFDLDSNRFNGFLIVITNKMHITRRVVPPVSASILT

SEQ ID NO: 140275 - protein, 80 aa, Heterodera glycines
VRADGQTADPFSLVFSCAAAEQKGLNSNTSSTVPRAQNAAAASRPTDPRPNAIQTVHAASAAAVGGGDFLIPLYILLKIK

SEQ ID NO: 140276 - protein, 21 aa, Heterodera glycines
KDVIHLPFDRKSIREPYLTFN

SEQ ID NO: 140277 - protein, 166 aa, Heterodera glycines
MSSVEDEEDSGTNAGDDGWMVVKKESFKKLCDFYEKRRRVECGGGTVAADPFAEQLEREFREATMADNNSNNRTDERVDEKLTAESEPKKADEFVKEVGQEPAAEVYVAQIVDLTTEKDGKSEKSEKVVHNSSVKEGKGTFFKTTPCVHSVVMRGVCAGCGQDFRQ

SEQ ID NO: 140278 - protein, 1100 aa, Heterodera glycines
MSELLRISIAPMVVRLKMYIETAQENLGKELADQSVRADLIAERQNLCKTISLLEKYNGKWEAIFLRVKGQALQDEEQNYRDFKPEGKAFMHWVDQARGLVDTIEGALGLSELGDAIPQPNQPAQVVQQPQLVHQRHDVTLPPITLPKFSGEPREWPLFWKLFETSVESLQIEDFKKHIYLLGCLPEKSVARRAIDLYPPSDENYPRVVEILKKRFGDEKTMVESLQAELLHLPKPAESVQSLRQFSESIERICHQLLDYGENEQNKFMASTIKSKLPYHLLTQVVEKEMRAGGAFNCTELRRAITSIVEVKEEVQRCTQVFRGEEKPRNFPPHSNGGRANQGRGTPFRFSQPFRQEWQWRPMERNEPVRRMSPQPNRSFSAINKSQTPISDRGSNRLCSLCEAKGHAPSRCTKYTTPGARRKRLADQDRCINCLIMGHNSLNCTSPRRCSQCGERHHFMVCYGGEKQWNIPPQVQRNNFHGMGTESPPNQFIQGHERPDNRNDSVGMMSPQVNRSFLTLTSPQFSQRKIGTGTRQTCSLCCAMGHPPSRCPQYSTPGARRRRLAKQRKCFNCLMKDHKAQQCQSPKRCLKCGGKHHYMICYHGDAPIGSTPQQIREGRTVQKKQSSKQRGEFPRSKTLYSGVSSRVEDKPSESIAFDCSSTSGLKNVTNKSHSFFCRAMVMPKHDHQKMIEKSVLFDQPSQISYQSDSHFGEQKTPKVTPTDKKICGCCIKKNGVVSHSVFSIRINRMDNKWEETLPNRTEQSIIALTLCFYISISLMVLSILKALSIGRKTIAWLMIQLKVSLLCFEDQSTPCFQEGRQRGAIPQFCTARHILQIMAFTVILACLFPLPVKGGTETNAYPTNHCNECKLLCFNKGVKAKIPKEINKVELCCAENCYIHENVKQLTYELPKEILLNDFQCEGHFWMDSKHMFKKDMLCPAVDECELIECYFCIEQLANPTCYPLISSMPIIYLAGPNRLPKERRPRATASQNWTSRRVYRTMAFVVLMANSLQDLTGAETIAVMAKSEKCIKNATSMRCIVENSAMLTLLPVGQTNTLLLKTDEGVILGSINVVLKALALECQSFTKAWQRSYAINVLA

SEQ ID NO: 140279 - protein, 120 aa, Heterodera glycines
MALTREPFTIDFNCKNRQEAIDFNCSLGVQACTDCIPDHSSGLVNCNCRSHNLEKLMESPERRLPLNIKNYQLRNTGRKVIALTGFSPVQLNLQIEGLQMALELHQSLCTILPLNISGCY

SEQ ID NO: 140280 - protein, 214 aa, Heterodera glycines
MPIPIREGPYFSARRVVIPENAEVFNDRLYGLGDPRFEEEERVPRWQEPPIPRQIESLSSWIERSYGPHWYETARERRAVEARLRGELREGATLLGEHFGRIAEIHFDGFTCYGPEGLFISPGITLFDHFVRLGLQVDPVKPCIQEYVGFSPREQGMLVDIYPIELVNIRTRIGVAWRAPAVLEEPHPPLRDHQLPDGRLENRPPRVARRLPNR

SEQ ID NO: 140281 - protein, 34 aa, Heterodera glycines
CPFGVLKQLWGAKIQRRIKVQAIGKLLPKDSVSP

SEQ ID NO: 140282 - protein, 39 aa, Heterodera glycines
KIDFFVFGAVPLNRCAQIYGETESFGNSFPIACTLILRW

SEQ ID NO: 140283 - protein, 125 aa, Heterodera glycines
DTLNALGLLLTGLPSSFQAFFLDRIEESFEWSQIASADADPSQLFESLSHEVYLHSDSRILSMLALIHSFCQHGGNNSLSIIPDFVINRLAHKVDNEAQLVYFLRIVVPYLQRIHEKERNKHMPE

SEQ ID NO: 140284 - protein, 62 aa, Heterodera glycines
TEGTANPSLEASRPTYSNKRVNAVQIRQLCPFPPHRFHVLFNSLFKVLCNFPSRYLFAIGLV

SEQ ID NO: 140285 - protein, 51 aa, Heterodera glycines
MGRDRPEFDTPGKLGRMTDRWGKGNVGKSEGQKDDVSLAILTKQLIHSAEY

SEQ ID NO: 140286 - protein, 100 aa, Heterodera glycines
DTLQTMVHYLCSSQIVRKPTSLPSPVYIADEYAKRGRNIYAKRGRNIYSHYAKNGIDNSKNLQLFAKNKGVEWPLRTYADMTKVLSFLNTTYLRELRINA

SEQ ID NO: 140287 - protein, 31 aa, Heterodera glycines
RETEKQSDRCAAHCRSGPLGKQRQNKAANKT

SEQ ID NO: 140288 - protein, 44 aa, Heterodera glycines
MVENFKTLPILSVFRGDLIILCDVTDQKVINRSDQIFYEWMMLN

SEQ ID NO: 140289 - protein, 25 aa, Heterodera glycines
IRRGTTVIRRGTTVIRRGTTVIRRG

SEQ ID NO: 140290 - protein, 302 aa, Heterodera glycines
MSSARCRMALGPALFRLRQHVTTAENLLDEPMINAETTENLEQERGHITRILSRMEVELDAWGAIMNGLQGPAREAEEAFFTAFIRDDRHLTEWLEDAREMLAHIAAELADEPNQPIAAGGQQPAVAVNPPVPAVPFVNNAAFLGGANVQQPAAVANHANQPPLVPINAQIVPNLPAVAAPAPLATARLPQLSLPVFSGEPMEWPAFWQSFESAVDRAALEPVDKLNYLHGCLRGKAARAVTAYRGGDNYAHAVAALRRLFGDPRKIAEALQSELINLRPVDDSVGSLQHLLETLERVCRQL

SEQ ID NO: 140291 - protein, 58 aa, Heterodera glycines
MPIGITALLPTVLFPALGILSARAVAHEFLNDTNFLFIGGLVVAAAVEKCGLHERVAL

SEQ ID NO: 140292 - protein, 53 aa, Heterodera glycines
FEYPKRTLEKIDFFVFGAVPPNRCAQIYGETESFRNSFPIACTLILRWIFAPP

SEQ ID NO: 140293 - protein, 102 aa, Heterodera glycines
MKIGKRFIYKLKFKEEIVRVLIENGTTLVIKPNGAEGTDSAGAVRAELGQQLASGWHHVALHRDAQTLRAMVDDTHEETLAAPIEDASDLLLFTFSSSRQLN

SEQ ID NO: 140294 - protein, 93 aa, Heterodera glycines
MDSPKCQTLNFARPFFPNNFVLLEVEKSVADAFSSSNMITDQFNHESLSLTIRGHCSDPLVVCTSSRTFGAKDVEVSNTLLLLDGTPNSAGAN

SEQ ID NO: 140295 - protein, 74 aa, Heterodera glycines
MTFYASHHILRVPTTLYASHHILRVPTTLYASHHILRVPTTLYASHDILCPWRGWHSEAPKIFGNRNSVPSLVS

SEQ ID NO: 140296 - protein, 100 aa, Heterodera glycines
GIRGGRGRVGGFGVSGGGFRWRGAAGGRGVGGVGGRGGVGGRGGGGGHGGGAGQGWHGIPSSDFRHFWGRNSDFRLPKIFGASEFRLPTSEIFDEKSEFF

SEQ ID NO: 140297 - protein, 937 aa, Heterodera glycines
MDTDVNANQEVPPIQTEEEFENVEEMDESQNSVLKYLVCQTDAKSVVGGKLSGQGPFFMGIPDEIVSAKRRLQMGDVVMLASITSPQEWWMGENYLLPHPTPYMKGDEIKAHANHVVIGAKDCNDSFCFPLDTFSERLMGAAAAVQRTHEMVKLAKQAVTVQLVWDRPQVRDEEVQRNLKKAQLLSFDWTLTNKSSVADFLEAWEEDTPVNAKIANDTKAHWCAHGHVISASASEINPGIFTIKAWEDWENILDEMESYLVLVPNYGGLTFREMCFEKTILSDIAQGNAPVSHILRVLMGKGTDETRTAVRLTEKVGKLNEEQRIAHSLFLDQETRVIFMQAPAGTGKSVSVAECIASVLKKDPDAAILAVSPLNVAVCELVKDTMEALTEKVPMLALFSGQGKGRYMDRIRPLGDNLLVEAVQRYGNIPPTEGAPGKRWNEEKLFQKYVDDFNRAPRRARERTTTAALLNMTKYRVYFMTLALAEELALDLGNINYVLVDECGQATLSAILSTLTQFRKVRKILLTGDKQQLRVHLPSQMLPIRGKYGFESVLEVLERAKGIDRTVLSRCYRSHSAIVKCLDAGVYAPAGDRLVPGKPDTEMSFFLNFMGPRIVTENCPVILIHQKTPAQQESVSFSSHNPEQRETALEFLGIIQRTFSGLIQIVCFYQAERKQVTLEIERRNWQNVKAGTVDSIQSQEADLVIVLTTRTGAGRTEDVNIGKEFWADAARTTVAVSRPRFGLIVIGDLTLLWHKGEVWRRFLDQALKMTVAVTPDYIGLISNPWPNRVGNTITRPNGSVPMAYEFYAERDSTLRHESLGQRINTTNFSSPSFLGNSFSVFAHPVLPCANTSSLAPSSAHSFGMMVIDTSVPPPAVYARTGRAGPNVRMTPYPPQREPRTSYAEAVEHGRPAPKERRTDVVCRRCGRFGHIEKRCRT

SEQ ID NO: 140298 - protein, 70 aa, Heterodera glycines
MAKRTVIKKLQSKKSVQKTWNNCEERKAQTQRATEARLAKKNFKLSNDTKNVCIDQVIKKGMTYKSEDSH

SEQ ID NO: 140299 - protein, 524 aa, Heterodera glycines
MDAIMERVANCHYYSSLDLSSGYLQIKLSEEASRKCGVITEDGVYQMTHMPFGLKNATAAFSRAMARVLTGLNDNKIKDLLSHEPLLTFPDYSKPFHVFTDASLVGQAGVLMQKNNNGVFSAISYCSRTLSASERKWPTVQIELGAIIYALREFKPFIFLSDVELHTDHKPLAYLLKKAEAHPNLARWLIELQAYQIKIVHISGKQNSLADALSRAQENISIKEVQNLDELDDIAEFPICLSLTIDQRVIFDPFINNLILRGKDGHSYDIDLKKEQREDPQCSKLINFLQRGKFPDEMDPQSMENLTENAKNLVMDSGILYFKYSEQSPRIYLPISLRSLIFDSFHSSPLGGGHMDLKKTLKKCRKYYWPLQYSDILSWYKQCITCQLRHSPSPAFRAEMQMVPANTLFARLPWKGVFRIIKIDGIYATIKCVEILGPACTSPWLSPEENNALVEAESEEIADLPGHSHPIIIKEQIELPAQNHANDLVSDTQNIENDTCEPTQLPHYALRNRTKLNKPARYLD

SEQ ID NO: 140300 - protein, 601 aa, Heterodera glycines
MFNVTDINFHAFIHNLVKKEIFGDWSYIWKVIITIISLISLIDVLLRFGIFALQIYLGNGRLGSLLLGNQTIRTAQNIIQSLPQSSNSQPSQSPIESFDIKFVQVNKIPSPSKQMNSPQRDSKSETICESIFMLRSYAEFKEFGFIPANLDLPIFLIKINGVEFRALVDSASETSVGSDRILYLASVPKSAQREVNIRFRSLGMNPLEVSGDSLVGKIVAWAHLAKGEDILGEAPLLFTDHSVFENECFDLIIGANLIDRFGGVTILPKERKIIFGCTLTNNVRAISPISQKVDQSPRFEKISVNFLGSISPNCSIITSRINNVKNPSLVDTGASISVAPKLMAPIWQCIPYPTFVNVISASGHTLELTEKVSVVFSIGNFEIKETIYLVDDNKFKTSAYNLLIGCNILGKLPPFTFDYPNSKFSVGNFITPLGSLPNNSLLNNLRIQAINSLILPPNKGTIIQAQFDPSIVSDKPIYIHSLDKKLLNEHFGLIPLIVEPFRGTVKILIINPTAMPFQIYKGKHLAYADEVRQINNYTMSNSSEDLMAMSISEGVVVDPNFKIDLSKSSVVGKDLEKLKSLCDEFYDVFSQSQYDLGSFTE

SEQ ID NO: 140301 - protein, 300 aa, Heterodera glycines
DTKSHQAKMEAETEENKWEMLNARSREERKKAMDCVKGSELIKAFQHKMFSDETTSEQLGKSIRNIAELKVDVNKTKKLHKQNSRTRRSRRHKDDDGDPINLLKRNLSRRGEFSYGPPPPSHSSSSSLSSSSSFSASHRLRPPLPHRRKSSPPAEVKNVDLSSSPVAGTSSGPFDVAENVHGLPILDESYKFLRSNSVKEAEEKRRQQRQHYEAVVRRNGSTKSPNCMGGNGLDDEDSDDVEEKVENDEPNFDMDSPRNVQQQSYHDGGHRRLDKSESKKMLADKKQQLAEAEAELEMQL

SEQ ID NO: 140302 - protein, 250 aa, Heterodera glycines
MEEINPKLSDIFDKTEKGAEFSFGNHIFNAVERKNGIVGKLLYDWEKKKLYEWDRNQMSIWVAKQYKNPDPPEHRHKLYEHGLTNSDNHERIHLIIHVLLVDAVFDRLARDLCSKTAFEVQFRNWAAVAKQMEGEEIRNYVCTPLNNVNCLLSACWAGGGHVWPKGLWPNFIANYRTQLRDRPWAGKIRQNVFRHKKIVIISGISWMKRNPAYDPKIREQQLGIHSKKSKKLFVREIFSKFKFRFYKLSF

SEQ ID NO: 140303 - protein, 135 aa, Heterodera glycines
MVKNLLVEYRTECFVNPHKYSSWAFTALWLSITVKNLLVEYRTECFVNPHKYSSWAFTALWLSITIILCLGLTIYHLLVLDLSFALTNIFVGLYIGAMIASLIEIFIFSLVRKSNQKLFDLRPGNYKNQPLRFGT

SEQ ID NO: 140304 - protein, 292 aa, Heterodera glycines
KITAAGKVQSNMNLPIENSNYRDVLLYLAGKNSNHYGQDYRENSNLRQEFKKFKKKFARLNTVPSGFHTDWQCDLCIFDQLKKHNDGYRYLLVCIDVLSRMIFSAPAKSKKSEDMIEVFDRVFKKSKIIPMKIYSDSGIEFQAGKMKKYLGKFIIKNVMYSPDLHTGVARANRTIKRLYYFTKMETLRWVDVIDKIVSNINNSVNRTLGVKPSSINFGAFWEKLYKDSKKNKFKIGDIVCISKEKGKFAKGYLPNFFTEVKIVVVNPTTPGSFKIEHFKGNLIKSIFYNQEL

SEQ ID NO: 140305 - protein, 147 aa, Heterodera glycines
KFLTPGAMCDMLWSDPEKECVGFAISPRGAGKECVGFAISPRGAGYLFGSDVVKLFCEKNGVEMIARAHQLVMEGYKWHFDNTVLTVLTIWSAPNYCYRCGNVAAILEMDDVLKKEFLIFEAAPQVGRNTPMGRNTPMKGPMPEYFL

SEQ ID NO: 140306 - protein, 20 aa, Heterodera glycines
MAGIGTKLWGDSGGGGGGRT

SEQ ID NO: 140307 - protein, 274 aa, Heterodera glycines
GECGVVVSASPAHRLPIQDDKDGHLIYSNGDRIDNKFEIVKTLGEGTFGKVVQVKDLNNPKGPQRALKIIKNVSKYREAARLEINVLRKLKDKDPDGRNLVIQLLDSFDYHGHMCLVFELLGLSVFDFMLIHAVKFLHDNKLTHTDLKPENILFVNSESDVVNGGEEAKRKKQFRDASVRLIDLGSATFDHEHHSTIVSTRHYRAPEVILELGWAQPCDVWSIGCIMFELYSGMTLFQTHDNREHLAMMQRILDGIPYRMGRKSKSVLRAGLIC

SEQ ID NO: 140308 - protein, 43 aa, Heterodera glycines
MLSISIDFDLIDFDLILLIYFDFIFGHPYIYHLLYDILSEQSS

SEQ ID NO: 140309 - protein, 17 aa, Heterodera glycines
HKHLFDLFYHIHNLIKI

SEQ ID NO: 140310 - protein, 372 aa, Heterodera glycines
CPSKFSIDYILSIPAKKPRHGIQAGAGTSSAKSAKDFVKKLESSIEHVPRFQYVKAKSKFSIEDVPANPEGLLAGIFQFCIDEAVVESEQRGVKPTHLGCLISSPLLTGGDIPIPIRQITDNTVDTILNQFNKVAQSKQQQNVTLWGEPFTVTVTTVDRTGLPDKRSLKGGARRSLASVHHRINDRCLIKIRNQDGYCLFYALQATMVAKTRGWPKWQFYNYMHSRYGQQGCLQRDVLDLMQQTGARPGLNAYEAEVFVPRVVDYWNNNNDQQQQQQQQRFAVFIFGSSGQYKPLYKYINDRYDTPIVLYFNNDHFDGVQKEYGLFGQNYCFECEKPYDRPSRHLSSCKAHCLLCSRVGPRFPCSPLRGFFR

SEQ ID NO: 140311 - protein, 147 aa, Heterodera glycines
MSVQKMPRQSSRRLALVGCVISVLLLYTFLFGWPGPNIYSNKQPAIEHCVADHMIRKGISHPLVNGQAEDGTYWRGWHCAKQAMKMAFWCPSPSIFHIFNPENRVAFAGNGFLGIDMALDRRVLWRRIQIHTIIDACSESIELTRGL

SEQ ID NO: 140312 - protein, 95 aa, Heterodera glycines
RRVRSLNFSTKFMCSDNNELLKDPSAAHKLTLLLANRHRCHKSRKTLADFLRKKFHFHNRRVKNCATNLTTTTKFFTDIRKGCYTKSIERGGGIS

SEQ ID NO: 140313 - protein, 119 aa, Heterodera glycines
MALCHCGNCGEKFETDVGGDDSRLFIGRTDQCPIGCVDLENELCAIVEAMCQMCADGTAAEAVRAACAQAVGICVYLSIEGWSGPGPKHGQLSMEVPGFSTRKVPVPVLPKIPGPDLLY

SEQ ID NO: 140314 - protein, 44 aa, Heterodera glycines
GGGGGSVCGRERLELLSEMDELESVHSSMTGGGADIGGCGDSGA

SEQ ID NO: 140315 - protein, 180 aa, Heterodera glycines
IEPYTSNVYSRRVLSGDFQIVNPHLMKDLIELNIVNPHLMKDLIELNLWDDQMKNRLIAENGSVQNIKQLPQEIKDLYKTVWEIPQKDILKMAADRAAFIDQSQSLNIHIAQPNYAKLSSMHFYAWSLGLKTGMYYLRTRPAVDAVQFTVDKMALRGTIAKDESVEIDVLKDDGCLMCSG

SEQ ID NO: 140316 - protein, 18 aa, Heterodera glycines
YREAIPEGFGLPINLGAS

SEQ ID NO: 140317 - protein, 68 aa, Heterodera glycines
MTLLTSSSSSLEDLAALDGCSNTSDILLADSLLSDIEHFATHCLALRNLLATTAAATAHKNGATAGKM

SEQ ID NO: 140318 - protein, 87 aa, Heterodera glycines
GVNYKVGKFPFVANSRAKTNNDVEGFVKVIGDKDTDRLLGVHIMGPNAGEMIANAGEMIAEATLALEYGASCEDIARVCHPHPVSWF

SEQ ID NO: 140319 - protein, 202 aa, Heterodera glycines
MIKFEQNDQNEQNENTSGVDQMGEEMGNGPNDQQKRETVKKFDAIKEKLKEKGKFEWKNQSKTERKIAKLLGTNRNSIQKWKNELNLKKNNKKKKQFYEQKKRKFIEQFGEFKELYAQGKQKEFVKELGISKDTFRKWKKELAPKYHKTQHNNVDKLKKMKQYYEIKESNPQISDRKITEKLGITCRTLLTWKKKFASFSTI

SEQ ID NO: 140320 - protein, 718 aa, Heterodera glycines
MDELVTGIHGVFVYLDDFIVATNSMDQHQQTLYKFFSRLQEWGLRVKFEKCKFLCTELKFLGHIISAEGIRPDPDRSRMINEMPAPTDEQTLRSFLGAINYYSRFVSQMREIRAPLDELLKKDVQWRWGPDQQQAFEGAKKIITSDLLLTSYDPAKPIVVAADASNKGLGATISHTFADGSEKVVEHASRSLTPAERNYSQIEKEALSIIFAVQKFHRMFIRYISTKNFGQADVLSRLIKQHRDTLQEEDKVIASAQMAQNLDNSEDDNIEFCAAAVDYMFQTTIDQLPVTADEIAEHIKRDEEMKKVIEHCRNGWPKTANESTMAAFYTHRLRISEVNGCLLMGDRVIIPSALRFRILKALHFTHPGMVRMKSLAKQFVYWPKIDMDIERWVINCEECRSAAKAPSKVLLHPWPSSTEVYERLHMDFAGPCADGNKYLVVVDSYSKWPEVIKMTTTTASMLIEKFVWLFSRNHCIKQTFSPPFHPQSNGRAERFVDTLKRQMKKCARDDVNWVQNSLLAYRSTPNASLNGRTPAELFLGRPVRTILSLVKPQVDKQEKGNDKYKQRMIKQFNQHHGTHERKFGIGDQVQFINYQHGTKTWLKGMIESGNGVVWKVQAPKLNAVVTRYSNQMRKIYPIPYKEHHEQLPDEHPQQQPPNDQPEEVQPRSPRRVRFADELNEPLERAQSPPTLRRSTRERKAPKILNPDASKARYDYVYR

SEQ ID NO: 140321 - protein, 37 aa, Heterodera glycines
MLSETVKIGFIGAGKMAQALARGLINSGRNWAKRKVG

SEQ ID NO: 140322 - protein, 249 aa, Heterodera glycines
MSDHTRAKRNVQPEQLASQLSAAQLATTMALSQLYLKECQRNVRVSNPTLQARKLLKRENLQARWISETTIEVFPCVPISLSNISYRTTKDCYKFIPVTIHLLNTTQDAFLDPEMRILSLISKIASCSQFRYHHLQVQQKPNLWVRIDSKNGNVQRLAQTAIHELYETILNKTDNDLDLHPLIFHQWQLDNDTNFANFPHIDEFEDSEDFKNKLEQHTTQRAEALGALPGGIEGWTIRWLQERLQEAIQ

SEQ ID NO: 140323 - protein, 27 aa, Heterodera glycines
MRFSTLGSDCSSSYYGLPGGVEEPITT

SEQ ID NO: 140324 - protein, 44 aa, Heterodera glycines
MLKGCLYVILALIAVSLIRWANNCYVQLKFQIDWFMGSGQTPKK

SEQ ID NO: 140325 - protein, 279 aa, Heterodera glycines
MLSLLSLLLASGTVLKADTERWTSQIYPNPRRNHTGCNTWENSTLCDPDHILTDQWRAQINENIRSQMTKLTNANVTLAEKAPAECLTNANVTLAEKAPAECQNQSERITIYVLLAKQIWTPNNKSIPGNDLTNFGDELAHTNFGDELAHRYGLNDLSCKTFLLLIGIEAAKLAYVRTGKDFRMPADLMQRVTGKDFRMPADLMQRVFHEYKLFSAKSFMAGLNKIIDEIGTQLDDPFKDTAATSLSEIVNALMEKNGDGEGGPNGSATAAPSWMCPIC

SEQ ID NO: 140326 - protein, 68 aa, Heterodera glycines; identical to SEQ ID NO: 127362

SEQ ID NO: 140327 - protein, 69 aa, Heterodera glycines
MFCCSIFFFFLFIESFCALKATTHLNFSPIVSELALKIVEECLDEYGQLVETRPFIKRISSPETVFKNY

SEQ ID NO: 140328 - protein, 183 aa, Heterodera glycines
LAEFKDRRANASEKVIKMETIRESIGDKAEQVKQLEQLIAATGCELSETERQLRTMERSKQAKIDELETTVQQNLRKMALDVDSINGTLDKITEIGEVFLLLLTAIVICECGAGRKNGQAGCERHTVGRGGGGATGRNGAGSKRGGGRGGGRGGGKGNGRGGGRGGGGKGGGRAQQPEAEEDE

SEQ ID NO: 140329 - protein, 122 aa, Heterodera glycines
MRIEVGRGKAQTRDTIRAETNRDKSAVWDGITEHSNPWDGNDEKLQLNVHGVDICVSDEVVSQLAPFIENPAENAHPPALELSVQKCRIEIKDPKKKFPIRIGFDELKFEDGPVSSKQTSAS

SEQ ID NO: 140330 - protein, 42 aa, Heterodera glycines
MARFFLCSAIFSPLLLLMLFDKIGEKGMVEAGCCCCCKGQFA

SEQ ID NO: 140331 - protein, 47 aa, Heterodera glycines
MDYVKSLPLHDGVEKQQKKMVGDALNQNVEDENLRVYLLMEIQAKGF

SEQ ID NO: 140332 - protein, 32 aa, Heterodera glycines
SPIRPFEFCSKGFQTIIVAFPSPPKCTPSSQR

SEQ ID NO: 140333 - protein, 18 aa, Heterodera glycines
VGFFVLVVCELVKKWGVT

SEQ ID NO: 140334 - protein, 168 aa, Heterodera glycines
MPEPMELDQEPGTSTSTSSARPGPSTNQQVISSLMLISILCLLFTGTAQGQSSRQKRFAEIKTWHGGHVSNFFNIFTERDRRASTKYSPYVQRYINKVLALNRSLSQSTNPLTPTTPTWTTTQPTTTTSQPRTTTTTATTTTTRTTNWPTKSNTRPTARITTTTPMPW

SEQ ID NO: 140335 - protein, 87 aa, Heterodera glycines
MKRLMVLAVAGKVAEVKAVGHSSGWEEDEKDWCRVARKLAMTSTRWAEIEGEEEKRAFVKREVRRLEGWAMRTARKELDAEWPDVLR

SEQ ID NO: 140336 - protein, 47 aa, Heterodera glycines
MENISRINFLILLEWSPLSIFRDLCPYFHIFYFGIYQKNLYSRFPIS

SEQ ID NO: 140337 - protein, 188 aa, Heterodera glycines
TPAETETTPAETESSPAETETTPAETETTPAETETTPAETETTPAETETSPAETETTPAETETTPAETETTAAKTETTSAETDTTPAETETTPAETETTPAETDTTPAETETTPAETETTPAETDTTPAETETTPAETETTPAETETTPAETETTPAETETTPAETETTKAETETTPAETETTPAETE

SEQ ID NO: 140338 - protein, 43 aa, Heterodera glycines
AAPADGIRGPHDRRKAKYIRQDNNLQALVADLTSVIRLNTFAH

SEQ ID NO: 140339 - protein, 15 aa, Heterodera glycines
LKAIHCLPVLGTAKH

SEQ ID NO: 140340 - protein, 53 aa, Heterodera glycines
KKTLRIIRIGQMLGLGWESNPLVHPFHGQALPLSYRGTSALSFMDYQARFPRF

SEQ ID NO: 140341 - protein, 143 aa, Heterodera glycines
MRCAVTAITSVLERTSAANAQSRAMQLLRALFAAEDYEGFSAKVTCCNCWLNDDDDDVVMDKKANFAGINEATNNDQDDDAFEQFANSQIIGEDNDKIDASASSSTHKRRGYIIEEKIRILDCAKMSSIHVASRRFSMDRNTI

SEQ ID NO: 140342 - protein, 121 aa, Heterodera glycines
MCLFHLSQSVLRYVQRHGLIREYEANENLEQYIRSLAALAFLQPNLVEGSLDILYARAPMVARPVFEYFRKTYIIRDNGEQPLFPVDSWNHHQAVIDDLCRTNNAQVSNLRGQTDLLLKII

SEQ ID NO: 140343 - protein, 61 aa, Heterodera glycines
METYLRRVLEIPNLIELVKPTTLSSNIALDLISEFSLNLYSSNFMHGIEAVQAQVAKIGQI

SEQ ID NO: 140344 - protein, 160 aa, Heterodera glycines
GKTNLSHDGLNPAHVPYWWVNNPTLGEFCFAMIGRADIEGSKSDVAMDAWPPQASYPCGNFSDTSCWKLYTLKDRATLSRSVFVLKIRIKAFAFLLYERFPSSLSSLGHLRYALTDVPPQSNSPPDTVIGAGRRATGWPDLTPKWTPLRAHSRFTDVRNR

SEQ ID NO: 140345 - protein, 194 aa, Heterodera glycines
MPKQNEIVLKYSFLDLTWFLDIEAVFYAISKTVVPNPQIFESGFQKKCLVVKTIFHISLHNFVSSARIETGIRPLERAARALQEVKKLFEFLQFCFHNFRKLFGIIMPKQNEIVLKYSFLDLTWFLDIEAVFYAISKTKKCLVVKTIFHISLHNFVSSARIETGIRPLERAARALQEGMERKNSYFWDFFRNQN

SEQ ID NO: 140346 - protein, 236 aa, Heterodera glycines
RLSDFAWMETLAWLGRAEVGMKLALVNTRFNMLVDKQFMLRQWRFGEFHICEREGAQRGGAEIMTSEDGTNFITLPLPTTPMPSSVVGFQSLSIWFINADVIKFLRRIRRLFAEDIALEFSTRHTEFRSWQVIARHVWPLLRDGISTLVCLRKCDLAMLRKHVSPTVLFDCPDLHQIRTDMVPECPSDAAENTDPTCRELYTWIHSPRDYRQAPISVKLIKWRQTKWDEFMNNLCR

SEQ ID NO: 140347 - protein, 75 aa, Heterodera glycines; identical to SEQ ID NO: 124542

SEQ ID NO: 140348 - protein, 43 aa, Heterodera glycines
GREAALIAQQIYKRARSARLRSRSCVNSPTIEKRARSARISPT

SEQ ID NO: 140349 - protein, 63 aa, Heterodera glycines
MPLHISNFNGICQLRPAQFGIVLEWMNLGSVWAFLSEQKTNSANSVKQLDSKDLLRIAIQVWV

SEQ ID NO: 140350 - protein, 45 aa, Heterodera glycines
MAKRFVANQKKKASFATTSAADDNKFATTLATETWAVKTLIKLVK

SEQ ID NO: 140351 - protein, 25 aa, Heterodera glycines
MNVPTWYCEWKEMDLFEELCPMPSM

SEQ ID NO: 140352 - protein, 143 aa, Heterodera glycines
MKFEELNGLDAENFVSKLGKIFEKSAWVVQEAYGEKPFESVDQLFNAMERVLMNAGREKQLKLIQAHPDLAGNEMFSGNLTQHSTSEQANAGLSALTAQQLAEFNSLNSAYKSRFNFPFIIALRDQKEGSNIISYVSYFNLFI

SEQ ID NO: 140353 - protein, 80 aa, Heterodera glycines
MVITKASFSKRFRNCCARLGDGCQQLCSYDQNLGTIQLAVLTGSKKNKAYTVSTDTNPTPLPPTVRVSGRHRLLPSICRF

SEQ ID NO: 140354 - protein, 92 aa, Heterodera glycines; identical to SEQ ID NO: 125147

SEQ ID NO: 140355 - protein, 215 aa, Heterodera glycines
GRLVSMDHFRDPHKGNQLHYYAIMHRFSGSVFLKPEPMSFSELLKTAQENEEVDMALTQLCGHDEYENEEVDMALTQLCGHDEYGDGRVQFSTYWERVPGADSRIWFAGSPESDVQKSLFEKDGFRLISLCGYSIRKTATARFVGVWQKPALRTVPYEAHYGVTLSECIELNDRLAARRENKESVRQLTNASEISCGAIASFAKGRSKRRIGATG

SEQ ID NO: 140356 - protein, 558 aa, Heterodera glycines
MMPEKRRQFDHWYEQHREEPFQLDEALASYCTNDVEILMAALVAFRREFFDVSKRNEYVDGIDDRENHDGIDVLRECMTVAGACMKHFRLNHLPAEHLAIVPEKGYDNTQNQSKLALRFLFWYAEENNVQVQTAYSPDGEKKIANYTVDGWIEAEGCVIEVNGCVWHGCRKCFPSDNMMLPNGKTAGEQRERDAKRLQFLRTQVTRVDVFWECEIQRMLDRSREMRKKFAEYHPTDWTSKTNPFSRIWPRFLVYHRSPPRLTSPPRLKTKIEPRPPPPRPTAKREKQQAKLDWKKNQHPTPAPRAKREPELKLDPRPSTSRQAGYFPPPTTKIEPKHAPTKRPVPYRIPEREPKIREKPLQQQQPPPPTAVVEEMPYVPPPRRGTKRPHPVNDENGEVHIRKRVRQPRRVRVQYSPEPGPSTSAQAYEQQQQQQQRELFAIQSNQLTMTQRIERLYIKCNHYADRMGVRGNTINTANGKPLAHSNLRMAIKYIIDRRAGRPTIKPPGANLLEERLRKDPILYSWTAPPKRPSQSKTTRTERTIKKEFRPKNGADQHHS

SEQ ID NO: 140357 - protein, 265 aa, Heterodera glycines
LSKIGGDELADSVQMRLLRDENARLLSALGSVKADKAVLKKQLDQLQQNDALAEHQQTNVLKQSKLSPTRTEKSQQRHVFTLHDNNNGFTGCTSAHNQQHKSPQNISNRNSRRCSPRCPHNRHCPPPPPRVHHQHHHHPPHCHHRPQFLHRLRRCPMYRLRLPHFPQFRHVRPPSARPPAFRSISALPPPRLLFHCPSINTTIRPPLHRPVVLLLLLAVVLTTRNGPPPRRRAAAATEGRWWQTTGDEQRCSGQKALAAVTANGT

SEQ ID NO: 140358 - protein, 105 aa, Heterodera glycines
MCVQSAPETRANTELRQAVQDKLDVAQIQLRTKALLESDAGIDVEMTPRGREVLDTLSFQLCSLTDLYRVANAYGLEEVKLSVLHCAGRYDAEVVEGVWRDFLQK

SEQ ID NO: 140359 - protein, 79 aa, Heterodera glycines
MNRYTKMVDDVTARLLKTSILPEHMKTFTRKEFREAPKITDELAADDELMPYMPRPYYSRPNRLDKDYFDFDLQHSVDM

SEQ ID NO: 140360 - protein, 191 aa, Heterodera glycines
SVFCAFCVIGTTRECKAFLFFYLRKTLPIKCSLDNRSLTGSYATKGSNETVATVLKLMKVGLLEGYAVRRIKMFNDRVFLSRYRRSYWFGTRYYALDNNFFLDTRETCAYRMREEERDGLEYEENADEPVLDIVYQCQKYAQFCCGLDCCKCQKYAQFCCGLDCCKWEPIAMDPKPIRPRPPPSIWCLPFV

SEQ ID NO: 140361 - protein, 242 aa, Heterodera glycines
IIRSEPIFGFIPRIRFSDKGSYVESATKDYDHMAFKYLSWALFPLLGSYAVYSDYDHMAFKYLSWALFPLLGSYAVYSLVYDEQKGWYSWVLGMLYGFLLTFGMLYGFLLTFGFIMMTPQLFINYKLKSVAHLPWRMTPQLFINYKLKSVAHLPWRMLTYKFINTFIDDLFAFVIRMPTLDDLFAFVIRMPTLYRLGCFRDDIIFLIYIYQRWIYRVDPKRVNEFGTTGDDQTGTEISGIEA

SEQ ID NO: 140362 - protein, 109 aa, Heterodera glycines
MKPCEHSDWDQSAVEKLKSEANATIWESDQMGRTVVILYRGGRVKARVFVMAKHLPPKPMAKLSDFIMWQNDKETEVEDAMLTTRISIQKDNLMLGEGDTAAEKGDKIV

SEQ ID NO: 140363 - protein, 77 aa, Heterodera glycines
LITVVYLFLRDHSNHISYTDKFHIIARHYRLITLSIDRSFPNVLSPITLFALIRLPSFPLPFLLIHILCKNSPAPPP

SEQ ID NO: 140364 - protein, 257 aa, Heterodera glycines
YLHDEKQLFLLINFSYIFYFIYRYWPKQPSRAELALFGWTVGLRTAYCQQVPAQELVDPFKDAVVRMLNRHCRNASACRLKKSVSFSKHQIVLLDGYPRREHRILHFRFFVVLPHDASMDKKPDKPLLSMDKKPDKPLLSNQILSEMLDSQIGELSHGLGWQVMLDSQIGELSHGLGWQVLGHDKYPRFDPATTFFNFFNRTLIPIAVLAGLCMFFLAYWTTAFTSGSSSGGWLVRGSSGGKNAALRRTMEIIEEQK

SEQ ID NO: 140365 - protein, 136 aa, Heterodera glycines
MPIIAPNVEEKAAVDQQQQQKVAKKGATNIQPQQHEALPTSGAKGPQAAQNGIQQKYLGPAKGSLSSVSGSSSTKRREMEEMDDMVPEIVVMHAHTSSQESRETAASGGRRVSTAAEKGYRESRQKSYVFFKNYPG

SEQ ID NO: 140366 - protein, 117 aa, Heterodera glycines
MLLAIVFFVCSIAFPQPIFSVIKSKPKNLVLIDRQIYEQKLAENDGTGELREFIQKLEDQNETMAKVIEKCEAIEEREDAKLAKIYFSLKTKLGEIKGGEGILFLCKYIFFPGFSIA

SEQ ID NO: 140367 - protein, 74 aa, Heterodera glycines
MAHPAGDVTDAQVLEMSSDQIDERVRQLDEEIRVMRDEMRKIAYNIKTMGTKTKENNKQMQKVSKQTKGGTTNL

SEQ ID NO: 140368 - protein, 146 aa, Heterodera glycines
MNNENGTLPSVSTIKKKANATGGGYGVVIHSFDSQNKNSAQSIVYVDHNRPLYVVPRYLFDVTYLTNQGFSKSQVNKRSIELGFGANIQFESRGNQIVYFDRCSKGQDWIKIGEQLLLQDKDRRFFFEDKAKNYVNIKSKAHSWSS

SEQ ID NO: 140369 - protein, 50 aa, Heterodera glycines
MPIKRRKRWIDFVLFVDQKKIIALIFIGFKNVMEFSEFFCRYLSKFKKVM

SEQ ID NO: 140370 - protein, 110 aa, Heterodera glycines
FCAQPSGEWSLDGLFGGTRIVRARVAQCQHSVGCAIYEGGYIRLHCATDARPNDVKLRWSWDGEPRRLEVVDAQNVLINGLRFNDNGRRVTCTAENTIDVGTGVFELDVP

SEQ ID NO: 140371 - protein, 224 aa, Heterodera glycines
RNMRVRPFFTAHFSQKNFQDRVEYSRTWQGIYFNIAGHFFSVYCIWKLIICTVNIVFDRVGKVDPITKGIVNIVFDRVGKVDPITKGIEIIVKHFGYQIDVPFWSQQCSFLVIGLIAVTSIRGLLLTIAKFFNAISNRQSSNLIVLVLAHVMGMYFVSSVGMYFVSSVLLIRMNMPPEYRTIITEVLELQFNFYHRWFDVFLLSALSSILFLYLAHKRHQINRQ

SEQ ID NO: 140372 - protein, 196 aa, Heterodera glycines
  unsure (1)..(196): unsure at all Xaa locations
IGSSLHTDRSRNTNRPRISRNGSVPGSDGRCVQRAGTYSERVDDSPLQGIPRSRTIIAMSDPNHGKFSPVYQPLSGKDKHADFASVARVQPRTSKGXHRPVIAQFRAAEHRKSLXEVVPTEAMSQLFSXARVSLVIGINQTNRSTNXERPCTTIHRIMKKLSICQSLRCPGRVSFPVLSQIKPQAPLLVVPFRQFL

SEQ ID NO: 140373 - protein, 462 aa, Heterodera glycines
RTGHWWCQRAHRSRVVNRNHLGNDPAAGSPTATLLRLLPGKPLRLNRFQSAYRPKPEHPSPNFSKWLSPGSDGRCVQRAGTNSSFTDNNCNVRSQSNSSFTDNNCNVRSQSRQIFTGFTLILPVARVQPRTSKGITDLLRQIFTGFTLILPVARVQPRTSKGITDLLLLNFVRLNTENPSKKLCPQKQANYLVGRVSLVIGINQTNRHELRTAMHHHPPNHEKAINLFPVLSQIKPQAPLLEKAINLFPVLSQIKPQAPLLNRKTFVSGKLNRKTFVSGKLPTRANKSAGALVGIVYGQNGGISPSNLLSLKTFAKCFRCSPSCYGPRISPLTQYEWPRLSLLTIISVSKTNNRTEILFYYSIFLTAAIILCILRAGITAAAGTRLALSILVKGFKLYPFRPASEIGLVISRHYLLALRVAISQAPSPESNPYISQAPSPESNPYPPLPVITMVVRYTTIES

SEQ ID NO: 140374 - protein, 81 aa, Heterodera glycines
LLLASAMVSMLCLISGLFLLPPDIHSFSSTPSEQDANRQIPLTTVGRLSCVTEAGCVLSDTSQLNFLVVGDIGGLPVFPYY

SEQ ID NO: 140375 - protein, 161 aa, Heterodera glycines
MFKTAMQLSIIENGICYTIIIICGFKIAKFVNKNAYRNATCGQQVHKQLTINLIIKALLPLAMNILNFSVAIQLLFFQTEMSPNFLFLQMCASVPAYWLPVLNPLVTICTVSDYRSAVTILIRSTTRSRSRDSGVFAAADLPQIRVIRPTNYANPIINNYV

SEQ ID NO: 140376 - protein, 50 aa, Heterodera glycines
SLFTFELPYAYSADDRLDLNRYDPYELLARCRHFVQQRDLLNAVRVANLI

SEQ ID NO: 140377 - protein, 90 aa, Heterodera glycines
NRNYAQKAPQTILALPIPSTIAFIHPIMSAKIIRVPKIACDLSLAKNGVSKNSNYAQKAPQTILALPIPSTIAFIHPIMSAKIIRVPKIA

SEQ ID NO: 140378 - protein, 75 aa, Heterodera glycines
KQIKQLIANMTSLNTTAPNNYELFLLFCGDAVELLTTFVGIPLSIANLIFGGSHIGHPPEHRKPFSSSRVSLFSW

SEQ ID NO: 140379 - protein, 160 aa, Heterodera glycines
MGKKHSTREWNKIERKIAKKLGTNRNKIYEWKREFGMIKKHYYTDEEKRKILKRFDQLYDKINEKLNKKLKGKRKICQKIIAKHLGTNISSIYYWKKQFQKGNSSVNNQKTGDEKREIVEKYFKTKIKFMQNGKHSLKEWKEFRAKIKQMFGVNYWTIER

SEQ ID NO: 140380 - protein, 188 aa, Heterodera glycines
VRGKFLIGIFVPDLGVHQFILGPLQAVGNEFAHIQMLPYQEQLVYDSKLPNYGLIDGPTVRQGRLQIRFRDRWRSVCTQMTNWTSIDTGTACRTMGYDDGAFWRFFQRNNDTYPFVMPAPKCTQRQNSLWNCPGFEDKEHIPSLWNCPGFEDKEHIPLSENLCQGEDDIGIYCWGRPTFTGWARHWKG

SEQ ID NO: 140381 - protein, 169 aa, Heterodera glycines
MIILGRDSLVKDETVDQIMEQCQRIQQLCSRFPSVSFIWLPPPYVRQYDLAYHEMIGRLSELLGDWFVFVTPFGRSLIEIWHYGDSFDRSSVNADGWMTENGIKALSAWISTQIPKWPNNRQLGRIRTVRSSVSVTRRVYGLGLCDRRPNSRSRSPFRRRDNRQSQPFV

SEQ ID NO: 140382 - protein, 372 aa, Heterodera glycines
MKILLIFLLLCALIFKKAINQIEAGKIIQEKSFAEIFGQRWDDGAEEENICQNDQIIHGEIADQNNQFGQNVRQFDQNFDENVEVKEEESEEMSTDYDELGDQLPMPTNNGQSCDKFSNETNKNKRETVEQFHKIKEKVKQMGKKYSKKEWTKIERKIAKKLGVSQEKIYKWKREFGMMKNKNYSVEEKRIMLKQFDQIYAKLKMKLNEKLEGKRKKCKKIIAKYLDIDISSIYKWKKEIKVGKMVKNQKNDDEKTEIVEKYFKIKNEFMKNGKHSRKEWKEFYIKIKQKFGVIFQTIEKWAKNLGIEQNNSKERNMLSIAEKMEVIKQYYQIKKQNPKFKEYEIAAKLGIPMSSLDKYKTKYGNESKNKLL

SEQ ID NO: 140383 - protein, 104 aa, Heterodera glycines
MLRNIGILSLLAFFFLCGTINGQQPPLANGLEPTRQRIRNTLGGFYSGNVTLYFRNSPYRKFFLSRVERELIVESGATITIETGVQMYFDTGVGMKGPGLSWPG

SEQ ID NO: 140384 - protein, 89 aa, Heterodera glycines
MNYVLTFFAEKILNFPMENPSQIDLSPFLLFFNSSPFLPAGVVSQQWTNKCIFPIHILSIVILRPTSDDCAGPNSAKANIPKNKMPTIK

SEQ ID NO: 140385 - protein, 103 aa, Heterodera glycines
MAFLEFCNNSAAVAGAAPAVVQPQHGPVLIANSTISHNRGHGIVIESTLDGRAFVNQSRIEANYGDGIFYRQKHDGLSSTQNRLGLEIGIPLSILDKKSALSE

SEQ ID NO: 140386 - protein, 302 aa, Heterodera glycines
MKIKIILFSLLIFKNADNIYAGKINDEKNFDEIFGQRWDEKSEENGEKETDQNGRIEQMDGQNEAKNDQINAQLLHETQFDQLFDENLQVKQESATNCDQLEQLPINFGQISDHFSNGIDKKKREIVEKFDKIKEKVKQMGKKFTRKEWEKIERKIAKKLGENQRKIYKWKREFGMIKKHYYTDDEKYKKVKQFDQIYGKLKTKLNGKLEGKRTKCQKIIAKHLGTNIRSIYQWKKKLKNGKTMKNQRIFEQKIEIVEKYFKIKNEFMQNGKHSRKEKMGQENWLKSNSFKGAEALYICGKN

SEQ ID NO: 140387 - protein, 162 aa, Heterodera glycines
MLIEFMNQKQLKQHVKEPTRENTILDLVMTSESELINELIVLEHFSTSDHKMVGFKIKEKFRKNSVVNGSLTQSAQNKTKLSDIELNVGIIWNILRKLPRRNSTSPDNISYILLKNCAEPITKILADIFRLALYSGQIPEIWRTSLVVPIFKKGEKTDLLGV

SEQ ID NO: 140388 - protein, 60 aa, Heterodera glycines
MQSNKKKIKFDLSNISFLFRLRADIKQPLTIRSTCGAHPHVQPGQCKNLEFVMSHDVGGD

SEQ ID NO: 140389 - protein, 21 aa, Heterodera glycines
MSSAICCRTKLNYVTLTYAYA

SEQ ID NO: 140390 - protein, 78 aa, Heterodera glycines
MSDYHHQQKGGGGSGYPQHQSSYGYPAIIINHDQHDDIEGYKQQQQQAAKGGGVGGMDQLRKEEPVQIGWMTEAKDWA

SEQ ID NO: 140391 - protein, 110 aa, Heterodera glycines
MLPGRDPGIPDLGVLSKRNGTGSWLKAPAWAPAGPVRSLIIMAWHTRPNPWPRSSNQFGPAPPCATDPYRRPHRPWLLVAVVVCTLRCRHVAAQVAQHRRPVRAVENTHG

SEQ ID NO: 140392 - protein, 243 aa, Heterodera glycines
QFHEQEGVFNHAPYSGLRFLRALRLMTVPDILQYLNILKTSSYIRLAQLLSIFISTSFISTSLAGAGVIHLLENSGDPWKDFVNSHRISYPDCVYFLLVTISTVGYGDIYCTTVLGRVFMVFRVFMVFFILGGLAMFASYVPEIADLIGNRQKYGGEYKGEHGKRHIVVCGHINYESVSHFLQDFLHEDREDVDVEVVFLHRVVPDLELEGLFKRHFTKVEFFTGQWRRRLYMKIKNAILSLI

SEQ ID NO: 140393 - protein, 109 aa, Heterodera glycines
MGGWGRRGSGVSREPSPGANAMKSFLANIMRVISIKNYSSDIRVIVQLMQYHNKVLFIHFSCHYMQFYSINLLLFFKAYLLNIPSWDWRRGDDVICLAELKTNRASEGL

SEQ ID NO: 140394 - protein, 128 aa, Heterodera glycines
SPHMAEWLNEYLRGAGMEMYTETLSHSFVGMRFPDAAQLLFTRLGLLLLAIELKDDEKKECNIAINPGPSTVIQSQTQGFFIAQSADEVKRAFYWCKICHADVYDVSLIKKCKCKNLSLFRKGGKAMM

SEQ ID NO: 140395 - protein, 288 aa, Heterodera glycines
MDQTDHSAVGPSSSSPSLPVSSTVPRNALLFDPAAPAEVQQQQNAAEEEDDQFYELTAEDLRKMLKALQDESKRQNSLLPTKLMKERDQQLKHKAYKHSIVRFRLNNGQILQAQFLSTEPVSALFIFLRQIISPTIRFELRQIPTTSGKLKSDDSTTSLLDAGITPKSVLILKIVAADNSPESPEQMNADQIFVVDSFQSCTQTEAKAEAQKWLSSNTEFRPYLDTILHMLPSTDNSTATAAAMPSPVMPSSSAPHDSGGGGTNSQSRNNSQRTTKPSSELPKWLKRK

SEQ ID NO: 140396 - protein, 33 aa, Heterodera glycines
MPEQFTLGVQQPSDPICHAWECARDAIQQQQHD

SEQ ID NO: 140397 - protein, 253 aa, Heterodera glycines
YKNDGKRVYLPFDPKPIDPKPILEGTRINSPHYLCQLIVREPGIPHYLCQLIVREPGIQRFTLVIAQYEKMKYEKMKTIYYSLRVYSSADFRCGNMPMPYKFHRKVAAEWRGPTAGGCGNAEWRGPTAGGCGNGASRETNNPLFHLCTEDGSDDNALLVELRGPKEFSVGFELAPVSLTRNDRTFETKDSGPFRPGFTVLQLDELPPGFTVLQLDELPAGTYSIRPMTFVAGQEGPFILRVDCSCKFELKRVQ

SEQ ID NO: 140398 - protein, 18 aa, Heterodera glycines
YREAIPEGFGLLINLGAS

SEQ ID NO: 140399 - protein, 36 aa, Heterodera glycines
RMGLRGRELLRQTGKIAAQMGGSFGVFMTVAQGIRC

SEQ ID NO: 140400 - protein, 135 aa, Heterodera glycines
MALITLREREDYYDAVRAEEEEAEKATLTSSTAANRGNEKQQEEEEEQEEARQLQQMMALLVANIDPVPMVYRQQRKAKNDSTNDGTDKGSNRVDNGLKWTGKRTTNGQKRAKTTKRQTMMMTKSMKPAKWLTRN

SEQ ID NO: 140401 - protein, 132 aa, Heterodera glycines
MSMIAYSEDADDLSDSEVVATFLLSNTSNIWLRGLQFSLAESMEQCFDALKNSGLPISAEPSEDGMPWCNATWDTVLCWRLRVFRNLIHLHLMVALLAVVLIRLVLYIDLIFTDRMGHQQLVNPHGKTINTM

SEQ ID NO: 140402 - protein, 35 aa, Heterodera glycines; identical to SEQ ID NO: 124958

SEQ ID NO: 140403 - protein, 315 aa, Heterodera glycines
MRHAMRMFLVPEDVFQSVFVQPQAAAAAAADGADGTPIGLLRSRIQQIERSRELNEEQKAAQYHQEFKRLNKLVREQEEQPINVRLQHEKEREKNAATPPPPPPPPPPPPPPPPQTIDHSTPKRLEKNIVPSAFGLRRQRHHYTQKAGALSNRRPAQKQQRKAAAAAETPNSSGNGETEKEEGDEDDGEQWDDAQSSSSTASTGGAAAKRVLRARDGEAGKGGGGGGETADRLQPKHNYQMTKNALITHIRKKGHSLGVSDQGKVLRADGSEFKTSNVEAIVSHLLNRDKRSEFKGPPVGYKEFAEKAREDPLLK

SEQ ID NO: 140404 - protein, 59 aa, Heterodera glycines
MSYPAAGLELKIFCGTGSRGINPANPAFKICGIPCGIAGFWKIEKISIKFKEFPKIKKC

SEQ ID NO: 140405 - protein, 58 aa, Heterodera glycines
MLSFRMIPTMLDLDDKKKVIVENHAGAHPLINDTGLSNDAKNVSKKSYKLSKYAALNG

SEQ ID NO: 140406 - protein, 56 aa, Heterodera glycines
MPLSANFTKLAAFSIGILALLPILSAEAQAMETADDEGIDAQKLLFLACIQGKLES

SEQ ID NO: 140407 - protein, 92 aa, Heterodera glycines; identical to SEQ ID NO: 125147

SEQ ID NO: 140408 - protein, 42 aa, Heterodera glycines
MIGRAVRNRPFIFEGIFKFILYPRKMAISFFEKFYTHKSACV

SEQ ID NO: 140409 - protein, 95 aa, Heterodera glycines
MLRTDKDELKEEKQRLKEVFLCANQQGWASPNAVAHVNRCNVSLGMDIWLHCWLGQMLNHSFPCRTRIATVDEGELAAELCLGTASLTQWRACAK

SEQ ID NO: 140410 - protein, 69 aa, Heterodera glycines
MKEEEEEEEVVQLYFEAKQSKKRRIQWPKNTDSNLRGSNPLRLKRNALTTRPHMQWTTDPNYHFLCERA

SEQ ID NO: 140411 - protein, 50 aa, Heterodera glycines
MTAKRMGDEIVDVESSGRSEEAADDEGARTARSTQQANCAIARIGLTWRR

SEQ ID NO: 140412 - protein, 428 aa, Heterodera glycines
MVITRSPILTRQRALNLEIAVDRNGHQINVGGNQQNSPQRQNHSAGESFPQNQQIENSPISPTELAGFNGENGDDSSLVLEPNMTEEELRRRLLVVSIERSQPPANGNAGNGENAEGLRNAIRENDGRPNFGVNGQTFAHQRRPHDTFLSNLMNNGIGNFPQNLVHVPRTSTPTRNVEFEQQIGPFPFVVDRNNRAPTPPLNIRQQIFHPIPLNAHRINQVSVNAQRNIDVQYVPNNCVNVPPNVQRHCDIQYTAPNPVAAPSNAQQIQAGSRLIQNIPMQAQLWQGPDGKMTLVYPQDQQQQVQIEQPNLAQNHQKFTRQVFQIPETNQEPRHFPTYPQPNVAPSNLEFNLILERIPDLNGNEGTDSVRRFFKKFDAYTDGWPNAKRISALESKVYNKAERAFEAAKSKRLTESKNLEIYLICNFNQ

SEQ ID NO: 140413 - protein, 267 aa, Heterodera glycines
GGTTKQSAHSKGQYRTKSGAKSGEKRRKASMPLEMATQTAKNNANFQNSPPLMPQHRPTPGTFSPPPNRSLFPPQSLGIVQIGTSLPPQNEQPLLRFAPFLPPPPPQHGILRPPVPLFVPPAADAFIPSQFAPSFDSSATASTINAMNMNMVIPPLMMLHQQQQSNNNAERTTATAAATWTLFEMLAKGTTPNGQQQKNEMGQQSQQNNNTNRGQQNGTTENEGPINVTSPSHSLVVCSPNLLRNSESDAQIDQLMDQMIAQRHADD

SEQ ID NO: 140414 - protein, 140 aa, Heterodera glycines
MAHFDLVVLFLCCFELVHSDVFGPFALFCFCSFASSATLLAHFALLRSSDLFQISSSDFVEYCRTFVTILAFGYAFTPVIRTLTTSISTDTIYACAILLFFASLFVHDYGINVPVVSLPLSANLCLAASVFLISRLQSDF

SEQ ID NO: 140415 - protein, 60 aa, Heterodera glycines
MVDRFQKGQCAAVEQQQKQNELNNTNNDEDADEHDELVQQRQQRTPIAPIMRQNSLHTLP

SEQ ID NO: 140416 - protein, 42 aa, Heterodera glycines
QLSSGSSSSASGAAAGRDVHVRTPLNDPRSPFKPLAYTSFEP

SEQ ID NO: 140417 - protein, 67 aa, Heterodera glycines
MSRKARDVMIKLREVSMRLGGAQYFKKRSNEAISCEKCGKLVINRLSDHAYSHLEGCDLFKCQQCNL

SEQ ID NO: 140418 - protein, 85 aa, Heterodera glycines
MAHFMQIENSAELYSNSANIRNASKLCPMRLFVGAMFSRLRDDFAKIEGSEKWHFDVVRGLAYLDLEFSDVALKKRRISEEQCTK

SEQ ID NO: 140419 - protein, 138 aa, Heterodera glycines
MTHLLEGAGDAELGCGGQSVQRERCNDTKCELSPVNDGGQWGEWQPCSVSCGIGFQFRERLCADGPCANSGKQARTCNVQWSNWSQWTNCASCSVFETRKRHRQCVVKVATANGQQEETELGQEACNSAGGQSESTEI

SEQ ID NO: 140420 - protein, 20 aa, Heterodera glycines
MTVFFRIRLMSDGPQQEAHL

SEQ ID NO: 140421 - protein, 133 aa, Heterodera glycines
MFHNSTYFLIVFLLHEILIFTSVHCTMAKKKLHQQQREENFDSTTSAFSPKFELHRRHHKHRLRRAVIKICVDFNRQPIACKWETEAQLRKKLMACHLSIITMPFCHRTVPKITRKMHKIQRDRRRGGIFSAL

SEQ ID NO: 140422 - protein, 52 aa, Heterodera glycines
MVLGFEFFATLSLLANWMVSVSVCCSTVTVFLAFPFFTWVLFEFAFFTTDNK

SEQ ID NO: 140423 - protein, 222 aa, Heterodera glycines
MSTVQLSGFVQMSTSKYPLSKCPDVHFPNVRITEIVVEIILDNCELLKKIDKSITNFIDAELEQKIIQQNCDALKNDKKIDDAKLSGEQLPILIQKHGQKMLEKLKEIETEKNVDKMSQILAPTNEQQQQHQPNWHNDQKMQKAVIIFNFLREIFAVLQSDSNANDDDDPMAKNAKSVIQQFLTTQSQKPTVVPMPSELMGLVIKLWPIIYNNAPQNQRKNQ

SEQ ID NO: 140424 - protein, 110 aa, Heterodera glycines
YRDSFVDAFTVPESVGTGQIAIAFYSGLWAYNGWNYLNFITEEMVNPVRDLPRAIFISCTLCTLFYVLANVAFYAGTSPDELLESKAIAVTFANKFYGAFAFAMPILVAG

SEQ ID NO: 140425 - protein, 111 aa, Heterodera glycines
EERASPSPKRWTKRKFVICIPKFTNLKSENGATRRRPSSLSDSLEAADQKIARLSDSLKGADQKIAQLSDSLKGADQKIVELTAEVKDLRAAAELQVQNGAVPPVPNLVAE

SEQ ID NO: 140426 - protein, 44 aa, Heterodera glycines; identical to SEQ ID NO: 126591

SEQ ID NO: 140427 - protein, 92 aa, Heterodera glycines; identical to SEQ ID NO: 131128
  unsure (1)..(92): unsure at all Xaa locations

SEQ ID NO: 140428 - protein, 120 aa, Heterodera glycines
ATRYLTNEFAGLVLMVDNYSSDNCLKVHSDCQNSTNVLSTRSSLLAFDSIPPLHRQVVTLLTHFEPSQSFMVTHRWVYHQTKFPQLRDFVPCTEFASAQNFPPLQTETIGYLHGPFPVYK

SEQ ID NO: 140429 - protein, 83 aa, Heterodera glycines
MPMPANDKVFNMSPDAQELEQRPLPEPQQAELLKQTGEQQEELLIQIGDVEDTLLLTEHEGEERKDEANQELGRTIMLSKLNN

SEQ ID NO: 140430 - protein, 27 aa, Heterodera glycines
MKKGTGTKKFKLEASNQVKNWFSFFIF

SEQ ID NO: 140431 - protein, 54 aa, Heterodera glycines
LVTNHHTNFLVPFLLPPFALQIYTFIKLLYFKFTNFVKDKIRLMTQRPPQSFKL

SEQ ID NO: 140432 - protein, 89 aa, Heterodera glycines
MGGRIKAQRDLAQAKDLLGNVAQHLAPIPRGQLRNLIASFFEVGYTFGMTPPHEANHAPTQENFKVQFDRITELLQNADATRINKASQC

SEQ ID NO: 140433 - protein, 92 aa, Heterodera glycines; identical to SEQ ID NO: 125147

SEQ ID NO: 140434 - protein, 63 aa, Heterodera glycines
MIGRAVRNRPFIFEGIFKFILYPRKMAISFFEKFYTSQKRLRMRRRAVHNRHFISQRIFIFRG

SEQ ID NO: 140435 - protein, 36 aa, Heterodera glycines
MTFIQNNFGLCRQMVSHRTLSGSYSMAFAYRSATSP

SEQ ID NO: 140436 - protein, 18 aa, Heterodera glycines
YREATPEGFGLPINLDAS

SEQ ID NO: 140437 - protein, 304 aa, Heterodera glycines
LCFTSPMIERLGAEFCDSLKYPRLLKTHFSWANLPKRHLQQSATTTNGTAQPKYIFAVRNPKDCCVSYFHHNRNFKIYEWAHGKFDDFFELFLEGRLMAFGDYFEHLLSWLPHLSDANVLFLKYEDMLNDLEGSVRKIGHFLGGHAEKLVNDQQTLSRIVAESRLEAMQRDQQRWFPGTALNGESFVRKGTSRDWKNYMSKEQSDRMGRAFRQKLAGTVAENWWRTEMRWNEAEEEEEEEKKEEKEEEEKENEQEQREAKKKEEDDSGMESGDDLLERSAKVSDDSLRLNGSPAPQGPTTTDSK

SEQ ID NO: 140438 - protein, 66 aa, Heterodera glycines
MRQPTQQMLKIVAECHQPAFKEQLEKVVEFAQSRVLQTVAKLGAQTLDHMRYDIPLVQFNARTMAD

SEQ ID NO: 140439 - protein, 159 aa, Heterodera glycines
AKLAFLSPMIERLGAEFCDSLKYPRLLKTHFSWANLPKRPQPKYIFAVRNPKDCCVSYFHHANLPKRPQPKYIFAVRNPKDCCVSYFHHNRNFKIYEWAHGKFDDFFELFLEGRLMAFGDYFEHLLSWLPHLSDANVLFLKSVWRSKFIQNFLFLLKFF

SEQ ID NO: 140440 - protein, 104 aa, Heterodera glycines
NGLSKNRNYAQKASQTILTLPIPSTIAFIHPIMSAKIIRVPKIACDLSLAKNGLSKNRNYAQKASQTILALPIPSTIAFIHPIMSAKIIRVPKIACDLSLEKMV

SEQ ID NO: 140441 - protein, 89 aa, Heterodera glycines
FLFKKIFFWVFGAVPLNRCAQIYGETESFGNSFPIGCTLILRWIFAPHNCLSTPNGHLKKSIFLFSGQSPRTDAPRFMGRPNPSGIAYL

SEQ ID NO: 140442 - protein, 62 aa, Heterodera glycines; identical to SEQ ID NO: 126119

SEQ ID NO: 140443 - protein, 129 aa, Heterodera glycines
MTHTLWVPPPIDSSTQQFVYSTIRLLYDSSTQPKCDDSSTRSNVNDSSIIRFVYSTIRLLSQNVTIRLLGQMSTIRLLYDSSTRRFVYSAKMRRFVYSSKKVRKPGFELEQTLKPFFRGFLLKKAVTIV

SEQ ID NO: 140444 - protein, 49 aa, Heterodera glycines
MKYSNEEKLRKTKEYFEIKAKNPKISDSIIATNLGIGWATLKKWKKKLA

SEQ ID NO: 140445 - protein, 304 aa, Heterodera glycines
MKAFILTFINICLIASMPSTPCPLFGTLQLELNNFLEYANEPVGSLRRGNSVNIRGMSWQLSAELTESAAEDGTKYLGLNLYCNNNCKIDANWNCFSMLEFRITVGQVDVMSKKLPATNFTAQNSSLGITNFIKIQNLVDVCRHLKDYTVQIVANVKPDQPCGTSLPRTDAILVKTSNDQIGVEVNINRNLLAAHSSSFNDFFANFQPPAESTSSTGGLSIMLDAPSTAEHFEQLMDLLHYGDCVLEDIYGLDALKEFILYNLLQESDFVAQYFLQNLEIIEQLSDGAKIALKQRIKELLEAAQ

SEQ ID NO: 140446 - protein, 157 aa, Heterodera glycines
MDDEQFVAFARHRHANAERISTWMHDEKQRPRELGQNQLGFFLMWLRYELREKEKAGWLSTVEIRTEGLSTDQDDLPVSISVSYFALALQGPFQPLSNYYALPFEFKGESYRSVEHYAYQRLFEALKFPPEEVMRLRTTVKPADVAKCAQKVFDKQQ

SEQ ID NO: 140447 - protein, 153 aa, Heterodera glycines
SIFDQIEPADVRAVPPRVHPLCWYAIWRATDRFRALNGRFPGSIASSQKGDAKELKEIVGKLFSETQNAELISSQDELVPPETIAEVCRYGGSEPHVVAAILGGCVAQEAIKLCTHQYMPVDNSLLFDAHSQQAASFRVVASQREEQRTRKTR

SEQ ID NO: 140448 - protein, 167 aa, Heterodera glycines
KKNEENREKKVANFLSEKWAIIKQEKPQLANIFTLLQTSFNTLKGDFGNVNALKMLKKQIVDAAFLLTDHIQISHDQILPLNRQNGLNMIKELAKLWVNSREFNGKCIVDENYGNKNENHGQTGEDDDGDNYDRSRQWQRKILQLILSAVDDEPLKMATNGIFRIKK

SEQ ID NO: 140449 - protein, 24 aa, Heterodera glycines
RTLSTAVRQRSSKIYSMPQILWAG

SEQ ID NO: 140450 - protein, 97 aa, Heterodera glycines
MVDQFVQPETAEEQQVKAKKPRVDERFLWKITRGQFVLAIRLCSEDWNNLFHNKDKTRRLEDGRVAIGLEMCEECARINCCVSDMIADQKKKPKTTE

SEQ ID NO: 140451 - protein, 48 aa, Heterodera glycines
DQFKWDDAASRVRTLDEAFTKLVDMNNLIKQQPPVPSVKSNNTNPFVV

SEQ ID NO: 140452 - protein, 463 aa, Heterodera glycines
MPSNGFSHVAVPYSSSSSSHHYPIPPPASCITVPSPSTEFSRLDISLANPCFGLLPAVATAATKTATTAATTVPIQPQQSPATYSASGQQTNKLERQSVPFHHRTSEESPPLAQNCENPIFDLIMMAANNKSAAGGKQRQLPQTANGGGTKKEDAEDDEQQKHLKRTAPPPPPPRSSLARFSTRACLPMPSEQDEHDELASTEELFRIGGNNGIGRGANNAASRLIGMRNAIDDDEDNDDFDGIGVGRGGWGGGRAEKRTKKMVVPNEDNNDDHDDDGTFAENVGVSLAGDGSDCLHHFQQQIARHHRHNRLHHHQAAPPIVVGPTSSSFSSSTLAASSSSSSAPIVLPPPKRKYHHHQQVHRLLMASLGMRRNGANVNNGTAPTTATVGGQHRRRRGTHFRHQQQSMLPTVPDIDDKEEETEQDELHHGNHDGSNTTTNCAATACEGGTAAEDKSHEIMAVQ

SEQ ID NO: 140453 - protein, 43 aa, Heterodera glycines
KCSISYCIFVDNNFPKNPKISTKIGRDSRIGIPSKSPIPINPQ

SEQ ID NO: 140454 - protein, 92 aa, Heterodera glycines; identical to SEQ ID NO: 129555

SEQ ID NO: 140455 - protein, 97 aa, Heterodera glycines
MLIRHKKSTGGGFSKIVMLPDGTEFNVNTNKCEGLWAQLKQKTKRIHGTSTNLTNSYMCEQIFRLNAKTKGKSIFNAFCDLLRHNYNFIRHNCLVNV

SEQ ID NO: 140456 - protein, 67 aa, Heterodera glycines
MVGGVEIDIKTVPWTVLFQGLVKRNEQNKMIIFQNCASIFISPEFVLLAAHCFDKIKEGKYFHLGKK

SEQ ID NO: 140457 - protein, 18 aa, Heterodera glycines
YREAIPEGFGLPINLGAS

SEQ ID NO: 140458 - protein, 19 aa, Heterodera glycines
AREQLASDASAAVAVRLTV

SEQ ID NO: 140459 - protein, 90 aa, Heterodera glycines
MARHQAQCVGQLFRVRCRVHLLPVHQIRAPVHLRPVHNHPAGPGRRVVEGRLITNPGSDRALPIHYDELYEGQRIDRLPVPIIPSLARCP

SEQ ID NO: 140460 - protein, 149 aa, Heterodera glycines
TSQDIRRRLSEQISVDQRRYKEFIDHQMLVILGQLDRPSKIFDYLYLGTEWNASNWEELKANGVQYILNVTKEVDNFFPTQFTYLKIWVSDEATTELLMHWQRTYDFIKEAKEKGAKVLVHCKKGISRSASTVIAYAMKAYGWGLDEAL

SEQ ID NO: 140461 - protein, 149 aa, Heterodera glycines
MPMAHGNRCVAIKVVDMNKIEPEKVNQLNNEAAILHELKARGVKLIPQLYTMYGRKTKGELIPQLYTMYGRKTKGELIPQLYTMYGRKTKGELIPQLYTMYGRKTKGELIPQLYTMYGRKTKGELIPQLYTMYGRKRKGNSSPNCTQCT

SEQ ID NO: 140462 - protein, 37 aa, Heterodera glycines
SEKNIYETKKSIFSSVRLGYSNIYGERKSNAELKYRL

SEQ ID NO: 140463 - protein, 932 aa, Heterodera glycines
MIGGERELSLSASSSSIGAPNGTVPPASSANGASSQNRSLPISAALLTQQQYPHGQQQHGQIVTKARDFPITIRSMRISLALLTNYHPILASQNELILTILLDLLWMPTNSWEAAVAVEVFRKIIGQPTLLKWLCAREEGAKFVELLFSRLYSFLRKCLEEGEPFAVFVLDWLDKHSAERIPEAYCLSVGFATLVDATGAVCSAVESGELLPAQNGATTAKEEMPKSEEKCQKANLDSSASLPQAYSDIAKELFQVAHSFLCSAISTLLDFSVDDSITEHLLTCLSSLVTLACKFGNADAKHSLLRAFCRAALPCQYFSRFVDSHSSASLALQSGAMANGSVGANSDLSLKDSSVEPTQVVAMGTVCPSPHHPSQFFNTTVMMTAKNLQVARLLIGCVHQNGHLLGDCWEMVLTTIQHFVWIVGLRPTSTGTFRAGGETKSASEGGGVMSTTSASAASTPLTLIFALCQNHQLNVLFESTSTLDEVSIHHIIAALCKLSNESMTVAQTSSRETSFFSIAKLLQTALVNLPRLHLCAHSSAATREWGAVSLTQLVRSAMKQTIAEQRELETNKKTAKNEETIKREQLILNPLAAICEIEFLDVRAKQLGQYQIHLTNWIIFNCSSPQIVLCAFSSPTVAPLSRLCGLPSCKLSLPCTDPQLIDQSFRVLSLVIKEFLAVVPFECVQMLVETNALYGQQQIHLNVALASVGQLWDISDFVRRAQQNVGKEEAETAWLCIYAALGRLCVDARPPVRKSACDTLLQTVAAHGQALGTQKWAEMLTDVLFPMLDRVRHLTQTASTHRSNTSTLGAPNLMIHHSRDTYQPNGLIFSFNVQKAFPDFWSQLLTHIELAAKADSAEMSLAALKNMQDLLFGRQQQTEGQQQQQTIGIRGKQQMSTNGRKHYVPGLYHLTTLLEMFQQLFHRVRRQIPIED

SEQ ID NO: 140464 - protein, 104 aa, Heterodera glycines
TFCGFRVFWTNSHSITLIFGPHLAANDSPSIRDEKIGQQGFIFKGTCLIHSSLAFNFSALGVFLPLDETQLSQKRSILCVFLPFLFMFLAFIFCPPLSPFSLDW

SEQ ID NO: 140465 - protein, 95 aa, Heterodera glycines
MPLNYAQMKSICKKQKTKKNEKKTKKGEQFIHHSSSKDEKKKRNEKRRKSKWRKNNDLTEREGEKDKAKKERILKTNSQMADFISIFFFFVLAMS

SEQ ID NO: 140466 - protein, 281 aa, Heterodera glycines
MLRLPTFFKGYLWLLYLGVIVLFIYYFRVPLKAYEKFESLLSMSMYFNNLTPKFYVALTGTSSLVSGIILIFEWWYFKNNAIENALESEDGSDIDENYDGTKPLPELTEYDENGHEGNDCKVWRNPMALFRGAEYQRFTRETGQEPLTFYDLNLSAQDHQTFFCCEADAGKEDLEIMSMVWRERDSQVRISEAKRALKVNSELAEEFCQSVAEVEETLRKALRIVEGMYKRSQAAMYPDPESQQKSRDINMLVFIRRRLAMCARRQGRVREAIKMMRDVSD

SEQ ID NO: 140467 - protein, 275 aa, Heterodera glycines
MDDANIAAILAFVISSPRGEEVVRIHALQREVKALRQIRDVFGREKDKAEELCQQKERENNNLLKKIERMQAQIACITPCAERTPVLEDQLLMMETQAATNARQLQDAEKRAQNAEKFAADLKFELKKMDIKHDNLEKIVEEQSAKIRMSRDDSDAVEQLRKDQEKDTYWKMIDQCKARSEENTQKAYDELKKTQEEKRNLERELAEGKRTMNELLELAEQQKEVITACDSDRTELEKAQKELDTVQKQSAERERFWKSEMERMQREIVAQEKTK

SEQ ID NO: 140468 - protein, 103 aa, Heterodera glycines
MNELSARSTQANVQQQNDMERSFRSGMNRTQSMSVTFVSRLGSAMSHQETLSNLDSAGMNDDESGMKKEKYRMSNGETGWCAEELADRVQRLMEGCFVASTWT

SEQ ID NO: 140469 - protein, 87 aa, Heterodera glycines
MAPSVYSNFASDASVQLALNVPLPRNVCCTQIDNVHTQIDNVHEMLYLLLRHRRFREKFLNDDDNRELKKRLLRALMREEIIPSEEN

SEQ ID NO: 140470 - protein, 58 aa, Heterodera glycines
FRPRGRLGPNPKIEKCAFLKIKILKTKPEGSLATWHKLGLINIRSFFTILLIPNPIIF

SEQ ID NO: 140471 - protein, 207 aa, Heterodera glycines
MAGFIACHMSALSKNRSFWAMASSNHSIMEEIVANHTMTPRLTATVRSLINNRPDEVMSDRRDYQVILGCDLMAKLPPITFDFVQGLISISGKSVTMGERGDLLYSNVKVVARHHVDIQPGSYSMLTGKLDSQIQLDQVITHSLDGRLSKMHLGMISTVAKPVEGCIKMILTNPTDAPISICAGMHVALVNELKQSVDGPWLEEQSQ

SEQ ID NO: 140472 - protein, 33 aa, Heterodera glycines
HLEQSISTNAFTPPSRRFQVQNCRFCEFGVIND

SEQ ID NO: 140473 - protein, 32 aa, Heterodera glycines
MADLQKLSGADRLLLCRRYFHVGFVCLPLLWA

SEQ ID NO: 140474 - protein, 79 aa, Heterodera glycines
MEKERSTSTEKFFRSLGVKKADLPHGGRSNRGFLEICQYMDIKYGHKSRNMEKYGNMDINREIWKNMDIESYPRSFKPS

SEQ ID NO: 140475 - protein, 29 aa, Heterodera glycines
DYFSKHLVDWGIIGDYGINRDWAIIRAYT

SEQ ID NO: 140476 - protein, 196 aa, Heterodera glycines
MAKMSKYGHKMAKMSKYGHKMAKMSKYGHKMAKMSKYGHKMAKMSKYGHKMAKMSKYGHKMAKMSKYGHKMAKMSKYGHKMAKMSKYGHKMAKMSKYGHKMAKMSKYGHKMAKMSKYGHKMAKMSKYGHKMAKMSKYGHKMAKMSKYGHKMAKMSKYGHKMAKMSKYGHKFFKIECKISSNLLVEIAYEIHFQILG

SEQ ID NO: 140477 - protein, 391 aa, Heterodera glycines
YAIGVTNLVNIRPLFSSSVYALRVHTPPPFDQLDKSLADSITWHMCSTEFHGTPEIICEPDKIGVRASTKKQFDGIVFVQDNFDRAECRAGPEHFPDPKIIGITVPFRNCNVRRYRSLNPRGIFVEMAVVFMFVVFMFHPVFMTKVDQFMTKVDQMVKIQCFYMEAEKEVKVPMEVSQITTQFYQQVYQMPRCEYTLRKDHANGPVVQYAVLGQSVFHRWECVEELNGDQFGMLVHSCFVDNGFGDRVDILDSRGCGLDAVLLRTPDYDSTLRLATKEYHVFKYADRPVLQFQCQITLCLKLDNGCAGITPPKCRNCATAHRHRAVHHSKTRRKGSERCADGGTKVDVFTRPIGGTKVDVFTRPIMVGFMEILGNIIYLRDNIANNETFNS

SEQ ID NO: 140478 - protein, 37 aa, Heterodera glycines
MILDYLEHMVFLGGQPQCAVVVGSAQHARSPCKLTDT

SEQ ID NO: 140479 - protein, 15 aa, Heterodera glycines
MNWRGYGGSMGSTWG

SEQ ID NO: 140480 - protein, 141 aa, Heterodera glycines
NCNYAQKAPQTILALPIPSTIAFIHPIMSAKIIRVPKIACDLSLEKNGVSKNRNYAQKAPQTILALPIPSTIAFIHPIMSAKIIRVPKIACDLSLAKNGVSKNRNYAQKAPQTILALPIPSTIAFIHPIMSAKIIRVPKIA

SEQ ID NO: 140481 - protein, 57 aa, Heterodera glycines
MKNGLKKFWYYLVELYKGFKPVTTLELAEFKKFVKLCDQQNIKDVGNNILKFYNVYY

SEQ ID NO: 140482 - protein, 163 aa, Heterodera glycines
  unsure (1)..(163): unsure at all Xaa locations
EIVSLFSSLPPRVRVGICAPAAILRRSGHFSGXFSGVEPLSSVTRHHHGSQIHYHRKLIRQTLERHVAGTRPCDQLSCSESTLDARRALGFVANKCAPLWGDWSFGACISSRITTVIQVRSQGQVNYSWCNEPYAVSLSGRLNLHMHGLIFEMNTSVQAGSTR

SEQ ID NO: 140483 - protein, 50 aa, Heterodera glycines
IARCVAGEVPPQKTRKYRAVDARILDSYRVTIPSTTSTLLTKMIKITIQC

SEQ ID NO: 140484 - protein, 25 aa, Heterodera glycines
  unsure (1)..(25): unsure at all Xaa locations
FVTSXQALAIYSIFFDVIQPFECVR

SEQ ID NO: 140485 - protein, 29 aa, Heterodera glycines
MAISFFEKFSMQQTLSNMKRSAKNGYLFF

SEQ ID NO: 140486 - protein, 29 aa, Heterodera glycines
MAIYFFEKFSMQQTLSNMKRSAKNGYLFF

SEQ ID NO: 140487 - protein, 29 aa, Heterodera glycines
MAISFFEKFSMQQTLSNMKRSAKNGYLFF

SEQ ID NO: 140488 - protein, 39 aa, Heterodera glycines
VRLGYSNNYGEQKSKAEIKYRYREAIPEGFGLLINLGAS

SEQ ID NO: 140489 - protein, 83 aa, Heterodera glycines
MVEWEVPWQRCNNTWNTQQCRESLNATMGTEDDNGQQLRTPSQEFYLYSVLESNKSKGMDDLGGIKIIKYNYIILFVNFTFVN

SEQ ID NO: 140490 - protein, 50 aa, Heterodera glycines
MANSWSAGGGYGNLLAIDDDENTTTEEEKSGTGIAGGGGGEGFTVGHGTE

SEQ ID NO: 140491 - protein, 172 aa, Heterodera glycines
PHGYLDHHHQLHHQQQRRSCFHLRTMAIMHGGAGDNGGGSSTVASVPQGSSAGAAAAAQPMFGDMAARHRRRSYWLATTTAQPQQQQQQPRSWHRNARGRCGSEGQQVGAVKQQQQPREVGAVQLQLQQKQQQQRHQLIVGQGRCMALYFPLRDKMGIFKSFSAEFRDFEIA

SEQ ID NO: 140492 - protein, 177 aa, Heterodera glycines
MYEAYTNEEIVSKLPIEASSIGSYDTSKLHYEYQVCRTFERRPIIELQVVESHDLIICLTDVHLSIHDAVEPFKLLDVCSKYKSISAFSHFVTESQTIHIAISARKHLHIFKYLLGELCEINDCAPITLPENAQAVVWCGVNNLILAFKCEFQFWDMDHFLHRDDLIGEKVTTNLFL

SEQ ID NO: 140493 - protein, 275 aa, Heterodera glycines
MLAKGSAPSTGWYGWITNWFTEEGNNDSEAQNELKNCGNDVNEALYLSMKPPKLKKHKLDPELKAVESRMEAEILQMLNESWDESTILRRDNLLAEIVLNVAKVFFRLSEDEEENEAKMEQGKKTAEKSPLDTDELGFFGSDEFDESLFYGFQQKNVQSTHLLLAIGRTYGENYAKEANGKQKRSKRSNLRQKGQQIGRRSAHSPSSSTAAAAKPTDYGHQAEDNNAILRLFYKRLAPKLEVYHELNISCAPLSILCDECALSGIFEPFTQKVGN

SEQ ID NO: 140494 - protein, 308 aa, Heterodera glycines
MKSLQHLVLSHHSQLKDTIEDQLCLASIHYLRAHFQQAIDIYKKILSKNKNFMALNVYLALCYYKLDYYDLSLEMLQSYLDKYPDSPNAVNLKACNQYRLYNSKAAENELKVLKDLSSSELRFAKDVILHNKPFFTNDDTFNFNYGQNQLLCEHFAEAEEAFRMVTGHSIISNLTHCLCIARAYIANKKGKAAWSLYQKERHIQNSQQLLKLVAMDSYRAEDYVTAAKAFDELDKRGAIGSDDGNEEENYAVAKQAACVGVVKMFAARQCDTGELRDAMKMLGKDRDTNAKNIVTTVKKWAAENGVYI

SEQ ID NO: 140495 - protein, 170 aa, Heterodera glycines
MTIASACVKNFALNHLKPNSLAIVSEKGYTPQQNQSALAIKYLDWYSHINNVNIQTAHSRYGEYVFKREGQVYQVDGYIKGTNGKRDKIIEVNGCLWHGCEECFEDLDDETKMPNGKTLGQLREREVRKHEILSRYVDLEVIWEHEINEQLKKDKQMREFFDNWKDHSPI

SEQ ID NO: 140496 - protein, 20 aa, Heterodera glycines
ARIYTQLELDKLRQHIQSRQ

SEQ ID NO: 140497 - protein, 43 aa, Heterodera glycines
MAFYITLIALVLAVIRFLVKSRSNTTYRTVTVTPPMLEECAQK

SEQ ID NO: 140498 - protein, 75 aa, Heterodera glycines
MRKRAEEKEEEEEKKEWKRSETEEEKRRKRKRKRRRNGREVRRRKRRGERGREEKKKTKLENRKKKKKKGRERGR

SEQ ID NO: 140499 - protein, 17 aa, Heterodera glycines
MPERVLKRTKFYLHKML

SEQ ID NO: 140500 - protein, 222 aa, Heterodera glycines
MPLTKQHEKDEEEANSPMKTAKKRQRSEAKDDNENNDDGTKSIGTTSTRPSSPPAADEVRGRRFSERLHRKTVRGQAEQLQYWQCHVGEEAGGEGQRRNANASATTNTTERTTRKRVAAAESAPTAKAVPTPSSNINKITPPLATAVPPPSEKRLRLQTYQQIADDFGLRLTALCEQYFFSLLTNASVCLVLTIDPRQQMAKISYERALGWWVIFCKKKQKF

SEQ ID NO: 140501 - protein, 188 aa, Heterodera glycines
MANETSSIPIVEEPPEEDENDHEQQQNKHTEGEEEKANGTFSVTVSHPDLRLERIAGDLLLRLAIVPGKRIQLSPLEQQYTKKNRTKQKGDECLTFEDFNVANDDRGWIRVIEGGGVRKNGQRKATRTEHWLKISRELFTYAIIGEQFEKVQQFFKKFFHVQQTAVDDKTSADRSNEEDRKRRMELKK

SEQ ID NO: 140502 - protein, 126 aa, Heterodera glycines
MICCDYCLIWYHVEGAKFWQGKEGRKGDEKWWDRKTTKGTGTKRRIVVQNSSNNNNKRWWWCQEKQQDQDGRRGKRRDEEEEGNARGKCRAAGGAATAAAAVDGTAEAPAGTAGGQPEFAVQKLHR

SEQ ID NO: 140503 - protein, 142 aa, Heterodera glycines
MADINIRLDELDQWKNNVHQFMVVLKSNTFDNGTTIAMDNDGTIAMGQQQQQSTTTTKRSPNGGADANGDDRDGGNDCHAAENGSEEKKPTMTTAAVKNEDENMLVGCPVCHGEFQMREICKHVHTCFVRSERQTTYGTDYQ

SEQ ID NO: 140504 - protein, 30 aa, Heterodera glycines
VVYLTASFPYLMLFFLLLRGLSLPGASLGL

SEQ ID NO: 140505 - protein, 131 aa, Heterodera glycines
MDSAQIRNALLELAQPNRQNEGQENGAENNGNEEQRGGLRMRFRNVGTNDGRENWLVGDENRNDGHRNLNQNLLPRTSTPISGPIIPELLIQNVHQSVHQNLPNRQNMGDKNQQHGIPKTAMPQPQVVQQQ

SEQ ID NO: 140506 - protein, 22 aa, Heterodera glycines
MELTLITHQAEVTLIGIQCNGN

SEQ ID NO: 140507 - protein, 87 aa, Heterodera glycines
DQFLTDPNEVEIVREMIEKSAEKGKDKKTSERVEKIDLEKFVGRIYQTIEKFVDNSNKMWAKIKGQIAAAQMGELTEKRKALETEGY

SEQ ID NO: 140508 - protein, 910 aa, Heterodera glycines
ELARYLHLRDEQQNRPTKVEITKGLKALIKRGDQSDEEEQFFDLGSDGAQRPASQSRRRLRRHRHYNDDEEMPLMPPSPPLQVENRGQKRKANEFYSSWEEGAKRQLRHEDAPVPSSSKIANRQRRRKLPPVSWRREEEQIPADIQQEEPFQPAPQPSIPIHPQLNRKRKAQHALNDVRESKKSLIGLEELRPPSLQQEASLRFKQKRTSKSRVTLPQHSNSLALAKLRNPPRDLLAEAASAPLPDDDGHDFELLQSPGVAAQVEPLPPGPPLPSKAKKRKSNKVDEDTERKRSRIDSRKRDLLEEAASAPLPDDFELSQQPGTSAQVEPLPPGPPLLSRTKKRKTNKAEEEYTERKRSRIGSRKRLSSPSVTKNLPKRQKNSGSDALSEEQRRQFAEDQHLFSIPNSQLTNEQKRRRLQFVFNRNPAKYGVQGDTILNSAGNPITDSSVAQALDYIIERREGRIPQFRQPPGTKFIRDRINRDLILRTWTAPPRNETGEIQGARRIDASFPNEGSQAEVDGPANSRNGNPNQKPTSQATKMEKSIENVLEGLYNDPKSPAAFAGVDRLWLEAKKELGNKIRKNDVKHYLEGHRTYTLMRPRRVNFLRARTTAAGFMTDCQVDLADFQALSRHNSGNRYLMVVIDVLSKRIFVTPLRTKKSDDMVEGFKRVFSTMPMKPHRIFSDKGTEFRNQQLKKLFDEEEVEKYESTYSEKKAALAERAIRQIKNRVYRYFAQTKTLNWVDVIDQIVDGINKSPSRVHGMRPIDVNFKNSQQIWEKMFGEDQHRALFGKHRKRAKFLPGQTVRMSIAKGQFEKGYIPNYGDEILEIDEVKRHKKPMQYKLRDAKGEKFKGFFYPEELAPVRRDAETTYRIERVFRKRKMPDGTMEVLVKFVGYLRENGFMRLNLYKY

SEQ ID NO: 140509 - protein, 387 aa, Heterodera glycines
MSINLHDKKSLMDNILPVVEINQTNNGITVSSERIAIPRTVQFDILGKCRECKATECETEWCVSKEGVTIWCTRFKISPRFVPFDVIYDLPGYTFFKIRNKGRVFNVDHGFRSNACTQTPTPVYHLPPPPPPPQLPKRKQESHQDAEQRVANQFFDSVSAATTGLDIARHQTRQGDGKEFFGAVSAATMGMDIEQKNEKPKLRKQQRTDASDFFSPISAATMGMTPEHLKPKPKSRQQPVDASNFFSSISAATMGMDVGQDKPPKPSQKEQLNSDAAEFAVSLSAATKGFDFAEATVKKPKEPNQADASELFSAVSAATMGMSSEQQQTRTKKEKEQTDQEILDEFLESVSAATTNMDVPEKRKPKKKVKKEMEDEEMTAIASITRK

SEQ ID NO: 140510 - protein, 58 aa, Heterodera glycines
MARQSTILPIYKRQSRRQQQHYHFENVLVFEGARHRQFQLSWFCIALIVILFVAWFLW

SEQ ID NO: 140511 - protein, 163 aa, Heterodera glycines
MRKRKWKRIRKWKRNIKWKRKWKRNRKWKRRRGTESGRESGRGTESGRESVRGTESGRESGRGTESGRGTESGRESGRGTEKESGRGTESGRESGRGTESGRESGRGTESGRGTESGRGTEKESGKGTESGRESGRGIESGRGSGRGTESGTQFSCITSLEIV

SEQ ID NO: 140512 - protein, 228 aa, Heterodera glycines
MILDKFFGQIDQSIVPILSEDFPNEQKVMVEKAMQSLNKIKMGQITSEDEVIEVKSQFDELLSKKADNLDWQNVPIYDIVQISNWQLAIRSFGALSELFKNGTGGHNAKSEANRKKEEKKAKHQQRNGKKNENNGQGEEHGRSIFEQWLNDNAQLVKSVYDRLFPEDVLKQLQKKRRRRRKIDCEAWLQCISLILLFIIIIWVIIAFFLLAGSKSGGGRSRYRSRSSS

SEQ ID NO: 140513 - protein, 188 aa, Heterodera glycines
VDLGPEAEFAVYVQLNILWTSIELGRKLKTVSRVVKLKIFKPDYGKIYQLNLGQAGYSKISFSGQLSFDQPIRENEAIVAFVDVPLMSESANETSQKIDKFSSWFSLGSETFIKNGSKLNKNRNGDVNLSYNIPVDLSKFYGKQMFGLTVNIYKLKTYIENEKTKLGNCPICLNSFCSKEKISKFQLT

SEQ ID NO: 140514 - protein, 95 aa, Heterodera glycines; identical to SEQ ID NO: 124528

SEQ ID NO: 140515 - protein, 86 aa, Heterodera glycines
IIFIQKIFVWVFGAVPLNRCAQIYGETEFFGNSFPIACTLILRWIFAPHNCLSTPNGHLKKSIFCFRGSPPEPMRPDLWGDRILRE

SEQ ID NO: 140516 - protein, 105 aa, Heterodera glycines
LPGVGDFRVRRITILSDPCPLPANRTAKRTLNEREQIVYAPMSGLGGLVYDKDAVYIDIGGSKSFSRARNRDEFIEALEGIKEPLDSKMGKATLKLLKENPDLEL

SEQ ID NO: 140517 - protein, 55 aa, Heterodera glycines
MAGHFKNSTKRIEELKGFCEELEKRKAILPELLLEMDKFRAKLNNENMNGFMVPI

SEQ ID NO: 140518 - protein, 206 aa, Heterodera glycines
SYILDQMLHNKRKSYTNFDTLLADEEEEEQEQKRQQHLNTKQDKEQNQSVRSYVPEDPETGATTTICGGTCGDDVGIIDANNVQQQHQAVPAGVGNQQPQIVAVPSTSSLNSSSTEFKFGATTSSAATREDDELSELEDTGTALVEGEVLLEGHEKIALGLQVCVDDVETVQRMFQVFVGHATGHPMVRYLLLTNKFLYLLAVDGK

SEQ ID NO: 140519 - protein, 255 aa, Heterodera glycines
MFHHFAPIGLPQNAAAFKPTKGQHEQIERSINGAVDEILNTNGGGGGTLLKTDKCYWAFAREFIPSAERAEMRVRWVCRNRRALSLAWLKDSLNRANLHFQLLSFIACADALKRAHYERNACMRNTALLKRICVRVDQLTELQFNIEASKTNFWAIFIGPPYVFHPEDTPIALPRTMTATTAVLMSTAQFFDGTMSPIGGSSSCNSSLINGTAGGQQQHQRKQQVRVVQQQTPNVPMNIRRRMTPAQNAALPKSF

SEQ ID NO: 140520 - protein, 95 aa, Heterodera glycines; identical to SEQ ID NO: 124528

SEQ ID NO: 140521 - protein, 104 aa, Heterodera glycines
NGVSKNRNYAQKASQTILTLPIPSTIAFIHPIMSAKIIRVPKIACDLSLAKNGVSKNRNYAKKASQTILALPIPSTIAFIHPIMSAKIIRVPKIACDLSLEKMV

SEQ ID NO: 140522 - protein, 20 aa, Heterodera glycines
TDQKRTKLCRDTERKRNNLF

SEQ ID NO: 140523 - protein, 66 aa, Heterodera glycines
KLLKGIDSVLHAKADQHVQKNEKVLSFVEQARNAMLDRAKLMTNQVGKQVKDGLMLAFGRVVFTFV

SEQ ID NO: 140524 - protein, 75 aa, Heterodera glycines
MECSTTTEQRPGTSEHIDNDDHCSSPPVKPLTYAQAAANRPRRILRAIWIQNPSLIQPSMIEFPYKFLIFSITDC

SEQ ID NO: 140525 - protein, 155 aa, Heterodera glycines
LVLMAEDRRQVEKLEATTKIREMFDLILKCNVDEQLINKSIPRNVFGFLVDCLSEDNASHPQLVANATAALANIAPQKATDIYDTKHSKVLIYLENWIKSSTDEELLKNAISILKPIIAKDIVREMDYRKFSTLFNSRNKEIFEEALCAAYHLIS

SEQ ID NO: 140526 - protein, 64 aa, Heterodera glycines
MPCTNCMAEYTRRRKEVGELDYGSKWEKMPSKSDRLCRMSFRLLRAMRWPKVRCAIGVPEQTGA

SEQ ID NO: 140527 - protein, 24 aa, Heterodera glycines
ITGVSIIAVLFLVFLMPSQNLVRF

SEQ ID NO: 140528 - protein, 45 aa, Heterodera glycines; identical to SEQ ID NO: 130861

SEQ ID NO: 140529 - protein, 64 aa, Heterodera glycines
MEALMMTLSLIYHERIGRNTEGGRAVQIFSAYFSNLAQPWRKFKNITIGLRIYMKGQKLMHRIC

SEQ ID NO: 140530 - protein, 128 aa, Heterodera glycines
MGFPGYFLIVMEFIQWSKDNNVPVGPGRGSGAGSLVAYALKITDLDPLEFDLLFERFLNPERVSMPDFDVDFCMEKRDQVIEHVAEMYGREAVSQIITFGTMAAKAVIRDVGRVLGHPYGFVDRISKL

SEQ ID NO: 140531 - protein, 16 aa, Heterodera glycines
EAIPEGFGLPINLGAS

SEQ ID NO: 140532 - protein, 125 aa, Heterodera glycines
LFEYPKRTLEKIDFFVFGAVPPNRCAQIYGETESFGNSFPIACTLILRWIFAPHKCLSTPNGHLKKSIFFVFGAVPPNRCAQIYGETESFGSSFPIACTLILRWIFAPHNCLSTPNGHLKKSIFL

SEQ ID NO: 140533 - protein, 1040 aa, Heterodera glycines
MAAVIKAGKGPGPFLPEMCWATWWERFEFFIQLKGVTDVATKRLLLFTEMGQVYEELRRMAQPEDVRTMDLAEIEQLMVERFGEAKSIAACRHELFSAKQQTGQSIRDYSVRLRSLIAKAEWSRDSIDMCLCALFINGISNDAIRVELIKKGDKDLKFKDAVESAVLLEQSNLDAQAIGSNAMPEVAKVGNQQRGPRTPTKSTRSCFRCGKPGHFANVCPNQNSTCRKCGEIGHWAVGCKSKNRDGNANFGQQFGQKPKTNGRQIKNIECSSVSVIHEIKGISADPGFIQLNIHNGRLEFELDSGADVTVIDEIDWKRIGRPKLEPSQGLVAYGGKSIGGILGKAKVKVTHEGRTIESNIHVISGKHKNLCGRDLIMGLKIDLNRAFGISTIRAVEIKQELDACLGQYPEVFQDGVGRCKKMASLKFKEGCQPKRCKPRPVPFSLRNEVEKVLDQWQAEKIIEPVATSEWATPLVIVPKTNGKLRLCFDYKVTVNPWLDVHQYPLPRPEELFSILNGGEKFTKIDLKDAYLQLLLDEKAKSCLTICTHKGLFHFARLPFGVASAPAIFQQVMEEVLQGIDGVAVYLDDILITTATDQHHIKRIDQLLKRLSENGLRVKREKCEFLKPEIEYLGHIVDKKGLHASPGKIEAILKMPEPKNLKELQSFLGMVNYYGKFVPSLATLSEPLNELRRNDAKWTWTKSQQKAFDVIKKVLTSTEVLVHYDPQKPLFLAADASDYGVGAVIFHKDEKGRVGVIAYASRTLNSSERNYSQIEKEARAIIFGVDKFKQYLYGRKFVLQTDHEPLKKIFGPKGELPIVAAKRLHRWSLTLMNFDFEVVYCSTKEFGNADGLSRLPCPEETTIDCVGLEVQQVQAENISCLPVTVSAIAKEVKKDEILRKVKEFIEKGWPQKVEGLKSFHVIRNELALMEGCIMFGNRTIIPSKFRTKMLEILHATHPGMVRMKALARQKMWWPGIDKEIEIIRKRCKICQEEAPDERKVPLHPWESPERPWQRIHIDFCGPFWGSMWLIIMDAKSKWPEV

SEQ ID NO: 140534 - protein, 70 aa, Heterodera glycines
MAKAISESNRSAARKSANGHSEHAKREKGGERIEIHGGHSVECNGTENFGRRIARQSRKPFRVTEAKSAD

SEQ ID NO: 140535 - protein, 45 aa, Heterodera glycines
MNEDDDYCTKCKIPTVDEIINGKESKLKDRVEDGLQKITSKAKKI

SEQ ID NO: 140536 - protein, 352 aa, Heterodera glycines
MQMELLMLFCLLKMFFLCPTFLAFDNEIKAYEKGEMNELQRWSTEEEEEMWQSGEEKGEMPKTKSRSVAPIQSLWEDGPISPIDQRTINELPRDDGRGTMVDVDIVKGRKGLWMRPNVVNLVDEIRDDGEGMASPLAMLSPALSLVPKRRRRIGTTDGRQTKKNVIRKEEKMAKQSEPKEMPKNDGIGLNVQSDFVEKSGGEEAKMTNTETEGEGERTTEKKEKKKEEEKEKEEKEKEKNETGGKSKEEREREKEGKKKEKEEGKDWTMKQSNSKSQSQNSTQTETVKRDFWANALRTLLIEFRKMHPELIRGGKAKRRTTEQSSNRTKSKTNEEMARKRPGGRGEPSPISD

SEQ ID NO: 140537 - protein, 50 aa, Heterodera glycines
AYFQKISHEFSFKKFFNCFLNVCIFFGLPKLHRTWFFLFSFKSPQIFFTA

SEQ ID NO: 140538 - protein, 128 aa, Heterodera glycines
MDTTTINRILAGNTKTRELYLGCFPCDKLPNIINKYPSTLVANNDPSNKEGTHWIAMFIVDDRTVYYLIVLYGGITRESARKQMAYNGFKNVTVDQNFYVRHRICRRYANNPCVIEKHKNGHERFYPT

SEQ ID NO: 140539 - protein, 238 aa, Heterodera glycines
MPKIKPYRIIAYDFEATQDKKMENKFEHVVNFAAATVICTDCINNGYWNNSLLGKKCNICGPHRTITFSPFDYTKTTVDQKIITQNPLHKFVQWLFFERNKKYPTVAFAHFGGRYDMTMIIKEVIEQSIHNPEIIKQGNRLYELKINANDHRPLTILHDSYNLMPIKLSGLIKSFGLQIEDKQFFPHMFNKATNYDNVLTHLPSRVDYCPNQMKKADLQKFNDWYSNNLKILQLRFII

SEQ ID NO: 140540 - protein, 35 aa, Heterodera glycines
MLYLDVKEKSYRGKRAGAETRAPKRERRNAKFFMF

SEQ ID NO: 140541 - protein, 67 aa, Heterodera glycines
MKRTLIFVEKFVAQKRINESKGPAITWSISKKKPKKGENKKRPITEKNRQNTIGLYLLKAAYKIHLL

SEQ ID NO: 140542 - protein, 37 aa, Heterodera glycines
RLEPDKRTTKSKTMTVFEGYEMRTDRIIAAGQTQAIF

SEQ ID NO: 140543 - protein, 21 aa, Heterodera glycines
MYFSFFEIPNYGSDLKKEMIK

SEQ ID NO: 140544 - protein, 46 aa, Heterodera glycines
MATLSSSTVMLLFLLLFVLALIYVAFFFTRHFALARNASMAKYEVQ

SEQ ID NO: 140545 - protein, 184 aa, Heterodera glycines
MPSPVERYGPFLKHIRERLRHTNILLYTDDLGIVHSLLVHASKMNMSQTRYSYLVSNMDLHLLEDFLGPEFHCNITGFQLVRQQPQIKTDLALAMDATALVGAAVHALRQRNLEPKPHQLLCDAGDQWTDGMLMQEQIRRVDLTDAATGGHSATSAIRFNETTGERMDTSLLAITRMPNGTFTD

SEQ ID NO: 140546 - protein, 121 aa, Heterodera glycines
LNSLWFAVGSLMQQGSDVIPRAAATRTVAVIWWLFTLILISSYTAQLAAFLTVERMSTAVESSADLAAQQRIKFVFVNSSREGIARVKGGNYAYMMESTMLEYWIGEDCQLQTIGGLLDSK

SEQ ID NO: 140547 - protein, 95 aa, Heterodera glycines; identical to SEQ ID NO: 129573

SEQ ID NO: 140548 - protein, 173 aa, Heterodera glycines
ANNAKIKRFMEKNNLHNITELENYYIQRLQVIVKELFEERQEMAEGQKKAKQKKMIFWQEVFDNNKPVNAEDRRADPSNTVVHNWYSRTTQERFLDTKRAVEKGFQVLVSSCWPRASAVAERLWSPPELTRLADAAWPRLQEHRCRMVARGYRAEPVNGPDFCQTELDEQMLK

SEQ ID NO: 140549 - protein, 68 aa, Heterodera glycines
MLAEIASVELPGAKNAKLGSGFKNLAKTFYFMESIIFVTCRKQVFYVNGLPQTVVGSEIFIKNPKMIT

SEQ ID NO: 140550 - protein, 40 aa, Heterodera glycines; identical to SEQ ID NO: 126546

SEQ ID NO: 140551 - protein, 21 aa, Heterodera glycines
MAISFFSWGFDRKLGTNICLL

SEQ ID NO: 140552 - protein, 19 aa, Heterodera glycines
TFSFSSLALPNTHTIFEML

SEQ ID NO: 140553 - protein, 19 aa, Heterodera glycines
TFSFSSLALPNTHTIFEML

SEQ ID NO: 140554 - protein, 19 aa, Heterodera glycines
TFAFSSLALPNTHTIFEML

SEQ ID NO: 140555 - protein, 19 aa, Heterodera glycines
TFAFSSLALPNTHTIFEML

SEQ ID NO: 140556 - protein, 226 aa, Heterodera glycines
MHINIFVPFLFLFVIFNGCQAKELKICVKYEKTVAMRETQINLTAIRVNSKNEYRNIKENIKIGECFGISIPQQENNKTQKITFEFTIYVKPLENEYQPPADDHDENPSDEGPYENRILDIKMDDIRTMVRRNNFVIHEPNPSMVYTFNLGTIDPPGFLWKRKIFVLPENDLGNYHAFLYAVAYKNQRTQDNLNSKSCMKLLRYAPFVKIDKEIAPTLKRMTKGWK

SEQ ID NO: 140557 - protein, 90 aa, Heterodera glycines
MCENLRFAQTFSLLGGIPLLTSLFGCFPVEPFTASESEMAALGDASNADKDDAGDNNNLNNLCASHQRKASTERGTQTDAGHLAILHDQL

SEQ ID NO: 140558 - protein, 50 aa, Heterodera glycines; identical to SEQ ID NO: 125301

SEQ ID NO: 140559 - protein, 95 aa, Heterodera glycines
  unsure (1)..(95): unsure at all Xaa locations
LFEYPKRTLEKIDFFVFGAVPPSRCAQIYGETESFRNSFPIACTLILRWIFAPHNCLSTPNGHLKKSIFLFSGQSPRTDAPRFMXRPNPSXIAXL

SEQ ID NO: 140560 - protein, 130 aa, Heterodera glycines
MERQISRCAQSPNPISPITNSPFFSTTTTTTLTASKLFQNFSTNVTIASPVNLPTATNLNTLQNALHYVTGAVRWASTIPAKPNKATSKNVCTATTISITTTAMVNKRSSLKMGIKIKIKAECRYFYFST

SEQ ID NO: 140561 - protein, 95 aa, Heterodera glycines
IYATKARRALAAEAATALDDGTKEPIDATEIFEHIRDINDPEHPYTLEQLNVVQEELIQVSADPTDPFVDVRFTPTIPHCSMAALIGLAIYAKLR

SEQ ID NO: 140562 - protein, 122 aa, Heterodera glycines
MTDVKLIWDVFTREIWPIFATNIHRLGFDDGDHLDNLRRRTSPTILTDLDELHSINSGHLCPEGIADMDPMQLLAKLWPNGYTLRQKMDNQSNYVSVLMPLAPPAEEKEGEEEADQSNKNVV

SEQ ID NO: 140563 - protein, 43 aa, Heterodera glycines
MQAIKCVVVGDGAVGKTCLLISYTTNAFPGEYIPTVFDNYSAN

SEQ ID NO: 140564 - protein, 180 aa, Heterodera glycines
RFYYCFVMVDGRPINLGLWDTAGQEDYDLWDTAGQEDYDRLRPLSYPQTDCFLLCFSIVNPASFENIRAKWYPEVSHHCPQTPIILVGTKLDLREDSKTLDKLRERRLAPISVAQGHQMAREIKATKYLECSALTQIGLKQVFDEAIRAVLCPVQVKFDEAIRAVLCPVQVKPKKSCAIL

SEQ ID NO: 140565 - protein, 93 aa, Heterodera glycines
MESCQCTWTNLYASFILYGSYFLLFCNFFYQTYLRRGNRYANKSKAKGGKAAAESVVHANGTANCSINDESAKTNGSVVHHQQQNPTAVDEPM

SEQ ID NO: 140566 - protein, 91 aa, Heterodera glycines
LFEYPKRTLEKTDFFVFGAVPPNRCAQIYGETESFGSSFPIACTLILRWIFAPHKCLSTPNGHLKIRFFCFRGSPPEPMRPDLWGDRILRE

SEQ ID NO: 140567 - protein, 24 aa, Heterodera glycines
MEKACKIWRDYIDFSALELLELAS

SEQ ID NO: 140568 - protein, 105 aa, Heterodera glycines
MSREILPIFVTNIRHLDIPDGGHLDHLRRLISPTILFDLINLNSMCSADLFPDVIADDGPNATAGQALSKWLHTPRKDGQPKRLCCKLHHVPVNEAKEWVNNFKK

SEQ ID NO: 140569 - protein, 78 aa, Heterodera glycines
MEQKSLGPIVIPFGEQQKEKNEQSNIEENAICLRPQVKTTKKTSIHEPMAIGKCIYYLRNGSRQDQSAGDKSADRQLS

SEQ ID NO: 140570 - protein, 58 aa, Heterodera glycines
MIRRGATVIGRGATVIRRVTTVIRRAIFKFTKIKTKLQNKKVTALHEAAHAIIIKELN

SEQ ID NO: 140571 - protein, 114 aa, Heterodera glycines
MRVQPVREVMVKGSEANVIDVWIIEGKNKARDVRVQIARKQTVLNLANRQDGTLCVDKEHKAQLIFPNSIQFDQKEEITLQSVNIDCNDAGVLTLTIYDNGAYKTHTEKPFKLI

SEQ ID NO: 140572 - protein, 165 aa, Heterodera glycines
MVRHKQNFSVGNDFPTSSKNDQQMNEGFIAPKKSLKRKIDENDETIDLDKVPMSFFDAGGNESIQQNEYVIETEQFSSQFSHMGMISNKKDTGKNSRNQMTEEQRQIIRAKNAIAAKTYRKKVKNVDFLLLQASEQNTYNVELYELSRFKVKCKHCPVIHFSEEE

SEQ ID NO: 140573 - protein, 40 aa, Heterodera glycines
MFRWGIEPKKKIMKVRAMNEPIAGRDRPKHTERSHLQEND

SEQ ID NO: 140574 - protein, 89 aa, Heterodera glycines
LFEYPKRTLEKIDFFVFGAVPPNRCAQIYGETESFGNSFPIVCTLILRWIFAPHNCLSTPNGHLKKSIFLFHKYFFRKCSETHQILFTC

SEQ ID NO: 140575 - protein, 33 aa, Heterodera glycines
MYLKIKMFEKVLILFLIYFFYFGLNGLSLYYLY

SEQ ID NO: 140576 - protein, 80 aa, Heterodera glycines
PLVQKNFAGFIFMKHLLEVEQKVQRIRNSITIIPKQFYDRCVSFESILESSSKLNSSLIACADRFSVIKSITKNDDEFRI

SEQ ID NO: 140577 - protein, 69 aa, Heterodera glycines
DRCRRRESQKSLLRQKTRHPHATIAPAALRFARLQLPPAPFAAALAQGIGLPGEPNNARTGGSAAETAR

SEQ ID NO: 140578 - protein, 75 aa, Heterodera glycines
MFVFLFSKAISPSKSNAELAEQFIDIESEDRCQLIKKNCLQLRVTETTGVLGCRDHGSRVTDFFGSPVITAHGFP

SEQ ID NO: 140579 - protein, 103 aa, Heterodera glycines
MPTVREILECLQKPIKRPINPTNEDSVLNAERTAAEQQMEGVSTSNDLNVGESDDEENFKTESDERLVKENPKQHPSQALDASVRHRLLRETIDGRRSASLNA

SEQ ID NO: 140580 - protein, 195 aa, Heterodera glycines
MAIERPISAQSSDQQQIVLDNPTANPLKVREAMGTDTAGNATADVGSVGNGTADEAMSTTSTYTARQRQNFNKKQRKQNGQMFVDAPAEKFGPRVRKNPKQGKYEVQAILATTTYKKDGQLRRIFYVQWLGYSQKDYSWVLSEWMDTQELVTEFTVNSVISWVFKAIRGEEVPEEIAEKLRTNPEYISRKFLWGN

SEQ ID NO: 140581 - protein, 77 aa, Heterodera glycines
MLHKSVLLITLLLLIGAFMQIPTTDAWGGWGGGPGWGGGRGWGGGRGWGGGPGWGGGRGWGGGPGWGGGRGWGWGKK

SEQ ID NO: 140582 - protein, 116 aa, Heterodera glycines
AFRVNVDFPTESPLKPPSVTFATKIYHPNIDDKGQVCLGIILAENWKPATRAEQVMNALLSLIAEPEIAHPLRSDLAEEFQRDKKKFFKNAEDYTKKYAERRDVDYTKKYAERRDV

SEQ ID NO: 140583 - protein, 66 aa, Heterodera glycines
AISFFEKFYTSQKRLRMRRRAVHNRHFISQRIFIFRGYPRKMDISFFDKFYTHTNALEHDREGGAQ

SEQ ID NO: 140584 - protein, 72 aa, Heterodera glycines
MENIDTVVVPIIETEISEFVLCQFWHDSKALDKLSLIIGDEVEPAADHARISSGARSLAPPIGRRSRECAGF

SEQ ID NO: 140585 - protein, 50 aa, Heterodera glycines
MCKKKSATGPGPGREFPVIRGPGSRSRILKRSGPGPGPGRATGNREKQSL

SEQ ID NO: 140586 - protein, 1243 aa, Heterodera glycines
MENYKLMDYQSTTCEKFGFTKNITEFRVNPDVERPDEAMKDAIDNMIKVALKTTEEKMKRKVRMFGVAITGAGLAFPVWVPYRAYPQNNADVIMEEINKLEQSGDGDENKKMLLLSEPITMKITCVTMPSGEGPRNVHKFDFGFKEHQRIGIVNTDKFCLFYALASSMNYLIMDKYSFIRFMKNLARQKEAAVELLRNCGIDGNEISYGVEQLPNVQKYWDEIYPGKYRVVAFEKSADPRKSICVLWKAPMGREKVVPIFLENGHWDGLKNYVCFFNRGRKFCIDCECFFDKDVKHTFECRARCYYCNRVGGMPCEKESGVKIECPKCHRYFYNWECYNYHQGHQTCKLWRRCVICDKTYLFNPKKEHECGETYCQLCSVSHDPKRGCYIMPIEEKEEKDVYRIVVWDSETSQDSIYKGDQKEHVINYISVRVTCTECCDDKNRTNCKICGEERIKDWSEAEGHEPTKDFVEWILTAFTNYDMYIFAHNAGRFDGHFVFNYLCRTGKNPLPLINGLKIYEFKVQNSKKHSKLIWRDSCLLMPVKLESLKATFNLDSEDKPFFPYYYNKKENYGIRLEHLPPMEDYSPGSMNKDKFIKFEKWYNENKETPFYLDDELKNYCRNDTEILLLSIIEFRRILINDITKGFDPLPRSCTNAGVAMNIFKGMFLLTEQLSIVPEKGNERCDRASVMAIKYLEWRSQRDGIEIRHAGNGREVKVGKYKLDGFIANNGARDKCIEVMGCYIHGCLNCYDPAAELIGGRTAQELNDETQERLVELRKTLDVEEVWGCQIEKELKKDEEMRGFFDDRGNEKGPIDPRMAYAGGRTGPMKLFAKSDEKKKISVYDIVSLYPSVNYGTAYPIGLPEIIIPKTDEINVNWMRPEDLKYKGLYKVRVNPPKGLRIPVLQLKCDERLLFPLCWRCASKFKKETTRCNYKCPHDAAQRRYVATYTSVELAKALECGYTVDRFYRAWHYEEEVDDLFKGYVRLFLKLKEEASGFPKGVETDEQKNIWREEYKEKYGIEIELTKVKKNPGLRYISKLMLNSLWGKFSMRNCLNKNAVIDRASEYYKMACDHKIEMCDIVEYSEEAIRVIYRDKDEFVMEHKSSNIIISLWTTSMARLKLLEFMREAEGNGGEILYTDTDSIFVLHYRDVEPITTGKYLGEMTEEYGGYEIEEYCCGGAKHYALKMKNKQTGETEYVMKIRGITFDVDNRKTLHYDTFRQMVLNYGKGEVDPAFFVYKNDFG

SEQ ID NO: 140587 - protein, 84 aa, Heterodera glycines
MSVCWGKFRSNQNLSMKKVVIGWAFVLETTNECQMKESALIELKSVKQYLLLLSDGKYPQLQITKPPKKPMRKGNGKRSASHRY

SEQ ID NO: 140588 - protein, 61 aa, Heterodera glycines
METYLRRVLEIPNLIELVKPTTLSSNIALDLISEFSLNLYSSNFMHGIEALQAQVAKIGQI

SEQ ID NO: 140589 - protein, 115 aa, Heterodera glycines
MCSLMLFVGRGNQCQWIGTARRRRRRRKSGAIDGGGGEEGTTHFNLMASDRMSLRRSLPDVRRRQCRQKKYPPADKLPNTSEFLRTELEQFLKRLSIRTKLIRAKKRVGLIRARL

SEQ ID NO: 140590 - protein, 109 aa, Heterodera glycines
MYADPAGSRTKIKFADPVAGLEFKIFCRTGSGRIYPANPAILQILHFPKNAGLRTGILQNPAQDPVLLRALLSTERLPPFLAFSKPGFFVIGYIEFYSYLTCYENNMEI

SEQ ID NO: 140591 - protein, 157 aa, Heterodera glycines
LDSPLFQTTSFSAQETNTRAAFVAQKAKEMCHDWDITCSEMIGAKNCYMSAQNVYGSYTGKADWQWQYNQGWGGAAYTTGAGGTLNREGLRAGEEGGQNRFATHYGQVCCYDQEGYLQQTTYQPTLKVIDQMFYNPGFPLRAYEFGSYPYLGQFEVP

SEQ ID NO: 140592 - protein, 242 aa, Heterodera glycines
MAEAAIHQLSDVFQQFLTAQQANAAAPAQPTPMPNLANFDCFGLGDHGESDIEGWLERFALALDCSTPNLQDELKVKLLLTKLSESAYSEYTKHCLPKKPTEFDFGKTSEMLKSLFAKHKSVWINRYECLKAEKQDEEEFRGFINRHKRLLSDFEFKKLNEEQFNCLMLLVALKSPKDAELRKRILSKLAADGDRATYESVVNDLQMFLSTISEAKVMERPSNSNILAVKRSQQPMMPSSSP

SEQ ID NO: 140593 - protein, 47 aa, Heterodera glycines
MASFCTVFEFHWYSHVQCIFRSSLPSFQLTNVSTTSCTSKTNTGTYS

SEQ ID NO: 140594 - protein, 22 aa, Heterodera glycines
VRLGYSINYGEQKSNAELKYRL

SEQ ID NO: 140595 - protein, 296 aa, Heterodera glycines
REFVQCTLIKHATPYWQGNAITERTFRTYHNILSKYITKENPDFDEYIEFASFCYNTSCHSSTKETPFFLMFGRDPIFCIDQILDVRVHNQVDFKTDGEFTQKLVTTLRKAWKCAAEAIEEAQKKMKIQYDKTMRQPKISVGDRVLLRNYTGKIGTSKKFHLPWKGIFRVVELNGVHATIISCISPNQPPKKVHINQIKKCFELIGPPCTLPEKLSVHADVEALSNEPPEKLSVHADVEALSNEPSEAGNLNQENSESTITNRQNVINQGIADINGDRRYSLRNRLAITKPKRFTE

SEQ ID NO: 140596 - protein, 200 aa, Heterodera glycines
HFNHWDSIHFQSLGLNPPAFQSLALNPPAFQSLALNPPAFQSLGLNPPAFQSLGLNSAFQSLALNPPAFQSLGLNPPAFQSLGLNPPAFQSLGLNSFQSLALNPPAFQSLGLNPPTFQSLGLNPTAFQSLGLNPPAFQSLGLNPPTFQSLGLNPPAFQSLGLNPPAFQSLGLNPPAFQSLGLNPPAFQSLGLNPPAYQSL

SEQ ID NO: 140597 - protein, 76 aa, Heterodera glycines
GGTVPKFCTTFYCGKSKYLIGQRRVNEHSRLWPVVERKNGNIRWGALFSKNSSFRLTIPPFCALFRFKIESFFFVF

SEQ ID NO: 140598 - protein, 110 aa, Heterodera glycines
MAGALRYTIMHPGAGVKSAEARLKGVATFRQGAIGMQLKSGDKSDTIPLANKPFLAEQQGDRIWGLNREPIAEKLRVENVGEADKTTLVIFFNDKTENEQLDHDLDDAQV

SEQ ID NO: 140599 - protein, 82 aa, Heterodera glycines
MSKSGLGEARFGTRSRSSKRSPKIFRGSQNRKEPSLFTTADQSITCQLTPIYVAGNIHKYKILEKCILTMLYRYIMHVSIGD

SEQ ID NO: 140600 - protein, 87 aa, Heterodera glycines
MKVAFFLNGTPVQSSDRVQVLYQNGFALLSIAEVTEQDAGYYVCQAENEIGSAETSATVVVVPRKGDGKFLAESEGTWERGRHARVA

SEQ ID NO: 140601 - protein, 71 aa, Heterodera glycines
MGENFIFIKDFCRYCKENAKIMLLTNKLHIRRKSFPFLLSSSTLTIKSSFSLEELFKERRRKMRISNSTES

SEQ ID NO: 140602 - protein, 17 aa, Heterodera glycines
PVNSCIGCKCRRCCTPN

SEQ ID NO: 140603 - protein, 197 aa, Heterodera glycines
MYDIISVFNNESRLYSLYLEFLTIADSMNWLNVKLKLDLFIFVQWTDAKIANSAASIARQKCANVWNRHKFLFYKLYDRWHDEPLDEMPNFQIYQSIFLNEMNLLFEKFLMKSEKAMDEEIRKIIEKAQKKYDEKKGTRKVKGKAKESDKNGENYAKFEVKLGEKNVETLSKLVEENAIFKKILKNSKKKKSGKRLL

SEQ ID NO: 140604 - protein, 121 aa, Heterodera glycines
MMMYNDNNSQAPPQQPPLPYATNDHQRQHHHFQQPAQQQDPRIYPQQMFYNPPQPMPASHQYHHQTLLNRLPNVPQPSVADAQVMVPPPAMTDIALAGAEQAIQMFYNNAGIHNQQTHQQN

SEQ ID NO: 140605 - protein, 130 aa, Heterodera glycines
MELEDVDMDEDEIVKTLCRVPLIERLADEFAGRYAVAAWVCFFVESRFGVLMRRYFLHIEHSEWVILSIPNENARRRRANWLPDPSEEDDTTLANSIREFRARLARFRADYPQLFLPDSNKLSPVRILCH

SEQ ID NO: 140606 - protein, 26 aa, Heterodera glycines
LDNDGKVARFASFQLVQLRFAQTLLQ

SEQ ID NO: 140607 - protein, 219 aa, Heterodera glycines
LLQIVLNKYYRRGGIARRLSFSKFGIPRPKNVCLILVPGDGGSRLKANLTGKPSVVHYFCQRQTNDFFALWLDLTGKPSVVHYFCQRQTNDFFALWLDLQQFGPFVIDCWADNMRLNFNRTSGLQQFGPFVIDCWADNMRLNFNRTSGRAQDLEGVKVRVPGFGHTRTVEWDSSKRSPSRYFAPIVASLAKLGYQRGIDVIGAPYDWRRAPGEFNFFCF

SEQ ID NO: 140608 - protein, 290 aa, Heterodera glycines
RNVPKHSADNWLIISFSLLKVFWEPPAVFKSLCQIDVQWFPFDEQLCQLKFGSWSFGSWSYPADLLRLTFWEDANGTETEREELASTLSIHSSSDLSDYYPSVEWDIMSVKAVRHSHFYSARSSADSLSLSLSFQYNLALRRKPLFYTINLVFPCVGISFLTILVFYLPSDSGEKIALCISILVALTVFFLLLIALCISILVALTVFFLLLTEIIPATGTVIPLIGTEIIPATGTVIPLIGRYLLFTMRYLLFTMMVTLSVMGTVYALNFHFHKLNFHFHKPTTHSFSPW

SEQ ID NO: 140609 - protein, 547 aa, Heterodera glycines
MFGYQQTQFNYGAYASANGQQQSFINYAQQQNNSATAPVAGNATTNAYAASQYSLAASAYAQYSQAATQQQSVAATYGVQPPPPPPDYSEFRKKRYGLGHQNRDVQQHFCEVCKISCAGQAAYKDHLEGKPHKKKEMAAKNKSTVPTYKGVGFRCEVCELTCSSKDTYDAHIKGQKHQRTVALLRRMGKPVPEQLDVSPAVLTSANAQALGKPIPTKALLADVDIKPIGQEYIEEETDTNGKFINYNCKLCDCKFSDKNAKDIHLKGRRHRLQYKQKVDPSLKVEMKQWGGKKQQQKHKFGGPGAYAMSYKTLKAVSDSMLSEADCPPETQEEHRVLKGVMRVGLLAKHLMLKTDTQAKCVPLHSVNSTVKIVRDIGNRVQTWSALNCWAIELLVEKTLASISMPLSPGDAVRRLFEVISSGQFLSKRSKLTDPCEKDQVDILAHITDQEREDITSSAQHAIRLIAYNQLYKILGIERLPDLRPAPAPPVGNGGAASLKRPLSRDESSANGGGGPAGAASAAADSSSEGNIAEKKMRMDDTKEETED

SEQ ID NO: 140610 - protein, 96 aa, Heterodera glycines
TVPSMSSGTVSPLRDVPLRLSDKPSLPFPSPRRLTNDCPSSPSPAPITLYLRLVSWVCSMSGLLFGYASSSINDLLPFIVREMRLWPAEVGVVISC

SEQ ID NO: 140611 - protein, 220 aa, Heterodera glycines
TTTTLRRSENSLKAELMGKLANQVVSFVVSFFASWAGLFLVSRFGRRPLLMTGQIGVIGMNILMAICFGFFPFGPIRGWLTLALLLVFLTFGQGFISTVTWLLTAEIFPLHLRGICSGLLTAEIFPLHLRGICSGIGMSVAWGTAFAVTMLIPIGIHIGIHSIGMAANFACLALLGLISLLFVWNFLPETRNKTLEELEKQFQKRDWTALKREGQNERDR

SEQ ID NO: 140612 - protein, 80 aa, Heterodera glycines
MSRFYKTSLCTFYQQRGFCNNGDQCRWAHGEAELRKGADGSSNGLANYYAATMQAMATGQQNANGSSAEAAAAAAAAGWN

SEQ ID NO: 140613 - protein, 49 aa, Heterodera glycines
MGRARRKKGKTARRARQGLLGFTRIAREGKKPKQFVSNFMLVLILRKCF

SEQ ID NO: 140614 - protein, 26 aa, Heterodera glycines
MVAGIWGGGRGLTLRTVIILSNISSK

SEQ ID NO: 140615 - protein, 33 aa, Heterodera glycines
MDVKLIVNVMEGMDRTKMLQICYQYQQQKMKEE

SEQ ID NO: 140616 - protein, 78 aa, Heterodera glycines
STYGAGCVSNILFGKIFFFDLSEGANINNFFLKTHTYEKVTSIFLIRSEIVRGGNIVHPYQKIVFAFLYISFVLNLLI

SEQ ID NO: 140617 - protein, 20 aa, Heterodera glycines
VNLVLYNGEGLQNLERLYRF

SEQ ID NO: 140618 - protein, 70 aa, Heterodera glycines
KCPAILSAAHKNGDTSIHNQKERKNVWQKQTFVEAKHCFGWINHNHHKFWENLVKFDGMRERQTVEMCNK

SEQ ID NO: 140619 - protein, 130 aa, Heterodera glycines
LTVFPFRQKKFFFDSYFERDSDEEEEARKVEKGEESGRRHAKSSDRNGGRQRQDGKKIRREEEKQTAEEEEEEEEDPLDAFMNEINEVADQAKEESLRKESHALNTGEYAGGQMGRDDIEQEDMHGQLTD

SEQ ID NO: 140620 - protein, 43 aa, Heterodera glycines
CFAVPRTGRQWIALNLQEIILAISGCKKLLGNELFFEVSQTPY

SEQ ID NO: 140621 - protein, 18 aa, Heterodera glycines
YREAIPEGFGLPINLGAS

SEQ ID NO: 140622 - protein, 27 aa, Heterodera glycines
MTSHFLVGAAAFGAGMCFTKTYMEKPK

SEQ ID NO: 140623 - protein, 71 aa, Heterodera glycines
MISVQFSPIVLLLLLLTLLHLSSPANARPQWYYADPISMANNRGTLFDNLWGRNEFAGREWCLSTQFFKGY

SEQ ID NO: 140624 - protein, 86 aa, Heterodera glycines
FPSNFPPSFCCCFCSLCCTFLHRPMLVPNGITPTQFRWPTIAALFSTICGDGSDLALRKTNKTIVNLCIILCKVLFNFVLINAINS

SEQ ID NO: 140625 - protein, 53 aa, Heterodera glycines
MISVQFSPIVLLLLLLTLLHLSSPANARPQWYYADPISMANNRGTLFDNLWGR

SEQ ID NO: 140626 - protein, 320 aa, Heterodera glycines
MAPPAEKKKKHSSADHRLIISASIGGKKQQQTLGSVITSFGKRRSLRVAMKENCRILRKIWVCNDIWMDIFPHFDRPQLGLKMALLSPRFNALVDKHFDGISQLTIWNAITIHRIGTKAKLVVEENNAKFPLPDHPLRNKIRFNYLRIEYIDYSVITFLRANQQIFDKGTDLNLFMPYYDHDDKNVQPIWDDFARAIWPIFAPNIRHLSFSDAHAFGNLRRHISPTILTDLNQLNSIDSDYLLPDVIGDDGPNATAGQALSKWLQILGKDGKPKQLSCSNYYHAAMPTINEWIVNFKEVKKGLITFNWPLFFGFQLKYLH

SEQ ID NO: 140627 - protein, 30 aa, Heterodera glycines
TVYALIIDQSLLSRSLQLSPSLRGVLKNNP

SEQ ID NO: 140628 - protein, 271 aa, Heterodera glycines
LQQAFLLLGRARKKRRGGRALSTGEADREKGQQRQTGPHAARRERGKARTEARRTTAKATGKKGTTNQERKTEGRRRPDTAQAQTANDANQRPAGGPRRPGGEQPGNESPPAPGEACTQSRNPKEQTEGHHQERSRRHKPTQHGETHPARTPQGKTEREHTQDAAEGGARPPPERGAKRQANTENERDTSPPKRRHNAPEGTTTEREHRRAAARNRATTGQRSPKTTGAARALHWQNQRACPSPKGVGKPVKICRDWDRTLQLLSVNEEFL

SEQ ID NO: 140629 - protein, 82 aa, Heterodera glycines
VARKVETQFPPVKTVRRECTKIAASCPCGYGSCVFVTRKQIVDVCCAGPYEFKCCHNVRNANFGVFITFEMCRVTPPRDYDG

SEQ ID NO: 140630 - protein, 156 aa, Heterodera glycines
MWLLSFRLTGIGSSFTLFLRNVMTQLTPLDLVLDTLQQVVASPEHRPTQLAARFSADYRQQVDGKALNFEQFEQHMALLKRQTRRMTLSVIAAAEQGEAVLTHHLVELEKCDGSCSRVRVLAHFTVREGRICACDELTELLAGSPGDRDLGSRVSE

SEQ ID NO: 140631 - protein, 117 aa, Heterodera glycines
MRLLDLFALATVFAHFFYRSVQIVNRNVFATTGYKESEVQLPQIVVVGSQQVREEIEKETERVTGSNKGISPAPITLTIYSSRAVNLSLIDLPGITKVPVGDQPPDIEVLNSLYDLI

SEQ ID NO: 140632 - protein, 133 aa, Heterodera glycines
MNILATHHPPDKDYGHMKIDEPKTPFNNYSDSEGEELTSGGGTSRPRRVSLVGAVDADELRKTISGGTRSQMKVLDPPGSGEDDEDSESGMTEEQIVKKREFEKKRKTHYNEGAFLKKMRERAAKEEEEEDEQ

SEQ ID NO: 140633 - protein, 175 aa, Heterodera glycines
MHSAGLSPFVNHWSKVHNFTPETGKCHLSPHGVVFQSAAIHNFPLAERLNDFVAHSPLVDRWKLCIGNANNSPLFVEEKDENCQTTDNEKDNNVLVLLQPVDGFNPGLRFYAESVQMAIDLRGLGRLVAMQDIDLRAGEWEVLLCQNKQQKKKHMTNMWENDLLPRNNKGNEIVN

SEQ ID NO: 140634 - protein, 32 aa, Heterodera glycines
RYNERVKQCVKESNVALESDYRDISNDGEGRR

SEQ ID NO: 140635 - protein, 227 aa, Heterodera glycines
MVIRPSSVQMHPPLHNNRFHSNQFSFAVAAEQCQQPPMNGGGGTQPPPAGGALFQQPFPPAPPRGTEAAAQIEQHQMMLIRQHQQQQQQQMLLHQLMLRGEVSLPPQGRPSAQPPHSFPPNPHNNYQHIVGELTPPPSQPSLGGLSSPQANGNTSSAALLLNGFNPSSTTASVSSGYNFHSVGDLHHPTTTATTAVSASELLQRQCQQMLLARQAAAVLQQQQQHKS

SEQ ID NO: 140636 - protein, 68 aa, Heterodera glycines; identical to SEQ ID NO: 139700

SEQ ID NO: 140637 - protein, 79 aa, Heterodera glycines
FFLSFEINCEKYTKLFSVLIMLYNAFKPRREAGQFQNFVLHFTVESPSTLLDNYVSMSTVAFGLLWNGKWKYQMGCALF

SEQ ID NO: 140638 - protein, 34 aa, Heterodera glycines
MNLGISHGISKRICTFVEIILREFFLFCGCPQQQ

SEQ ID NO: 140639 - protein, 30 aa, Heterodera glycines
MKKNIYKRLFNPEIVVRKCRSANVALRQKD

SEQ ID NO: 140640 - protein, 223 aa, Heterodera glycines
MKLCLLFFSIVFLIAQIEIGAEKKKLEQKTFEEIFGEKWEEKENEQKKREIVQKFNKIKEKIKQKERKYSTKEWHKIELKIGKKLGTNRNKIYKWIKELGIYKGHNKSKTDVQKIEIVQKFNAMKNEYKQNGRKYSTKEWDKNYAEICKKIGVGHDLIKRWKKQFGMGERINEKEKMEKMKMYWQMKGENPKMSDSKISKILKISQWTIFNWKKQFEEELNED

SEQ ID NO: 140641 - protein, 449 aa, Heterodera glycines
MFISLNSYFFSNLKMSNLNPVQQCLLLISKITTHNFTNSVKIVQAEKQKTEKKGQSGINPLKRAFANAFYGSSQQITDDEEKEAPISSKSPILIGLNAKRRHTAESIVSFIREALNDFQIQEQKISALTRDTENTMKKCIKEGLRSIEEEERLKNLFENVKRFVRKVRKSRVLTEQLAELQQKEEIEEVPPTVLIKNVEVRWNSSYKMIERFINLLSIEHYQLPKFNADDWLLLSSIKSILSPIYEATVLLQNRNSSCSIIIPLFKAISFGLRENKDNRYSNIKKTIANAIELRLKQAEEQKNLVLATILDPRFKTIYLDSSRLNQYKDWLISEVESYHAKTDATSPSPSALETRQKAEVEVNEYLRDPKIKSRADPSLYWEVNSQKWPMIGDVVRKFLSPPATSSEIERLFSTAGLISDDLRKSLLPENIAKLLFLHHNLLVTGFSIE

SEQ ID NO: 140642 - protein, 49 aa, Heterodera glycines
LNLKKCQRLLFLKFFEILTFSLIIYYFAKLIHKYFFRKCSETHQMLIKS

SEQ ID NO: 140643 - protein, 130 aa, Heterodera glycines
MPSHEFQNIKVKNRPNFVEQFNKCNVFCQQSEAEEKASRPIERVTENAFGTVPKRTAHLAHRIGQRGYKGRRNGPKKWRQLTKAMAKTLLGVNNNHWRGLFIRCDFANGANDLGTVRMSVAGGEAVVLGP

SEQ ID NO: 140644 - protein, 86 aa, Heterodera glycines
EPNATRERLGRFIATDAPTLRATNEWRKERDEENRRNDKRRGKRRALPFSVFAAKWRRFRPVPFACASAASASNAEAKCGTMFNRK

SEQ ID NO: 140645 - protein, 17 aa, Heterodera glycines
ALEVKKANLADGGRSNR

SEQ ID NO: 140646 - protein, 193 aa, Heterodera glycines
MGISQLLLQLRQRCLPYYSYSKSDQKNHHHHFALGGGLLLLLLLAIGTFESPVPLVAVPSATTLIIGTMVTLFLASQADFIYRSWLTLERDLTGLFLLIKIRLDMRRRMRENKGIQQIFVDVYTFREFNALANRFANTFLQNGYRSGDVVALFMENSAEFVAAVFAFLNVKQFYVLTYLSQVIVYKIVDIIQI

SEQ ID NO: 140647 - protein, 150 aa, Heterodera glycines
MLSTIRPNNPLLVFDGYLNQEETKKKVVQNVFRHGDSAFLTGDILHWDRLGYLYFRIRTGDTFRFKGENVEAVLLPLKCIIDAVVYGVRVLELDGSVGMAALVKNDEAGTDDKFLRELSARLHANLPAYAIPRFIRICNAVDRTGHCFQI

SEQ ID NO: 140648 - protein, 57 aa, Heterodera glycines
MLLLLRVLLAVVLRVLLRVGCCCCGGAIRTNGVQPAKQFAHQRRQQLEAALVAKLCQ

SEQ ID NO: 140649 - protein, 30 aa, Heterodera glycines
MCRELNGGVRHNTRERSGIAAKKGYKSLFP

SEQ ID NO: 140650 - protein, 38 aa, Heterodera glycines; identical to SEQ ID NO: 130624

SEQ ID NO: 140651 - protein, 43 aa, Heterodera glycines
MCPKELVEQRKKEIERGFNKMIEYLEGSSEETETPKKYSNFLI

SEQ ID NO: 140652 - protein, 161 aa, Heterodera glycines
MFNAISIAHRRVKPMLRHFAAQGSISLIVLLSGSIDEDECVVRVVIEVVAPDWHFVQYSFLLLPRPVFGCPSTLLLFLRCPPSSSFSSRGVKLVGYRIGQGRQCLTGGSFQTRCYCLFGAGCEAGGVPYRPGSTVPHRWTSQTRSLMFGSAGLRQADPSAL

SEQ ID NO: 140653 - protein, 157 aa, Heterodera glycines
MGQNGIQEQQLLRDERTQKRKVEDQFYFCNLSADMKRVYSPGFCGLLCNHPRHSDVLDVRMSIFAFVESMKGTSGEYWHILTPKSKRNFEADIGTTPTFLQPGGKTVTTIALGKYGQGNPEPVALRPNYWLETSRERKPGLGYFQESRWKVYTANDL

SEQ ID NO: 140654 - protein, 92 aa, Heterodera glycines
MCSKFLVLTMLLQMALANPFGTKQSVTVSGHLKCQGKPSVGTKVKLYDNDHFTIDDLMAQSKTDNNGHFKMSGTSKEIANIDPKLNLYHVRN

SEQ ID NO: 140655 - protein, 52 aa, Heterodera glycines; identical to SEQ ID NO: 128760

SEQ ID NO: 140656 - protein, 26 aa, Heterodera glycines
MKISNLFGLVGNQANYGWSKETAKWQ

SEQ ID NO: 140657 - protein, 42 aa, Heterodera glycines
RDGRSSARHSKPKAKPNFFRSTKFEVRSPKTAKFRSSKHEVF

SEQ ID NO: 140658 - protein, 26 aa, Heterodera glycines
MEKDLQIWRDYIDFSALEHVLKIFMN

SEQ ID NO: 140659 - protein, 24 aa, Heterodera glycines
ITGVSIIAVLFLVFLMPSQNLVRF

SEQ ID NO: 140660 - protein, 45 aa, Heterodera glycines
MMGSPNAAQTLDGLNKVGHDELKKMATAQRGGDWIGTVTIGGQQF

SEQ ID NO: 140661 - protein, 79 aa, Heterodera glycines
TLITIASYQKFNLVYNEKSHYQLRRTGRFPSIHRSFYSSVFLLSSPTSSFFPHFPLIFPSKIDPPPINCFLMPIDHNGK

SEQ ID NO: 140662 - protein, 85 aa, Heterodera glycines
MILHTERRSICSKRHGVPSPQQRRRRKTTNEQTAKEVKKNVENELEEKGREASPEGNEDERRCAYDDDRNAELFDGVGSYMVYAP

SEQ ID NO: 140663 - protein, 478 aa, Heterodera glycines
MSGRDAETERTAVKEEGGRGKKDSSWLDESESRERVEWKRKVSRGKKRTKISPQKRQMRKKVEEQRNAALSDQEESRESDQNRETKKKWVKTSAGKVPKGQPQYSTHAEKEAHQRDGTQADTGERNLSLQQQANDALSQQQLTETETDRPIDGQQYGRFAVRTVKGLPKWRRDGILTEASKSTESEFETAPSKSDRHHYDTDGTQQLRQEQSFLSGASTELSEFLVERVRPKNEYRRYGNSKESSAEAMEKSPRHGIGMTNHLNLSSDEIETDQSLESHRFHSTETASHFLSRSEQKETDDKNSAGWRIRTVKKGGEVVPTEEDEQKQAQFLMRKTESGTEGNFGIMAKSDGQKWGDSQNANDGADNERRKEQQELFHLANAQPALWLNEFGEVSHSTDQRGGQMGLPHSDGSRAMAECRGWEDVHRAIKRFVKFQLAKEAKVEQKDDSFLAKVAIRPRIFTQKRQWTVKMPKFHWFH

SEQ ID NO: 140664 - protein, 41 aa, Heterodera glycines
MQRPIIVNIIALANLGTGIKLNSLTITECEFKYNPRKFNAA

SEQ ID NO: 140665 - protein, 107 aa, Heterodera glycines
MCNFASPDMVGHTDVAIGRILEACRNHGYVLLVTADHGNAEQMKADDGGPHTAHTRNKVPFTCSSAAHSFKSAPPTTAEGVPRARALCDVAPTVLYLMGLPKPEEMD

SEQ ID NO: 140666 - protein, 117 aa, Heterodera glycines
  unsure (1)..(117): unsure at all Xaa locations
SRRIRSXHKSGRIGSGGLPRKQKNRFFQVSVWGTQTIMGSKNPTQNQSTGYREAIPEGFGLHINLGASVRGDCPENKKIDFFKCPFGVLKHLWGAKLQRRIKVQTIGKLFPKDSVSP

SEQ ID NO: 140667 - protein, 213 aa, Heterodera glycines
VRLNPPAFQSLGLNPTAFQSLGLKPPAFQSLGLKPPAFQSLGLNPPAFQSLGLNPPAFQSLGLNPTAFQSLGLNPPAFQSLGLNPPAFQSLGLNPPAFQSLGLNPPAFQSLGLNPPAFQSLGLNPPAFQSLGLNPPAFQSLGLNPPAFQSLGLNPPAFQSLGLNPPAFQSLGLNPPAFQSLGLNPPAFQSLGLNPPAFQSLGLNPPAFQSLGL

SEQ ID NO: 140668 - protein, 74 aa, Heterodera glycines
MADENWKGSIGDGNVGIKCTGRGGGGTDLGIDGAEEVVFGRGLDQSLGLTKNVAFDQAQALVQFNLLSAPITID

SEQ ID NO: 140669 - protein, 63 aa, Heterodera glycines
MPVSQANSWIPLVLSLVLRFRETRHTESKNFSGRDSRAANFKEIYRSEQFKISALLKDTAHNQ

SEQ ID NO: 140670 - protein, 168 aa, Heterodera glycines
MDTISLQVLLAFAMFATTALAGLLPIKLLHAITRRQDENDEQRSRKSDYILTLLSCFAGARITPIFGQVPVEHRLPIPAILCLLRLFLGLFSGGDLPKSVRVRKTAPATRALSQRWPWRPFSWQQRRVGKNWQKILNSKREKHLMDLALPPELVSFSHWRSYFPNLWS

SEQ ID NO: 140671 - protein, 34 aa, Heterodera glycines
MVGGLSSTKVAKSRKNLNKLLALGRRRCRVQRCR

SEQ ID NO: 140672 - protein, 77 aa, Heterodera glycines
DEDPRTRPAGQEPVQDFLGSDPYATEEDSLQFFEEQERQIALQIAQENGENEQQKEAEDDAEDGQAEEQQLEEDEEE

SEQ ID NO: 140673 - protein, 34 aa, Heterodera glycines
MNTKKKANIQEKNGTKIITKLARKLELADRTITK

SEQ ID NO: 140674 - protein, 79 aa, Heterodera glycines
PPTLDPMRLDIGNIYDWFTNPLPYQVMPISWYPRNFTNPDLNYLDQYVRISDDTLYAVQLGLYVVGYKEFQDDQVSLIT

SEQ ID NO: 140675 - protein, 46 aa, Heterodera glycines
MRSMTIDGSFFCSIVYDLSSAIFASFTMKSTQNIFKLIGQLMLLVI

SEQ ID NO: 140676 - protein, 106 aa, Heterodera glycines
MSKPLAERMKHLLSAGEDADVYFLLVPAHRIILKLASDVFEAMFRFDAKKERPENVSGNCPDVVEIPDIEAEAFKVMLSFIYTDDLSDLNGENAMAVLYAGGFNFM

SEQ ID NO: 140677 - protein, 70 aa, Heterodera glycines
MKALTKMRNGWAFLFGAMLLKKQKIGVANVLQLFELFRKSAALRISEENSMTMFLTIKTEAGDTISFHLL

SEQ ID NO: 140678 - protein, 191 aa, Heterodera glycines
IEWQTGNMVRIELPSSNVTNPHELSKNLYRLLGEGSDPLAKKVRSTQNSFMLATNKARRWAREEYIRRKTKEKLGVRDEELLLQALMTDTGPLVGLNTVTQGLLAREKHAETSNIALRTPTDDNDSYQKKLDDYFSKLSEKNLSIVDELGMIKLKAEIKNLTEEERVILEATKEMGTEGWIQSYREIRLAW

SEQ ID NO: 140679 - protein, 25 aa, Heterodera glycines
MFFLLFYLFLFSVPKTNAENIETLV

SEQ ID NO: 140680 - protein, 69 aa, Heterodera glycines
MPQEKFRRRRKKRRDELLGTIISILIMLGLMIALRWVILFILSRSQQLNAANARWALRLPAQIGEAREF

SEQ ID NO: 140681 - protein, 339 aa, Heterodera glycines
SPGLNPPAFQSPGLNPPAFQSPGLNPPAFQSLGLYPPAFQSLGLNSPAFQSPALNSPAFQSPGLNSPAFQSPGLNPPAFQSPGLNPPAFQSPGLNPPAFQSLGLNPPALQSLGLNPPAFRTLGLNPLAFQSLGLNPPAVQSLGLNSPAFQSPGLNPPAFQSLGLNSPAFQSLGLNSPAFQSPGLNPPAFQSLGLNSPAFQSPGLNPPAFQSLGLNPPAFQSLGLNSPAFQSPGLNPPAFQSLGLNSPAFQSLGLNSPAFQSPGLNPPAFQSLGLNPPAFQSLGLNPPAFQVFCLHFGTTFGIFLVFTCFWHFLMAHVSFLYLFFPFFHFLMARHFFSIF

SEQ ID NO: 140682 - protein, 75 aa, Heterodera glycines
MAAKAVKEAALFGDEMGNKRVRNVAATILYTMPLKREEEEANDEGEEGGKEGHGTAEETEEDEQNKQMLKEEEEE

SEQ ID NO: 140683 - protein, 80 aa, Heterodera glycines
FVVSPSHIKNCAIAVSLGQEEAVHMLKSHFKTVQNFFILRRRLFPSLSRQRKFGHVKEATPQRRCQQSVQVDIRLRQQLV

SEQ ID NO: 140684 - protein, 119 aa, Heterodera glycines
MKKVFDAYENTYKTPKQKLDKVKQLQAEISDELRNSLKMTTDPEVLKEASFAFGDVPTFTGITKRVSVLPPKYLSIKGHEQCVDKYVVYGWHQGWHSEASKRSEIEIPCHPWLAPVVWD

SEQ ID NO: 140685 - protein, 45 aa, Heterodera glycines
FFILRRRLFPSLSRQRKFGHVKEATPQRRCQQSVQVDIRLRQQLV

SEQ ID NO: 140686 - protein, 69 aa, Heterodera glycines
MLCCCFLFQLSLFLFPFTSATIAGYESKAEMPAAAPPAPNCANLDETSEANANGPNPFCVYPALIGVTH

SEQ ID NO: 140687 - protein, 343 aa, Heterodera glycines
MNSSLELFGEESVHAFDDWADRFKDYLSLTGKNWTEEEKVTRLKLALKDTPRELFKELKSNQITTFTSALEALRAKLDSPQRREVAKRTLSVCRQREDETVAQFLRRLTPLIDSTNPSLTGDLRKEKICEEFLDRLRPNMSFLIRLVGLTQPKNLEMVKAQAEELEALLLSTGGGVTQITQLINSMTEQRGNEEPNEQNERKFEQQWSDNGGEFRNATSHDAQCSYLENERSEGNHQNWPRRRHGNMNRRNWSNYPTCQLCNRAGHSSYNCHERRAQFEDQANGEWHQHRRLPWNNWRDQANEMNEMPQSTSSLAPEFMEDLVKSLITLNLQKLNNTRPNNRD

SEQ ID NO: 140688 - protein, 44 aa, Heterodera glycines
  unsure (1)..(44): unsure at all Xaa locations
FIGDSINYTSCEHXADIIAHSFDRDDINGILLWTFYVRISNLFR

SEQ ID NO: 140689 - protein, 53 aa, Heterodera glycines
MDPNLTKITFKLPRCPVVTELFDKADRCPNIYATVEAHRTKKKTVQFQPPIHQ

SEQ ID NO: 140690 - protein, 106 aa, Heterodera glycines
MPSFALSDDGNELERLKAQRKAIDAKIAAELVRWQMVNWGTELTPKAKDNLKHWETIESFSSLVPWSLKASCPFRFVSDVPDFCFLVAQFQVISVEWFGDDYDGSN

SEQ ID NO: 140691 - protein, 69 aa, Heterodera glycines
MALSSLIELGKNRQQTQRDEAENGIDNDDCRFDGSVAVSSPSVISSTFAATPANCSAETFQSHANGTHN

SEQ ID NO: 140692 - protein, 50 aa, Heterodera glycines
HNVAELRRVHVDLGEHRVGQFSGQTGKYEYNAEKQTMEFENLEVEKDDGF

SEQ ID NO: 140693 - protein, 205 aa, Heterodera glycines
MMGRRGTNGRQTQPKEEEKRVETEQKKQPPGDEGTYGGTAKNAKDANSTAKQRKDSAVSEFLLTVEQQQKKRIRSTSICTAQMKAAECQEEKADELANDIFSLITECVANIELPSKVAATSFAFGEMHAQLCHFGFRPEFFSTIADATIAECLRLDAGTQKRCETLLAWSQLMQFMFSNVRDGYYAEVRQQRRSSLPQQRLLLKQ

SEQ ID NO: 140694 - protein, 70 aa, Heterodera glycines
GREAAEYPPKKIKKRARSARHEAAKRPNVLKKLKDGREAPVLRPRSGRMSPKKLKNGREAPVLRPRSGRI

SEQ ID NO: 140695 - protein, 58 aa, Heterodera glycines; identical to SEQ ID NO: 138265

SEQ ID NO: 140696 - protein, 32 aa, Heterodera glycines
CCNDGCQIRKKSTACQPISWSRNGMIGSAWWA

SEQ ID NO: 140697 - protein, 40 aa, Heterodera glycines
LGYDISWTTFNIIEVMSSTRYSEKRIGYLAAVQAFNDETD

SEQ ID NO: 140698 - protein, 18 aa, Heterodera glycines
YSEAIPEGFGLPINLGAS

SEQ ID NO: 140699 - protein, 183 aa, Heterodera glycines
IILVFLDESSVLPVAADDSQSGIGATISHVFPNGVERVIEHASRTLTPAERNYAQIEREALSLIFAVQKFHRMIYGRNFTLLTDHKPLLAIFGNKNGIPIYTASRLQRWALILSNYDFTIKFKSANFGHADVLSRLSEHRTDEVIVAHTYSTEEVEYALLVNLEQLPVDAKEVSELTISDDLL

SEQ ID NO: 140700 - protein, 40 aa, Heterodera glycines
MVNNQALSTCSVKVNENWLKTSCMSCILYAFSCRMLINSC

SEQ ID NO: 140701 - protein, 114 aa, Heterodera glycines
MQKKDVTVNVFEAARQILSAETSVMQKNELYFTDYSLIPLFVQENYVNRPKTFIILYFINFFHLLGNVFFCASLRSDGRLFDCSDSIPRLVWQTFDRTEKAKINATTFAPYPSK

SEQ ID NO: 140702 - protein, 250 aa, Heterodera glycines
CLFRINKIEEAHRECARVLEKNPLDQAAWSLKLACFAEEVFVDELENDEAGLADAYMDLGTAVATAARPGTSLSRPGTSAGGPSPAVRPRGTSAGGPSPAVRPRTASGRPLSGMQRPMQRPESRLKTGTQNSMERMLRTSRTSRTSRPISAVTARQARLGTASMVAQKDGPFVNMARLNLEKYAASMVAQKDGPFVNMARLNLEKYAREGNVNTHLFNYVFLHEADARSALRWSPHAARTANDAIWFWPA

SEQ ID NO: 140703 - protein, 38 aa, Heterodera glycines
MLFCGAVAGKSDDSAVALGAKCPISWTLMTTNTFLEGL

SEQ ID NO: 140704 - protein, 200 aa, Heterodera glycines
MDSFCSSIISIVAIVCLLCKCCFSAPHPCCPGSQHVVSMMKDHTPCCPGSQHVVSMMKDHTGTFSASMPKSSLCMSAERVAAAVENQLKTIWCPGNGSQTLINEINATQSSSDEECARSLGFVRAMFEIAASAASHAGANADLAVQFREQVGTIDSNCAALGIHVGQISLDAPKGDDHPQVHDSESVLSNPGTSGSHKRF

SEQ ID NO: 140705 - protein, 117 aa, Heterodera glycines
MTFKMDTTTDSQKNRVLSRLMIRWTTFSTWSTELDILPLLDKKGQSEEEFFDFLYLNHPQISSNNSKRKISLLSYVFFKIFPNSNIFTMIRLIFIQSFCFSIYSICFFLFFFLATSF

SEQ ID NO: 140706 - protein, 52 aa, Heterodera glycines
MRQYPTCMEFNERFLIFLFEHAYASEFGSFLGNNELEKKRLGVKVGFFEKIF

SEQ ID NO: 140707 - protein, 154 aa, Heterodera glycines
NMLALKFTLICMGSVRTNGTDLSGAEQHQHSVAYTPQQKNQLMWAVAVGSMLWAVAVGSMLGTFPFSWLYTRFGARFVLFGAGLASAIATALIPIATSFSFNLFLALRFFQGISFAADFAAMGMICSRWASLKQNALFISVLRCYSPLSTTITN

SEQ ID NO: 140708 - protein, 86 aa, Heterodera glycines
MSKKRKQKQFAEELGIGEKTFYRWKKEFGIEMDKSGNAYSNVEKMSKMNIYYKMKKDNSSLSDTEIARSLKISLPTLSKWKKQKLS

SEQ ID NO: 140709 - protein, 143 aa, Heterodera glycines
MGDSALADEDGNLHKGGKASATMLASVPLLSSDDELRNGPTLSAPPLPEGKENGGGGGMCILDTMKPKIHMMKQQQKQHRKMNINSNNNNNCYNNAVNGTLPQLAKGGIRYRMHSRSQSPSLFGSSKHENSFILNQKNVFSPL

SEQ ID NO: 140710 - protein, 221 aa, Heterodera glycines
LSTDALILTITLISPFDAQLVSMLGNATRAENCAEWTDWGPCVWVWLRGDDPRWQRSYFDQLLPGRSGCRNHMFFKLLRERWGQAVSNVMDYFRQLTTSTKQCGFCSFQHSCGRRCHRRSSSNPMNPLFVAERHCDGVDQSASCVSRTNGAVAADECQLWPNRQIALPNVSDWMASILRTVPFLNCVPQTAVCIYTVCYCNAHIPHKGTLKCRIRSINTGH

SEQ ID NO: 140711 - protein, 395 aa, Heterodera glycines
NQIADHRKGKTDKLTNIKILFNLSELEMLRARWKQLTDEEKRLLGDNARLWDDLTKARNDLDEETLGRIDFQNQVQTLMEELEFLRRVHEQEVKELQAFLRRVHEQEVKELQALLAQAPADTREFFKNELALAIRDIKDEYDYIAKQGRQDMESWYKLKVSEVQGNANRAVSEVQGNANRAQMESNYQREEVKRMRDNIGDLRGKLQDLEGRNSHLEKEVQNLNYQLNDDQRQYEQALNERDATLRRMKDECQSLVAELQALLDTKQMLDAEALLDTKQMLDAEIAIYRKMLEGEESRVGLRQMVEQVVKTHSLQQQEETDSTVVKTHSLQQQEETDSTRNVRGEVQTKTTFQRSARSAKGNITIAECEPSGKFVTLENTHRSKVSEKIRRGECR

SEQ ID NO: 140712 - protein, 96 aa, Heterodera glycines
MDDAPIDPHRRVIRRNAAHLLHKKEAKYVLEKHGLLMHLGTPVCEWHLDLIKKGMAEQAESSRKGESHSINEGMAEQAESSRKDESHSIDNLFKLE

SEQ ID NO: 140713 - protein, 25 aa, Heterodera glycines
MVTRIPIYFMMLIILIHQNSAHWDI

SEQ ID NO: 140714 - protein, 28 aa, Heterodera glycines
MTNFGLAIFVVSMLTMPFSDEDYKSKIN

SEQ ID NO: 140715 - protein, 144 aa, Heterodera glycines
HATARLTRPLEPILFPKLRIFADFPYLHYSRLEAVHLGDLLRISVRSGRRFKLPSHFQGPCGAHETPQEPWCFTGATSLSQAEPLPGTHTLNEKRTLARTPHDVCEFICVTAQNSSCEPSFLAWRGNEPTSLSATGWTNCASTE

SEQ ID NO: 140716 - protein, 57 aa, Heterodera glycines
MTQHLLKCEIESETHPLLIPIEQYAKKSFFSWGPDNPSVKDNPSVMDSPSVDNPDLN

SEQ ID NO: 140717 - protein, 177 aa, Heterodera glycines
MHFEVIRDLCENIHKTDEMVQQKFAKIIKGLTESKECRQNLNSFLKKEQIKKIFEVIGIPFEEKDFENPEQKMEFSSDQSEEKGKETQKKGRKNRRDKNGQKTQNKNEEKWESEKESGEKWTKNEEEKMPKEEKESQKVPKEEKESQKVPIGEEKSEPVPEEEEEELPNTKGEFKGL

SEQ ID NO: 140718 - protein, 135 aa, Heterodera glycines
MTKQIEIEQILFDRMMAKEAGKELANCLSPSFAKATQQLISDELDQQNSQKSNHQAKLLISGSFLLGLNTTDSDIDLICVVPGKAIEKEHFFGEPNEICVERECEKGGRQKDTLAQSFYCQLCGPISFTPTNLAF

SEQ ID NO: 140719 - protein, 28 aa, Heterodera glycines
SWHNCVHPGPISGPISPPTVAVEVAGTE

SEQ ID NO: 140720 - protein, 91 aa, Heterodera glycines; identical to SEQ ID NO: 135535

SEQ ID NO: 140721 - protein, 286 aa, Heterodera glycines
MMDEPILAVISLTMFIGSYLAGFIPLFFSLNERKVRIASIFGAGLLVGTAFCVIIPEGISSLAAASFVQTNDREIGKMSPEKTEDAASNLEKERKTNEKMHRRNIRQNWDENEQRKGAIGQGKTARDRRKKDAKAEKVPTADEPHNGGEEGGQWHEEGTRRTDFERLNGPIGVSLLVGFLFMHVIDQLSKLSHSRQKGMPTLGLVIHAFADGIAMGSASSAGSQLELQILVFVAIMLHKIQSSSSDDSLSGVHEETTPSQFTGIVLLFSAGTFLYIATVHVLPELV

SEQ ID NO: 140722 - protein, 79 aa, Heterodera glycines
MYNTDSESPSDFAASTRRIEQFLFDDATAKHFQPIVIEKDFQFVGWTHASQSIHKASLAKKKFNSLEMDAATHSNSWPQ

SEQ ID NO: 140723 - protein, 55 aa, Heterodera glycines
MRVISQNHKMIRRKFWKTVVLLNFRQNYWDAEACHEDLEISGDNSLTVYRKRTNL

SEQ ID NO: 140724 - protein, 254 aa, Heterodera glycines
MKLITLLLFINVLQFSVGTDNQKGPRIIYLQEPTVHQISPSQFRNFVIENTTDPEWKATKNANEASSSSINIPINIDSDSDDDDYDGLDRRDALRTGGPLLLDFFTGKAYQQNLSRQNLGEYSKSNLLDLSNQPNNSNQMILPAVRNQPSNSDQTKQRSINDDSNMLMRVNPANNLPEVIASVTNSQQLTDQNNHPLTENPTDQSVRSNQNNQHEIQEILHLPMKNQQNNKRAAAPNSRQEYGFDLEKVPKAKK

SEQ ID NO: 140725 - protein, 149 aa, Heterodera glycines
LKKETDNSLSGQGVKCWDSIHVLEVNEAAKFAKYKLTSTVMLWLQTQKTTTGTIDLGGSLTRQSEQDCAVNEQNPHLANIGKMIEDQESKMRATLDQESKMRATLNEVYFGKARQIVGDLRSVESTAELKSRGELGGRILIIRINHGHC

SEQ ID NO: 140726 - protein, 157 aa, Heterodera glycines
MKPFMSKKSTLVLIIVVLLLIIGVALAIALLVTASAEKETSKSPLDVLDPTPFGTVRCKGCTSTTSTASSTSTTPAPTTTTTAKPNEEHRSEAIPDSTSLFKLALALAAAIFYALLSRQPSKDYWLQPTAKETLIRFGVQSTTFPIPHCVEKDKFYQ

SEQ ID NO: 140727 - protein, 96 aa, Heterodera glycines
MTKNSAPTPVPPMGQQQLQNYTDPKQKQPRKRSSPGSLSTSSSSSIIAITSTSPTAVPDSVSPPFRPLETTGPTNSKATKLHNAEEMLCKADNEQR

SEQ ID NO: 140728 - protein, 38 aa, Heterodera glycines
MPGNLLLQFGCFAFVRQLHWFAVLVGSCAVSIILAYCY

SEQ ID NO: 140729 - protein, 94 aa, Heterodera glycines
MKSTYDKVLALLEEKEGGNEERKQRAEELRKRTTELLAKIKRSREEKISLIERADSLDVELNNFHTSIEELSDQIDQVTSEIDRRVEFHATCDA

SEQ ID NO: 140730 - protein, 188 aa, Heterodera glycines
ACDKQSGQCECRERGITGRQCNQCQPGFWNFPECRTCQCNGHASICDQRTGACIDCRNLTDGTHCERCVDGYYGDPRLGINLPCKPCPCPGGPGSGFQHADSCYLTPPPSPTVTCNCRSGYAGERCDQCAVNYWGNPREIGCVCNNLGTNSSAGSCDRVSGQCPCFANVVGPQCDQCAPLHYDLASGK

SEQ ID NO: 140731 - protein, 52 aa, Heterodera glycines
MVALIGDNVPFFTRKRHVLVKESAIVRPACIPSMAHGVCSSDSSCAGYPLAL

SEQ ID NO: 140732 - protein, 263 aa, Heterodera glycines
PNSNKNRNFEVLIYVFDVESREVQKDYRNYQSCLEALMQNSPMAKVFCLVHKMDLIQEEMRDKVKAAATALRQATALRQHANPIIQCFRSSIWDETLYNAWSAIVYQLVPNVSSMEHKLKKFADIMDADEILLFEKATFLVIAQAILLFEKATFLVIAQAQRAKHEDIHRFEKVSNIIKQFKLSCSRMGSQFESIEIRNSTFAAFRMGSQFESIEIRNSTFAAFIESFTYNTYVMLVLSDGNISSFTYNTYVMLVLSDGNISS

SEQ ID NO: 140733 - protein, 18 aa, Heterodera glycines
YREAIPEGFGLPINLGAS

SEQ ID NO: 140734 - protein, 61 aa, Heterodera glycines
MAFQQMGHALNDADIKAIYKRVDKNQDGKINFKGMFLKKKSNQIISELNGNGKSQRHPFNN

SEQ ID NO: 140735 - protein, 93 aa, Heterodera glycines
MFEYPKRTLEKIDFFVFGAVPPNRCAQIYGETESFGNSFPIVCTLILRWIFAPHKCLSTPNGHLKKSIFLFSGQSPRTDATRFMGRPNPSGIA

SEQ ID NO: 140736 - protein, 58 aa, Heterodera glycines
CFWPSLLCSSTPSAGGSLSPRLTTFMATLRLDWSASVMSGILIAVFNAAYMTSDPICG

SEQ ID NO: 140737 - protein, 118 aa, Heterodera glycines; identical to SEQ ID NO: 127138

SEQ ID NO: 140738 - protein, 82 aa, Heterodera glycines
MRAALAFYDRTVRHRFADGSSGGEAQREELKLCLNVLSLVSTLESADAEREAKWERLKQFLRVCGTAAIFAVLAFLFTLYWP

SEQ ID NO: 140739 - protein, 27 aa, Heterodera glycines
MAQFVLKLQIRERVDDTEAVFMDIEEA

SEQ ID NO: 140740 - protein, 229 aa, Heterodera glycines
MGYAYRFRNIYSNLMVHNFPYYIIFSTISPVSNELLFEVFYEEEAKLDSQSANCVRERKFCGTAIQSLAELRQAVQQQRRTIELQLQGRPYMEEKQQQQRNRKPSQQQLQQQQHQQEMYGVLVIKASLSNCHGTNRALVKQHSTEFVGTLENGHHYHQPTQPTKSCSPFAYPGDNQQHHPPPLSPSIKKYSTTGSESSSTIKRSLTRQKQHYIYNVTDDEGHSPSYDRQ

SEQ ID NO: 140741 - protein, 225 aa, Heterodera glycines
ELIENKRYLTSKSYTEDYVEKRQNTNSMALKRNFNEKMPNGRGGRMKDKMPMEMNSPRPRRRNGTGSHRGETSQNLGEKFRHESRADQTNGGQNAKMERSASQNRQRQRTEMGRQKSLRKKDEMDKLWQELQDDEERSKRPPSLNEKQFDKLWEDFNDKDKEEALAVEKNAKSGKKHRKSAEKKRQNAEASRSSNEGKMGAMKVNGESAKKGKSGGAKTKQSHSS

SEQ ID NO: 140742 - protein, 369 aa, Heterodera glycines
LYKCKECTDAFARPLYLASHSRNHGYNGRYKCQHCNYGCDLKDTFDKHRACHVNVTPIRIDFDDEVFAGSPDPDEPKAAEPPTEVPQERWVDPLPEKLQFQQQENKFAELKCKYSRANAKVRWYKGRKELFSDGLKYKILIDKQSITLIINNPDPDDSGKYKCEANGVPTNSFVTVEDSPDQQPLSSTARRSESRRPKSARKEAAALTLLDAMQCSHLTPPRPKNMERTASSSGRRRVGSTAADRSAKAAAAACAAGEEATDEVEVADSEEEQQLLDMTTVEVRCADERLLAKASLNVPVRPGPPKPLYTTDKSIMLQWTRPLRDRGTPITDYELEIRERGTKLWGKATTNAELWEKDAFGNVPDTRIK

SEQ ID NO: 140743 - protein, 63 aa, Heterodera glycines
MSLMIVFYVKKAPLQRQDHSSVEMWLDKFERTQGDLLIMKSDEFRDKTLKEISDVRFLKNIIS

SEQ ID NO: 140744 - protein, 42 aa, Heterodera glycines
MTMLFLFLITLSPFLLISQWLLLAKLIFISKYAILLKTFSIF

SEQ ID NO: 140745 - protein, 33 aa, Heterodera glycines
VRLGYSNHYGSKNPTQIKVQAIGKLLPKDSVSP

SEQ ID NO: 140746 - protein, 27 aa, Heterodera glycines
MSDNGKEAKKEMAKAICQPNQMDFDFT

SEQ ID NO: 140747 - protein, 466 aa, Heterodera glycines
ELAFEKAIASDPYCRSVAETLNLEDFAIESDYIESDYSGPHLDGEISVEFMEEMIATFKDQRKLHTQYAYKILLAIRKYILLAIRKYLIELPSLVDISVPDKQKFTICGDVHGQFYDLCNIFELNGFPSESNCGDVHGQFYDLCNIFELNGFPSESNPYLFNGDFVDRGSFSVETIFTLFGSFSVETIFTLFGFKLLFPNHFFMSRGNHESDVMNKMYGFEGEVKSKYTAKMAELFTEIFNFLPLCHVINSKIFVCHGGLFKEDGVVCHGGLFKEDGVTLEKIRKTNRNRQPPEDGIMCDLIRKTNRNRQPPEDGIMCDLLVNALFPTFYAVIFRSDPQELSGYSPSKRGVGIQFGPDVTERFLKDNDLLYVVRSHEVKPEGYESHSHEVKPEGYESHHEGKCWTIFSAPNYCDTIGNKGAFITFTGDQLSPKVHSFEAVPHPTVRAMQYASSMFSFLASSMFSFL

SEQ ID NO: 140748 - protein, 386 aa, Heterodera glycines
MAEECVASQQFSKALQILHRLCIEDTSVLFYPFLREALVSFANAAFCSLSLNEWTWALLNSFQSQWRQLVAQSSSPLQFQLEMSNLNYSPIKFNARFLVINSSANNKRQTNEKFAFDEEIADGFQIATADDSLLIEVRHFSLRTSSGSLSWDIDHRSTSNRHHQNSIEEMDKNNYAVKSSLHCLRLNNRLTSPFGFNPNLTIAFPFAFKFVVPFLQNQKMKNDAFEHFDAIPLDSLIKQHFEKLKISSVDSSEFLNTHSVWVKVTNGDGQSPMRETGQSNGGDDEHQTQLGDVVVEWSSTLSFEHVRSVLALPTMPPILVIPMTLNVELANENDGEETNEAISGCCFRILKPFRIRYYLRNTSGGPLAVHLNFEQSAGTSIDGILE

SEQ ID NO: 140749 - protein, 1130 aa, Heterodera glycines
LKEEHKVMLLTALKSPKDLETKNFVKLGEGDNVKYDEIVQDCVNFMTTISEVKLISSAANRSINAVKPKWHKTEKGGRPNNKQGQSSSAPAQQCWRCAKCQKCSQNGHYATRCKCQKCSQNGHYATRCRNGDGETNCQFQKGKLEIYIGTAMKVNSASLFKTDVAADGKDIKFVLDSGAEIIVIDELSHEVIGSPRLRKCTESGCMFDGTQVKFVGKGVANFKLAGTIFSALTWVIERRTNKIVFSNFRLCMKRKNLAKTLEIFSICLRRASRVHSRQQNIFENNAESENNDFVGYLSENSEMRKSQKRSIGTADSFAKKFRRQALSPRDIGLTILFIFKFNSRLCIDYSTGLNNALQDHQHPLPLPEDIFATLKGKYFSQIDLRDAYLQIELDDESRKICSISTHRGNYEVKRLPFGVKSAPAIFQSVMDQILAEFEFATAYLDDVIIVSKSVKEHADHLKNVLEKFQEWGFRIKLEKCSFFREEIKYLGQIIDRNGRRPDPEKISAISEMPAPTDVPSLRSYLGMVNHYQQFVKNMRFVRKPLDDLLKQDSEWKWSEKCKQAFDKIKEILSSDLLLTHYDPTKEIVVAADASELGIGAVISHKFPDGTIKAIAHASSALTPAEKNYSQIEKEGLALIFAVQKFHKMIYGRKFTLQTDHKPLLAIFGSKKGVRQCSANRLLRWSLIILAYDFSIEYISTNDFGQADVLSRLIAKGKSDEDRLIASLRSDSKIDYILIGSIEAVPIKFKEIVAAAEADKTIQKVKKFLTNGWPRNVGDESAEIKLFHRIKEQLCITRNCLMYADRVVIPEKLRQKTLHSFHKGHPGIKRMKQLARNYAYWPNMDADIQQMVENCQPCQMEAKAPVKSNLQPWPKPSLPWQRVHIDYAGPFFGKEYLIIVDAFSKYPEVFEMATKSTAATIEKLRYLFSRHGIPEILVSDNGTQFTSNEFAKFMAVNGVNHLFSAPYNPMSNGQAERFVDTFKRTFRKLKGEGAPSKEIIETFLVSYRTTPNDSLPNSKTPAEMFLGRKPRTTLDLLRPPPSPIDRDVEMARRFNKRFGTKLREFPIGNKVFARHRISQNWQQGQVSKRTGVIYDVAFADGRSGRYHANQLRPRKTSDSDDQISMNEFGSF

SEQ ID NO: 140750 - protein, 74 aa, Heterodera glycines
MDGPIAFTDNYPNNEQTVIEPNDKLKFHCPECHYEMCRKYNAKWVEEHKILTCEQFAKQQNEQIQRNLKFWLCR

SEQ ID NO: 140751 - protein, 231 aa, Heterodera glycines
MAIFNLFILGKTLVIEQSWGSPKITIDGVTVAKAIDFKDKFQNMGAKLVQDVANKTNEEAGDGTTCATVLARAIAKEGFENISKGANPVEVRKGLMNAVDELVKELKAMSKTVTTPEEIAQVATIAANGDKTIGKLISDAMKKVGNKGVITVKDGKTLLDELELAMKKVGNKGVITVKDGKTLLDELELIEGMKFDRGYISPYFINSAKGAKVEFEKCLILFSEKKISQIQ

SEQ ID NO: 140752 - protein, 180 aa, Heterodera glycines
DSLYQQVADQKYKGLTFPGFGEIFKRTRFFLINSQPDLDFNQFDIVNDVEKVKFIGGFNLKPIPNAEFKYPYNLDSKKGVVLVSFGTVVNTTMVQSSTIIEAIAETIKKFPNFLFIWKLSQGHPNKTFVGLKNVITELWVDQKNIFGKSKNGGICVLLWDEQCVGGHLQWCADGLCAILW

SEQ ID NO: 140753 - protein, 344 aa, Heterodera glycines
MKESVGQMIMKEMKNEGEKCEEETNTDLGPSVMDVVESDQRSQGVNYVLEVDQDGIEVFTEKNPLGKRHRNLSEDENGKDIENEGDDEGSGRKMVICQITDKMVIAIRFGGKMKGPDIIGIPESFELGAQLRLGDIVFVTSYAPIERFSVWLSNAFRINADAEAMTVSSVLQNSLEKCIGIVMSMVKEQKDVPKAVDVAFPESQVLQRLYQHQLDSTIDLAKIKPGVLINVTFVRIHRPSDIAIGPKGIYITPADFEGVSERELVVHQPCIGTGISGLVIGYEFPFSTSTDLKLCEHGIAAAVSGALLKAKAEMEEFTIHTALFVLESGKDNIVVTFEHFVQEK

SEQ ID NO: 140754 - protein, 93 aa, Heterodera glycines
MGEAKFLIGFASLCSIGAIIATVVMMQTLNIQINEVKMRVFDGVQAFRLNTDTAWTELMEVQISVTPPSRARENPTKNDIFLRQKRQDYNAMP

SEQ ID NO: 140755 - protein, 217 aa, Heterodera glycines
MDEPRVIGRTDDEEEVMIIRDEDLQGRMDQFHEKTGESDESDEEKPTGTMAPVPAPRRSLLGPIPPITTTGGKQLKKPAKCPQALQMTSLLAVNGHQLHQKPTIRPAVPESDWNSESGLEGSSVDLVQPKSANVRIRIGRLQFLDHSASLHFSHFEEGGRVFVEWNFLDFSREQCVTRNDAEMPQLLTESFDLDHQSDYELNQNQIALLTQWTQLNI

SEQ ID NO: 140756 - protein, 80 aa, Heterodera glycines
MSPKAHESVISEASIDVSIYWKFAYAFDGFENLKVEEKVPLRTFAQLTEQNGPKENGQRKTQRIAGENAKKEEAINKIMK

SEQ ID NO: 140757 - protein, 151 aa, Heterodera glycines
MPTKIKRLNGRMSGRNSQRNTVPNGPKKDELDELHRANQLMAQKALTDDIGTLLFLGPFLTLTILNNKNMFPDVSRRLSALRTEFDRVARELSQAQRELRSQSDSLNSEREDAQRRADGSARSAEIVDRELAIAREECRALRNAHERLVEK

SEQ ID NO: 140758 - protein, 136 aa, Heterodera glycines
ALPQAKGLRALMSRVFSNASTLVPRQGVPIHELIGLVNHGNTPLTRIPTPPPTLGSASPVLSSPQHLCLRPHLHKSINSPNFFNTQTSCMFYSFRQLPIAGETEATTKVAPQQQPSPFNAEHKRKQALEPRRPRSP

SEQ ID NO: 140759 - protein, 35 aa, Heterodera glycines
MGAPTIRQPSQNVTIRQLSQIRISRDANSYSAIFM

SEQ ID NO: 140760 - protein, 75 aa, Heterodera glycines
MSREFSLLQPELFDSREEYELFMAIRGGQRTADLGRRIQRMRDGLPPPSLFEKDRDLWTVLDEEEIMYKERMTLE

SEQ ID NO: 140761 - protein, 45 aa, Heterodera glycines
MSGQMEMVFSCSHYPDMLQRDELALKTGLDEDRILIWFQNRRAKW

SEQ ID NO: 140762 - protein, 86 aa, Heterodera glycines
MYYHIYIIFYIFRRLGTFSYIIRNFGVILDRYFEKSLDLDLDSILDLDLDKNPGKSRSRKNPGSSRPGSRPGPGFFEICFKRQTNA

SEQ ID NO: 140763 - protein, 123 aa, Heterodera glycines
MAKPMELRQLQHHTTPMAEDQEELDMTSTNPMPTTTMTKTTTIEMEEVEDEEGGGEAQEEEEEVKEQGEREGDGEEGTENITPGTETETERETETDGEREREDGKGKGDTGGAAAEQSAEWAE

SEQ ID NO: 140764 - protein, 482 aa, Heterodera glycines
MYGECIRAALRCRVCAHARKPRSNEPPLNIVETKEPLELVCIDILSIGPAASSNRYILVAVDHFSKYLVACAIPNKNAETIAKNVVKNFICVLGTPKKLHSDKGTEFVNETLEEISKTLKIERTTTSGYDPQANGVTERVNQTILGMLRKSTYSAWEWDERLPFVVFAYNSTPSEVTGISPHHLMFGKPANFPLEHELKFAVNPLYTIDQNTYIQLFRESLMQLVDEARKNSQISRAKMKEHFDAQAKVTENKFQIGDRVMVIFPGSHIRSPHKKILWNHFGPFRITELNKSTATVIPSDNPYGNPMTVPLERLVRVPKELPNICTMPKGKNPYKNVLNGLISVAGLICQENLKFDGEEKLNSKPDGIIGQLRSIAFLGGEEEQMETEQMDDKEAKTNESENEENVEEKTDDNEVDANRSEKEANLEEEDQISVRKKRSRKRFLGHWHVQETGTNAVPMWSWPTWMPSLTDQALGSRRSRIR

SEQ ID NO: 140765 - protein, 265 aa, Heterodera glycines
MSEIASGVLRQQLDLIATRTGENKWLTREQTSGVQQQIRQALSALPLPVNRLEEFDNCREAWRKCQAWLKDIESARLQHNQAYTEAMLTEYADFFRQVESSPLNPAQARAVVNGEHSLLVLAGAGSGKTSVLVARAGWLLARGEASPEQILLLAFGRKAAEEMDERIRERLHTEDITARTFHALALHIIQQGSKKVPIVSKLENDTAARHELFIAEWRKQCSEKKAQAKGWRQWLTEEIAVVSARRYFWDDEKLQRRLASRLDAC

SEQ ID NO: 140766 - protein, 56 aa, Heterodera glycines
MWTCRPERQAEVVPAHQSERPRRRIQGLLVPVFAARPMQQDGGARQIQVFYSERQT

SEQ ID NO: 140767 - protein, 88 aa, Heterodera glycines
MPRPMSSGITEEEDDEEEEDVLLVPEAEEAAAMPRPLSGDMDRYCWWEEPTALFPPAPFPPPLLLLVLLPPPLLLLCWAMLPVGQLAM

SEQ ID NO: 140768 - protein, 40 aa, Heterodera glycines
MLNGISSSTRVSHEIVLDDDGVDCPSVVRDELPAKKQKRI

SEQ ID NO: 140769 - protein, 122 aa, Heterodera glycines
MASTHEKRTDSRLVFVPFVTFADPLFWNEINRLKVDHWKLDESLKPIYATTTFQGAQPSDGLLSFDQFSIAAESGQTLPLQSVQPFVSPFHGTFLLLNTKKAFSDGFDRKKFLEQSADSVIY

SEQ ID NO: 140770 - protein, 324 aa, Heterodera glycines
MPVSPVLNQQKGAPNANEIAGRGNAKGENSVRVNRSVQSNGDEGMEMVGMAEIRYEQKQQVAGGGLCCCCIPCCFFNESSHEEPPKIFKFFMTKKKTPQQPPAEVVQPQNSVPSPKTSTNQQPPAEVVQPQNSVPSPKTSTKQQPPAEVVQPQNSVPSPKTSTKQQPPAEVVQPQNSVPSPKTSTKQQPPAEVVQPQNSVPSPKTSTNQQPPAEVVQPQNSVPSPKTSTKQQPPAEVVQPQNSVPSPKTSTKQQPPAEVVQPQNSVPSPKTSTNQQPPAEVVQPQNSVPSPKTSTKQLPPVSVHQLRSVHRQRPFLSKLHTPRD

SEQ ID NO: 140771 - protein, 80 aa, Heterodera glycines
MDLILATDWINNAYPEMDLQDANKENKEPTKKQEEEAEDPSWISLIDEEMKREPLAPIGPDALLHKAWHPLAPPQLAVRR

SEQ ID NO: 140772 - protein, 322 aa, Heterodera glycines
MPNSTRPCSSAMWSLTFLRGKLAQRVGRTEIRYTRTPAEFHELLEDPSLDKLDFVHVSEHMDRCVVRKRPEFAKAPLTNCLPVASFVTSYARLHLYDYIEQVLAIDGAELLYCGMLFFHKTFGVHAYALDTDSIYYVNKMGGPCVAEGEALGQMKREHTDRRIVEFVAGGPKNYGIRHTARDGTDERANLKIRSFRLSYAAQQLLNFEAMKELTLATYNIDGPIDDVLDNDDLYVFGGGEHRAIRVNFPHIDRNAYADLYTHEAHKDYRPFYAKGRVRPGMQTRPFGYVEDDGPPNDGQRTERRKRNFVDHDPAQPGHSGWF

SEQ ID NO: 140773 - protein, 86 aa, Heterodera glycines
MASAFLFGWWWRGNVARLDDVHPTSVVVSIDLHPLGTVLDLAAQIIIINLMVLGHFLNYGTNGRFLNRPRAKKSPCIRLLSSPTHQ

SEQ ID NO: 140774 - protein, 188 aa, Heterodera glycines
MGAARLNMMDLNASVEFGNEIELSPVKLIEPAQTQAYKIAGKRKRPVKRTRFSFRAPKVLIVLLVIFLPNAFANPDVNNQISIQFTPPSIVYLLIIPFLIFVTITVLLWSKRNSDLPMLPNLNAISPHHAVVQTLINSTPVRCLMDTGASLTVAPRSVADELNCRTFSSDLEAMSASGHVIRLKEYAQ

SEQ ID NO: 140775 - protein, 80 aa, Heterodera glycines
MIELMKQLKKHLQIDEEIGENKEKEKVEEMGEKKGKKEKEKGKKREKEDKQEKGEGKKRKMEGKEDKKEEGKEKEGKKGK

SEQ ID NO: 140776 - protein, 47 aa, Heterodera glycines
MPLLGKKIEKNDADPRRHLVGGAAAKANVNSDNGNHCGQSDKNLKKT

SEQ ID NO: 140777 - protein, 327 aa, Heterodera glycines
NFKWRPKRYPEITTDDVNKFLEKQRTYTIHKPIRKKFPRLKTVPSGFHTDWQCDLCIFDQLKKHNDGYKYLLVCIDVLSRMIFSAPAKSKKSEDMIEVFDRVFEKSKIIPMKIYSDSGLEFQAGKIKNILRKNFIKNVMYSPDLHAGVVERANRTIKERLYRYFTKMDTLRWVDVIDKIIININNSVNRTLGAKPVSVTFENARALWEKLYKAKKFKISKKKKFKIGDIVRIIKEKGKFAKGYLPNFTEELFKIVIVNSTTPDSYRIEDLEGNLIKGIFYNQELVKRWMIFTLYYRRTHRGRRTLRQNSQYASPRLWNWAQIGQLSH

SEQ ID NO: 140778 - protein, 20 aa, Heterodera glycines
MINNHVNGANDVDMERTENE

SEQ ID NO: 140779 - protein, 402 aa, Heterodera glycines
MEFVGTFSDGQSPELVHSLDKLMERICAAQQMNWFRHFISRGPVDQTSIKISALDGAERYELFVVDDQQLKTMCRKMIGFSQLKMAAQFSERIANFIDSSSYESPTNGFPWLCLPLQINLLSLGSADVTDQIGHGFSKISGKWSVEQVEVEGGATRRRLVFLDSANLIQSEVEVVRKSKNGNRWHIVWSDLSCQHHKMMLSAFALLPSLSSAGLADALEAPLRIALLGLGGGILAKFMHDKFKQSQIVAVEIDPEVLAIARKLFDFPTESDRLEVVICDAMDFLRENSAQGGVLSLNLVTRDEEASQSVKRVLSTIFPCVYSIKGDEDINEVLLCCGTANEEIVPDISALGLKGEKPVKRKKVQKRSSNQMPKTKSDSAKRSEEPWMKECAEYLANKKQFVT

SEQ ID NO: 140780 - protein, 131 aa, Heterodera glycines
MGFSRNKIQEWKKELVGTKNFSNQQRHEIIEKFEKVKDEFAKKFNLKPSYEIERKIVGKIGVGLSTVYQWMRKFGLIGIRHKTYTDAERSELFEKIDKRKKRNPWESERKIAKELGVSRVSIMRWRKKSQN

SEQ ID NO: 140781 - protein, 280 aa, Heterodera glycines
MLSDLLLTHFDPSLPIIIAADASKDRIRATISHIFPDKTEKVIEHASSVLSEEQRNYSQVEKEALALVFAVQKFHRMIFGRKFTLLTDHKPLISIFGSKKGIPIYAASRLQRWALILSNYEFDIRYINTTAFGQVDMLSRLIANYPRPEEDILIAKICTETECFIGTILQARIDQLPVTATEIAEMTQKDEILQKVAKFSKEGWSQKCNDPDLAPFFPKRNEILQIENCLLYQNRVIIPTVLRDRTLKALHMAHPGIVRMKALARQHVYWPGMDSAIEKL

SEQ ID NO: 140782 - protein, 106 aa, Heterodera glycines
MVGSLKVETLVGSKLEIELTILMNYSSMNIFKNRDLGDRSWKFEKNICKSRDLGDKVENMNIFHNEQTEVKERGRENLCDDLSLIITHILSVKPSKNQPSQSIIIC

SEQ ID NO: 140783 - protein, 56 aa, Heterodera glycines
MKIQPNHMADFKSDCIERGHFWAETPVVNGCIKKKFFIFSQEKYVRKSPKYVPIYV

SEQ ID NO: 140784 - protein, 88 aa, Heterodera glycines; identical to SEQ ID NO: 124691

SEQ ID NO: 140785 - protein, 60 aa, Heterodera glycines
MTEDQIEQRESFLCNLEDANLRTKAQSELLLSDMQAFKAANPGCELVDFLRWHSPRGSDG

SEQ ID NO: 140786 - protein, 232 aa, Heterodera glycines
YFLNFLAKSNFPTTRRGVLSTIASLFDPLGLCSPCLVKAKMFFQSLWDSAKGWDESIGPKLEKDWVAIISEWDCPPVTFARYTPCGQASLQLHVFSDAGPNSFASAVYLRSELNGSVRVSLLFAKSRLRPKKFKNDGFTIPRLELLGLITAIRAKNFVVSNLDFSFENIYFWADSQIILSWLASTASQPIFIANRLAEIRKERGAFKFVRSTDNPADLGTRGLSQKGNGQTI

SEQ ID NO: 140787 - protein, 257 aa, Heterodera glycines
MAWVADGIEEEDEPTKSYEHAEQEKLANAKEYVHRMEFGDRTFTHDVSEISRGRNAKLVLHRMRRTKGGPFRSVRHSQTKPSPQRTMCQHSSSSKRSINADPDTFWHQMPIKFHLHDSLDLTAIQQIASAIAFWENNTCVTFEHLDREPSAAEEKEEDFVDFFKGHGCYSMIGRSGGRQGVSIGSGCERVPLAVPTFIFRESIPNFSLALWSMKLATCGEFVLPSYLSDFQLRDDDEIMTLGLPYDYGSVMWVNAII

SEQ ID NO: 140788 - protein, 28 aa, Heterodera glycines
MSLLPSDHSIVTVSDQSPISVSDHSLVS

SEQ ID NO: 140789 - protein, 88 aa, Heterodera glycines
RSVLRANFRVVLGSAALALLGSVLLVFGSCVMLFPNDMDVHGWIFLVVGVLFAIPGFYHVWYIGCTLCGRPGYSFENLPTFTKPNFPY

SEQ ID NO: 140790 - protein, 127 aa, Heterodera glycines
HSSIFTKYKFSYLLSHLLICVIYGAFTLNYVLAFAFENAGNPTTGVVAETLLGPVGYKFFAGTFIISLGSTCCYVSIFVIIRCKNAVTQQTNTRVLRSLIIILSINIGGYLTNLAIYQLLYAFGSIL

SEQ ID NO: 140791 - protein, 39 aa, Heterodera glycines
LHFLFLHPIFLNFNPPPFENLFFVHQFAIVCFFFLCQCF

SEQ ID NO: 140792 - protein, 146 aa, Heterodera glycines
MKMPNVSQLFCVLIVFSTFIEKSIGAPKKGTASPLEKAEQKDDEPKLGKEDKKLVNNKKELLKKELNTILEEKIPTFILEVNEIAQMIDNEQKPLERKFIQQLIDKMRPLYVDAKKDHLHLWSKVRILKHDKQIKDDVPTMEVLFK

SEQ ID NO: 140793 - protein, 24 aa, Heterodera glycines
MIKQKFITVNCLLISGQLSEMKNP

SEQ ID NO: 140794 - protein, 133 aa, Heterodera glycines
MEQPNQEIKTKRNKEKLEHEGSLYVLHKLSDDGLRKYWRCEFFGANDKCKGRLHTDINGNVLKIIGSHTCDMSAAHVECQRRITQLKRRAVETCGAPATIRAQVLRNTTTPVLAAFPTKAATKKVNVCKFLCQ

SEQ ID NO: 140795 - protein, 239 aa, Heterodera glycines
MGAKLLAPLSTGMKSFGKQTFEFIDQSKSSICSQPSSSAAAPRENRGRAILLSEEEEEPQGEETEWLGKKSAASAGPSNTERKREKKVTDRKAGVILKLKTNKLKKPEAHGMLKSLKLKAKKLREKQKKRRRKDRMRSDEEEGEAMDSDGSNDGDVDMRADSYDSEDSDKSKLTVAPGRKAGAGAFVRLLDNYLEWLENRGILDKVLDDCRKHSKVIEKALNESEGSAPVERPAGLNPK

SEQ ID NO: 140796 - protein, 102 aa, Heterodera glycines
MLSKESLQGSIGFSEQSVDEDRSNILNTTIAGGFKLVGMNVQRFYAYGEFFTVNERLHFSRASPTPFCVMKYAYSEKSAEFTPPQCPFPSFASQRKKQTNES

SEQ ID NO: 140797 - protein, 41 aa, Heterodera glycines
GEVPGSERLHVRRCNNDRRMDGRNLKSERPVRRCKAKEDVP

SEQ ID NO: 140798 - protein, 88 aa, Heterodera glycines
KPAVSAVPFGPFPPPHKSAQSIHQFFRSFVHFHSLLLSFSIISQCCACSTFRLHSIKSNERIMNFSFLYSPADQMGPEIVTRAQHNNN

SEQ ID NO: 140799 - protein, 81 aa, Heterodera glycines
NVHLTFQWINSKMDRHFVIPLNSTLDDSCGFELLRSGTTSIRATFDSPIPKGGVEMIVLGEFDQMIMIDYNRHIVSDSKLG

SEQ ID NO: 140800 - protein, 91 aa, Heterodera glycines
MGIMTIATLCLALFGLGVAIAAFFTNVHILQVIFAAIGTILIMIWFAIHIQLVMGGRTYEISSEEYVYASIILFLDVIQILWFLLSLFGEK

SEQ ID NO: 140801 - protein, 274 aa, Heterodera glycines
PNVAPYLGLNNQSKPQETEEPRKIIIPRKRLKEQTPDPESDNDTLEELSPEPQTTSTLKTPVPIKTIIHPTLLNGLFRDVLLYLAGKKDETPRGAKFLKDRLLKDPTVKDMVDKSKVMWGQKQKTYTIHKPIRKRFPRLKTIPSGFHTDWQCDLCIFDQLKKHNDGYKYLLVCIDVLSRMIFSAPAKSKKSEDMIEAFDRVFEKSKIIPMKMYSDSGLEFQAGKMKKYFEEKFIIKNVMYSPDLHAGVVERANRTIKERLYRYFTKKDTLRGVD

SEQ ID NO: 140802 - protein, 167 aa, Heterodera glycines
MTNFVKVFAKISTKECADAIIQFAKLVLGNEKMEPICILSEQFDRNLIVGELNCEMYERQKCTDSSLYCIICKHSAVKSLTNANSSALPKLKFFFMDVSIEMKFIFVPNYKLSIPKEQNNLRNYEKFANYFAENIEKLAFNDNFDDKINKYEIDLLEDFLEKPTFRS

SEQ ID NO: 140803 - protein, 111 aa, Heterodera glycines
MHILIMFWTLELYVGHFVGHRIAVPLDLDAIMYQICAMAVAVAYNLLALNRIIAIMAPIFYCHLFTIRLFGRTTATVSVNGHQHDTPHQQNQQENDQLRVVPPSFSPSLDN

SEQ ID NO: 140804 - protein, 41 aa, Heterodera glycines
MQSAFLRVLPWPAEQANAATIQANITLSSTSNGDEQLFGVF

SEQ ID NO: 140805 - protein, 24 aa, Heterodera glycines
RTLSTAVRQRSSKIYSMPQILWAG

SEQ ID NO: 140806 - protein, 24 aa, Heterodera glycines
RTLSTAVRQRSSKIYSMPQILWAG

SEQ ID NO: 140807 - protein, 101 aa, Heterodera glycines
MSFFTLLSLVLFAWIFVLFSDFYLRYLNSQRYLNFLERHRISVTPFQVRFYLSNFESHPRPTLALLKAVDRCILGLRRSRFLVRIGNSIIFLPFLYGCGIF

SEQ ID NO: 140808 - protein, 15 aa, Heterodera glycines
MTTCIVAGLCSVGRA

SEQ ID NO: 140809 - protein, 46 aa, Heterodera glycines
MSSANEENQHYGKNVSMLQQNGSVKFKRRAEKPKMASTFPEMVIIV

SEQ ID NO: 140810 - protein, 109 aa, Heterodera glycines
ILINEPLGTDRPEIVHCCDELLARHPPCNSSHLFQFLIDKIADKMRENAVANEQQLTEMAQKSGEYLDVLEGIDPIRHNFWKYRRAQLQTLADSVKGDSTNSANEEQDA

SEQ ID NO: 140811 - protein, 33 aa, Heterodera glycines
CLSLFLINFIHIQMLSSMIGRAVRNRPFIFEGI

SEQ ID NO: 140812 - protein, 92 aa, Heterodera glycines
MIGRAVRNRPFIFEGIFKFILYPRKMSISFFEKFYTSQKRLRLRRRAVHNRHFISQRIFIFRGYPRKMAISFFDKFYTHTNALEHDREGGAQ

SEQ ID NO: 140813 - protein, 136 aa, Heterodera glycines
IQKSNYKINCFPDTVKLRDCFCYNKNDKLITPEMVAEVLCEDLDLPLNTFLPAIAQNIQQQIEAHSEPMPDDVQATDQRALLKLNIHVGNQSLVDQFEWDMSNPNNSPEQFAQKLCAELGLGGEFVGAIAYSIRGG

SEQ ID NO: 140814 - protein, 45 aa, Heterodera glycines
  unsure (1)..(45): unsure at all Xaa locations
PCDRKFTIKIKDGYVSSGKXRXKLYDIGRIELEGGFSGESRDCLN

SEQ ID NO: 140815 - protein, 111 aa, Heterodera glycines
MKLIGWGEETTGNGELIKFWLGVNSWGNSWELNGLFKLRRGTDECRIESYDIEIYERAGKPLREKLWGGPALNRRLWLSGPVFYQLNYRPCPLQLPTLLDHIGSMLPQLIH

SEQ ID NO: 140816 - protein, 760 aa, Heterodera glycines
MLFPLIFLISFPTITDAKQLFDDDNVLLAFVRGQSNFEQFLVEEELNDLEIKYPPPQTMKEYLMLQYESQLGIVCLMRRHWHCAKIGSEFADNEQRKCQKFRNYLDILYEYLFTEFMGLPAVKPQFYFAEIFTFCTLSNVMLSLSWLFKFFFDSKFSKMKGHKLDRYFLEYYEPKLANEDKLDYKVELDNPNETFEDIIVQTALETGNESLRKLMRHIFGKNLEKIFRKMEQTTMESLIGQQITVGTQFSEWNLWPNDGENLNKILFYLYEIGIRRERMKIEKSLFIQFLTPPKFYQYCQETQRGEQTTKELEKRFEYFLVDLYLMRQNWQCAKMVEEIMGDEEMVKECEKIQKYLHILYEYLFMVYAKNEEPLLAQQIPIIEPKFQRQNDQVSQTFIMNELFDYSRIFFDSEYRKSDEYKAYMSANKLPWLTLLNESKLGNYTANFGNSTETLRNKFDQKLKSILKKWRDHEKGNKLEGYNPFLKKPFYDIISRTEDKAFNAFVKGLSNFEHFCLQYADELANICNGMAAEANAEQRKIHLQEKYAAYLGILSLMMDNWHCAKIGNEFAENERRECQKYRNYLDIFYEYLLHVFREDEDPVIAINSQIIIRRIELFGTLIEVIKVLNMVTKFYFDTKFSKSKEYKFENVFENSSISIGKLEQIFKGAFNEAGEAAIKGKSQSDKKEQFDKTLKEMLKVAQQIATRERGKLKVMEDKMEEHSAEENSEAEKELISAKSAAFDDKFGTLFDSPFCGTTIHN

SEQ ID NO: 140817 - protein, 100 aa, Heterodera glycines
MDESKRENFSPQNDDDVITIGDNNNTQTLLDLQPGPSKRGRKPRLDKIHEEIASAMKKAKAMEAEVDESPKKQPTNVFEYPTIFWKLARPKVLANINLKK

SEQ ID NO: 140818 - protein, 355 aa, Heterodera glycines
MDKKINKIYTDPANPGGYAGASALYAAVKKKHPKLKRTEFEDFLQRNTTYTLFKPKREKFRRLRTVPAGFMTDVQADLADFQALSRKNSGYRYLLLAVDVLSRRMFGAPVKSKRPVDMKKAFEELFEQMPRVPDTLYTDRGLEFVAKPLKEFYTEKGIQKFETSSKKKAAVAERAIRTLKTRLYKYFSANNTSVWVDVLPKFLSAINNSVCRATGLRPNEISDTNAREVWKRVYGEGLAQLDKTPKIRAGETVRIPKPKHIFEKGYIPNYSDHVYTVDEARSTNPQHYLLKDYYGTKLKRKFYLPELTKVQVDENTMYRIEKKYKERVRDGKREMLVKFIGFPEKYWVTNEEINE

SEQ ID NO: 140819 - protein, 200 aa, Heterodera glycines
MDHLCCANPSAGIVEKGDTDSIFYDYLTRLGDPLPGGEQLGELADEYPNHTIMEFICAGPKAYGLWLHNNATGEDEYKLKVRGITLDSDACERITFEKMKDMVQNKLGQPDNNVRLNYPTKNFRITKKGEIFTVPLVKQFNPTVNKGVVRDHGLKVVPFGYSDEEWCKWNCPGACTCLFNPDLNVNMFTEEELNDPDIMP

SEQ ID NO: 140820 - protein, 188 aa, Heterodera glycines
MVNGIQRGNFDQELTTKFDNESSFGILFCTANFAFEMNDNFGKFLSNFCHEFKTGKNLEEAIETVKNSLIILTRSITIEQIIIKENIFQKIAKNEFFGAKNAENIAKFFEHANSSFRLSLSAQLHHFNNLMSASENVPSTKKRIRRMIRRGFSRAMDQFQNSLDNSRYRLRNDRKKCAFFLALSVVVL

SEQ ID NO: 140821 - protein, 72 aa, Heterodera glycines
MTKDGHKFFKIEGVISPNFFKFAKCKKILQKMIFREFFRSLGVKKANLADRAVLIDVFGKMPKYGQNTKIWT

SEQ ID NO: 140822 - protein, 206 aa, Heterodera glycines
DDFTLTSAGLVALLGEVPLSNFPPPLLLQQLSIETTISVFDKSLYSHVHPQGQLHCWLRSYISNQLTSTAHDWVKIFARFNSGTYNNQWTFNSGTYNNQWTVVDYKMFKPVVDYKMFKPGQQLPQSNLIWVLEQIPGTTVSRDVGTTVSRDVTWFLRKYSYWPSYNIPFLRRISELSGFDRKGEENDWWKWSAEPQIDAKMPKGIL

SEQ ID NO: 140823 - protein, 133 aa, Heterodera glycines
MGLFAFACQRDNSGYQGVTTYDNTNYNSQYGGYGIGNYGNGNNQLQQQQQQQQYPQQQQQGIYTTGYPAFGQQSANNGFGQAGYNGLMGQQQMAQNGQYGASGTGATMNTATGTRYVDMCMDWWNVRRADGEA

SEQ ID NO: 140824 - protein, 38 aa, Heterodera glycines
PPFADAPLSLSHSFGSSSSLLPCFCIFPVPFLFSSFCS

SEQ ID NO: 140825 - protein, 104 aa, Heterodera glycines
MNTDFPTASTIFALLATLIVMLIMPDKCRAFDCVHGDYRPIQLDDQMKREKLSDGALSIRGYKPCDLSNCFNTKCISSPGHQINYQYCSCLFHLVSKKVSFFFC

SEQ ID NO: 140826 - protein, 102 aa, Heterodera glycines
MEKASEDSNSQNNEIADQSRENRISARSRDKQKREPKENAEGDDNVRGQRNNEDQRTKQRQHRGGPRQNYGQWSTRQMSEGGQMGGTYKRIAKVSQHRVFMG

SEQ ID NO: 140827 - protein, 182 aa, Heterodera glycines
MSFKRVNSFQPAVPMAKKWDFRSIGNNFAEEMENYKLMDYQSTTCEKFGFTKNITEFRVNPDVERPDEAMKDSIDNMIKVALKTTEEKMKRKVRMFGVAITGAGLASPVWVPYRAYPQNNADVIMQEINKLGQSGDGDENKKMLLLSEPVTMKITCVTMPSGEGPRNVHKFDFGFKEHQRIG

SEQ ID NO: 140828 - protein, 43 aa, Heterodera glycines; identical to SEQ ID NO: 136181

SEQ ID NO: 140829 - protein, 169 aa, Heterodera glycines
LICVFVLFAINLLNYMDRFTIAGVLVLNDVQKFYHIDDKSAGFLQTVFIIFFMTIAPICGFLGDRFNRKRILLVGLSVWVGAVFASSFISENHFWAFLLLRGVVGIGEHFWAFLLLRGVVGIGEASYAVIAPTIIADLFVGQMRSRILMFFYFGIPVGKVKAITIQSLI

SEQ ID NO: 140830 - protein, 188 aa, Heterodera glycines
MEQCTVEHIRYQLRTGRAREQDKVNYGGSGGGGTHRNDQSAAVWMRDRRCNRTIGLLPFARSHLFLLLIDGICHESAAEKKESAKTQQQRNGAEDKHGTSTAAPSLLFPKFMSQKQVPNCELTRSSMDLERTLRPDLDYTLSHPKAGFHWCCSKVLNRKKEIIRINFGFLENIVGNSIRSGKGIRHNN

SEQ ID NO: 140831 - protein, 211 aa, Heterodera glycines
MPHKSWWKSFGEVFFGRPSQIGRAGEENAMASAADDIDDKQLYRAPSMTEMMRELSLLQEQIENGIWEFNAYANEREYSAYNSALCPWSSLDKLLRSKFDELLPGKRSTTTANGQQQQQQQQQQQQQQQQQQQQQQQQQQQQQQQQQQPGPRGNPGHVGPAGPQGPTGEPATEGRPGLPGPVGPMGESGTPGNRGQPGIPGPPGLNGKDGE

SEQ ID NO: 140832 - protein, 136 aa, Heterodera glycines
MRKIREIENEKEERMNEARDPKHWKMSHNDFKRVIGESLSLIVQTLQNDLIVPAWAHFGSIIKEIYTECIPITDGNVANYIPQLARMSPNYWGVSICTVDGQRISFGDSKVPFCVQSVSKALNYSIGTIKLFTLIR

SEQ ID NO: 140833 - protein, 38 aa, Heterodera glycines
MVHAVDEDGQKSATGPGPGSGQLSTTEYQGPGFDRDRD

SEQ ID NO: 140834 - protein, 21 aa, Heterodera glycines
MAISFFSWGFDRKLGTNICLL

SEQ ID NO: 140835 - protein, 19 aa, Heterodera glycines
TFAFSSLALPNTHTIFEML

SEQ ID NO: 140836 - protein, 135 aa, Heterodera glycines
MSPLRFFVALFLITLAILAGTHGTVENSVDGGPNMASPIIRERRKQKLLNQKEISSLMSVSIILIITDRCLKGNDSLKIMRHSVSRIPILISRWMITSRSNVMSLERCYDVSQKPSNAELLVRIKIHSNYPIQID

SEQ ID NO: 140837 - protein, 138 aa, Heterodera glycines
MAAEAIGAEENGGRDNGKWRTEEAINDEKQEKIICGRRKNAELLGRIKQKLLNQKEISSLMSVSIILIITDRCLKGNDSLKIMRHSVSRIPILISRWMITSRSNVMSLERCYDVSQKPSNAELLVRIKIHSNYPIQID

SEQ ID NO: 140838 - protein, 232 aa, Heterodera glycines
KSFGGRGFASDCAMTEGLAYLGSFLFLSRHEPWLWHEEFALFSGKCPIYRTYETADRKWMAVGAVEPKFQTYETADRKWMAVGAVEPKFQQKLFEILGISTEKIDGMAKLTREMLGISTEKIDGMAKLTREMENAFRGKTQGEWAIIFEGEDACVTEDACVTPVLNMDEVGKYEQHKRRNAFLRGGSGGSVWVPRAVPKRMETEKSQTKAKSERTERIISPSNFLQNGKKKV

SEQ ID NO: 140839 - protein, 35 aa, Heterodera glycines
RSDVCSVAPHDALSAHRAKSQTRAVASSEAVANLT

SEQ ID NO: 140840 - protein, 43 aa, Heterodera glycines; identical to SEQ ID NO: 131356

SEQ ID NO: 140841 - protein, 722 aa, Heterodera glycines
MEFFLGDFESDEDEVDEISQVLLREQISQMQTEDFFLPAHIKFTTDAFEEENNDFLSAADFPDDYHYFDNFSDEQEEIKLMESPMLVEIPDEMDTPSHSFDYSIKLSGNEIEILDRIPVISKPGQTKSVPASHRPVAEVFNENLLPGAHQQKQRQQIEKTQRPSLAIDSADIKRRRRPTMNADDFVYTPLKKVRLTVRKMEENVVVKREEETLVAKKKKKPKERSEKPKEVKEKQRERSEKPKEMREKPKEMKEKEFQGVEMTKKTAETVVAKKETKPKELNEMQLQRLNLIKKIKEKKAVAKEKRERERNEKQMQRLEFIRRMTELRHLNPLASPSRGPFLYEGDYFYREILVGRSDSNANNGEAEVDCVSVSAPGGFDELFVTNPAENSAISISKMICGRKKALNNKEEDGGTYSEESFKNLGVEAREFLGSFLKFIDDQRLVDLATQGVTGGASMFHSLTMKNANCLRESLRLYCKSGQALLVQVHFWLLKHLSQTRLTSYLNLLRFLKNAGSNLSDYIASSPTAEAELEKANKTISEFIAQKLYEPPLSSSSKFIECDPIKNVSLVLVYPQINAKMSQHTIRAHETLFRNLLPLAVCCVEKVELNLNVDRPISVEECAWMCIRMIRQRVKEIAKRRQNDHIFLAGWGTTCWLNHKAVSKVSNVSGILDFAFPTESPCGSRGSVDDQICLTYPSTLFVVGEDAHNVRMQALRQLRKNMI

SEQ ID NO: 140842 - protein, 70 aa, Heterodera glycines
MTLLFCLALCPPISELSGALNKSVMKKVFVLLCPSLVGPAFPDSFESNLKNDIYSSILIDKNNDCALFSC

SEQ ID NO: 140843 - protein, 54 aa, Heterodera glycines
MYFLQLDSFPIIKIVLVSFLEKHFSTQVQDRPSTHSHPLRIKTFCLRDKKRSLQ

SEQ ID NO: 140844 - protein, 21 aa, Heterodera glycines
LYICYIGFEFRFKKQNLPAEG

SEQ ID NO: 140845 - protein, 179 aa, Heterodera glycines
MNAEYVETLIICPFVWLFIANSAVCLLLLFVNGWPKIEKFGTTNNWGNIFCQLDSAMAILIGFGWAFAPLWLLRNQFNYGCREGFKLAAETRALMIVCINLAQFWSQFIYHAHWSNKHMAGISVFITWASISIIYRIYLLFADENENVPNMEMPAARVAQNGTTVLTNGNATHYYKKRT

SEQ ID NO: 140846 - protein, 76 aa, Heterodera glycines
MSRADEIKENAERFAVFVLWLCPCGFVSKMGGPGRLANFLVIRQLLETIQFVYVQPEESKRIHSFMPRASVFNFKP

SEQ ID NO: 140847 - protein, 83 aa, Heterodera glycines
MRRGTKVIRRGTKVIRRGTMVIRRGTKVIKSGTTVIRRGTMVIRRGTTMIRRGTTMIRRGTTVIRRGTTVIRRGTNLIKEVQK

SEQ ID NO: 140848 - protein, 99 aa, Heterodera glycines
MPDVICSCSFGQMNVEFGNKNLRPEPKKVIPTSTSTTATTNTVASKPKTMTSSIHPSITAEVVKIGSTLQCFAWQICNLLVFFIQFSWQNVWAKFEFAF

SEQ ID NO: 140849 - protein, 120 aa, Heterodera glycines
KHHLILMKMNLFLRFNGRSDEFRQKQLTICVVYIVHVFGVAAFFVQMVPFFVHFVTFFAEFKASRNFRLPFRIPLESKFKFCPNILPRKLNKKNQQIANLPGKTLQCASNFDNFSSNTGM

SEQ ID NO: 140850 - protein, 126 aa, Heterodera glycines
MKANTVFVFFFFLFGLLQFCFGDQPGNVFLYWGCAQSVWSDECILRANVMQTVVGSANVSCECFRGLKCVGGSLDEKRNGKTSVQYCFDGYEFCYKAVCVKVKFCVYVIKRLMIFCIRNQFFRGPK

SEQ ID NO: 140851 - protein, 96 aa, Heterodera glycines
MLDPTLNYVLLVQGYYASKNSWGFPKGKINEDEVPLNCALREAFEEVGFDATEHIKNPEKCRPLQHFFGETLVRLFLATDVPMDFPFKPHLRKEIR

SEQ ID NO: 140852 - protein, 55 aa, Heterodera glycines
MCQLVKIDGTENGVTILHKWFHRCHIVAPVPIRTNACVHGWANLWAKFNNSINVS

SEQ ID NO: 140853 - protein, 104 aa, Heterodera glycines
MDYENVAPTVFSPLEYGCVGLSEETALERFGEDNIEVFPGYFKPPEFFIPQKSIANCYLKVVAHREGNQKVVGLPFLGPNAGEIIQGFAPAIKLNLPVKDLMET

SEQ ID NO: 140854 - protein, 104 aa, Heterodera glycines
MPRHGQQMNGQQNEAHLVATEQLADLAKKTLILFRDANESFSDQNAVSDWLRRSFDLPANSICELSSPSLVTNSQVFFIVFDEIGTAERILEMSKSEERAQKIF

SEQ ID NO: 140855 - protein, 29 aa, Heterodera glycines
MSVGPSTFYPIRSQCAAATIEFIGMPRTV

SEQ ID NO: 140856 - protein, 81 aa, Heterodera glycines
FFAYQIFAINAHLFKKYSILLKCSVFCYILRIAVHLKESVIEQISQISRKVQAVAVKIVYIKTMALRISALGPFSKLMCFY

SEQ ID NO: 140857 - protein, 49 aa, Heterodera glycines
VQAWIQVPMTLDFSWTWIFLDFCPGNQGPGPTWNPGPGPGPGFFQNVDL

SEQ ID NO: 140858 - protein, 50 aa, Heterodera glycines
MIASELADQIPSKISDEMEDIIPKGHLSDFQIAPKDMQLIRANELANAMM

SEQ ID NO: 140859 - protein, 146 aa, Heterodera glycines
MVSAKVVNIHCNKSVMLSEINSIGFDMDYTLAGYLSPNTEELIFKLCIDYLLKHKGFWIEAIFLCNFFLGIRKKLILWCTIASLLFAAFGTTKKERMVLKEKNCSIVSQKHCQIEPRSESDEHFLRLARNRSVVPTCSSLRQRLWS

SEQ ID NO: 140860 - protein, 271 aa, Heterodera glycines
DVQAAMKHVHCGDGAMKAQILLNPNQYVEKETRIGTLLERIRRSGKKCFLLTNSAYAYTKGIMRFLLGNDWSSFFDLVIVDAEKPLWFTGDADFRTVVNTQTGETETVPDNIYSGENKRVAYIFGGSGAQPRRGCVDSKQKTALGKETIGERLGEFVQDVSKAMDQAYGNYGSLFRTGTRKTFFSYQLENYADLYGSSCFHLLDYHPSYHFRAKFKLMPHESPVDQSEADNQQGQVEDQHGQAADGPPFEVPNVSPNQSSSEDEEEQNTDN

SEQ ID NO: 140861 - protein, 96 aa, Heterodera glycines
MPSAAVADALHGICPADPRRHGPLATVRKCQCPEVQRQLHLCTKRMAFCQKHTEIQKLATVESVMAELPFGVLDRLFFVGVPIVDAEVRERFRRLW

SEQ ID NO: 140862 - protein, 64 aa, Heterodera glycines
MRPRSKSLSNINFEITQTPICRFYLRFMDALYEAKHDRIFLKRKKNNHWVKIRRVYPVFILALI

SEQ ID NO: 140863 - protein, 55 aa, Heterodera glycines
MARFVNHSCQPNCCALLTTTTTSTDDANSDQKEVPSVLVYALRRIFAGEELTMDY

SEQ ID NO: 140864 - protein, 47 aa, Heterodera glycines
MAKLATTEQLNEQFGLCDEEKDEVGQRFAVAIRRTKIIRHGRQKVQT

SEQ ID NO: 140865 - protein, 259 aa, Heterodera glycines
MDKKINKIYTDPANPGGYAGASALYAAVKEKHPKLKRAEFEDFLQRNTTYTLFKPKRDKFRRLRTVPTGFMTGTLYRGLLRTIQGSDVQADLADFQALSRKNSGYRYLLLAVDVLSRRMFGAPVKSKRPVDMKRAFEELFEQMPRVPDTMYTDRGLEFVAKPLKEFYAEKGIQKFETSSKKKAALGGAGHPHPKDSAVQIFFRHTLRFGFECAGQVFECINNSVCRATGLRPNEIIDAMRKEGCGKEGVYGEGLAQLGQ

SEQ ID NO: 140866 - protein, 142 aa, Heterodera glycines
MGNVVSKVGNFMVKAAFVAVDGFLAVGEAFGQGMRALLSPEEHANPPITQVLLVRRRGDLIPCFRNVLKSKNETALGSIHDELSDLGLDHISYAFVKGVDLKLGFFLRSEWTWSATNVPPKWSNSTTCVIVWMPKRDAITAN

SEQ ID NO: 140867 - protein, 120 aa, Heterodera glycines
FAKSDDEEEEEGADNPTDDIRKMREEERPQVVVLDPRTDLSAEELQKEIEKGNEEEDKRKIMEGKIMFRKPEKRKTENGSGKEGSKEEEEKEKRAKREEKPGQQQKEQNRRLLSFGEEDE

SEQ ID NO: 140868 - protein, 62 aa, Heterodera glycines
MASSDSEASSFAFPQNSKCGATASGQKTTANASSSLAMRVQRKVLSKLSKRGMVRLLGDNRL

SEQ ID NO: 140869 - protein, 34 aa, Heterodera glycines; identical to SEQ ID NO: 138629

SEQ ID NO: 140870 - protein, 159 aa, Heterodera glycines
MAFLPFATANLAPFSPIIQLNPRGVSYSFTLVISFHPVFLTGIDRAFNIRCFFTEAVRAIDASMDVSCVTDQSLLADIQYDEKAFAAHSHAHVVLFRPFSFRPSSISAPSLQFRYADRVQLFFTCTVQLCFREDGGCEGISPPQCDRHNTSPAQRSSDG

SEQ ID NO: 140871 - protein, 35 aa, Heterodera glycines
VRFRPLTVQEKNMDFHVNDSPNYYTNAFFNCSPNA

SEQ ID NO: 140872 - protein, 114 aa, Heterodera glycines
MVDKPYEFVDRNSLPGDQCACIRKNTRHKRPKAFGLRKCPNREIRSARVSACALALGAVSSGEMVLPKSGKLGCLASAVSLPLALSPSLPMRTLALKRDVVSAETIRLYKTAVI

SEQ ID NO: 140873 - protein, 154 aa, Heterodera glycines
MAKTAEFYDDNDNSKSSKGNAQLKSDHPTQQANGTMAATKGTESKGADEKAPLHPNSSDDSNASPSVGGSSISDFVAQLPPAPPLLVHIAVPFLLIAATFVGLFNCAVAFGLYFVFRAVASDFGRSALYTLPRDFKWVLLLGKESRMKQISSRG

SEQ ID NO: 140874 - protein, 155 aa, Heterodera glycines
MRVRVGMRVELGKCQRSTALHLDHALFVRVTAHCAQKVGMDWCTAAECAPQQPFELEEQKGAPVGEKKCNSTHLKSLGNVYNALRPKSEATARKTKYRPNATAQLNRPTNVAAISKKGTAMCTRSGGAGGSCATKSEMDDPPTEGEALESSDELG

SEQ ID NO: 140875 - protein, 181 aa, Heterodera glycines
ILCYIYTSGTTGAPKAAIIRHYRYYLMSIGCGNAFGIVPSDRLYLTLPMYHTAGGILGTSQVVFKGSTEGNSNLLNLDNRPGSCGFIPIYNSLHGFFPLLLLKVDPKTGQLMRDKRGFCIKSVPGETGELWEMMRGEMIRVGAIRNDPLLRFEGYVNEGDTQKKLIRNCQSAGDQVFSTGD

SEQ ID NO: 140876 - protein, 118 aa, Heterodera glycines
MRAVRPRQSLTAFGECSSTANRRDSTIDEKLSDPNGIILEPMKELLKTEKDYIEDMSVFLNELMAYALNPEDVGYCFIEWMEKLKELYADYCLNKEENNYLICLPETIKIFNVKINLH

SEQ ID NO: 140877 - protein, 108 aa, Heterodera glycines
MKKPLESPAVAASSDNKTIGQQIAQNVKVADNANKQMMLDGEKPEESEEKLKENLIDKDKEHGANEAEIELARKAFENWMKSMTETTKNMKTDEGFGKMKVYLQWLFR

SEQ ID NO: 140878 - protein, 337 aa, Heterodera glycines
ENCCNSLLSTNRIVEVSGDNTPEPHELNRASILITTPEKWDGITRCADTRHYVKQVELLVIDEIHLLGVERGAVLEAIITRIKSMARRRELAKLPVRVVCLSTALANAGDVAEWIGVRDHGLFNFRPSVRPVPVQVHIQGFPGQHYCPRMALMNKPAYQASAIATDGKLWVPWSLMAPCGCHGHWWLSVDARSFPHPSLFQYIKQFSSTKPALIFVASRRQTRLTAMALLGLLQREGEQSHQQWLGMNQTELERTLASVRDDNLRLTLTYGVGIHHAGLHVAERALVERLFVERKIQVLVATATLAWGINVPAHLVIVKGTEYYDGKTHKYIDFPVT

SEQ ID NO: 140879 - protein, 25 aa, Heterodera glycines
MCEEIRLRFPKLNGIVSSAQLTGTI

SEQ ID NO: 140880 - protein, 100 aa, Heterodera glycines
MRLFKDKDEDEQGDRLICISLAQRFTDESHYIMGASDASQLPMDVPLISINHCLADFIKPEDIEGSRCAQCSNATPPPSAPPTLVKQLMFTRLPDILVIH

SEQ ID NO: 140881 - protein, 24 aa, Heterodera glycines
IPFIYSLKSSKYINSMHWESNLRP

SEQ ID NO: 140882 - protein, 1105 aa, Heterodera glycines
VKIVAVHTVKVTSHCLNVGLNRGHWWKLQVKINDNDCEMNGDTGAQATIITIQTWIKLGRPKLELSDIEMHNCNEEPFPTEGMFQCVVSCFDKPPKRLTAYVSSAVNYNLFGLPWIMAFDLIPREVMFPKVQQKEMCEPISIHATLAPMRKANIKDEASLIEALKTDFSEVFEPGLGQCSKIKAHLILKQDAKPIFCKARPIPHGATEAVNAELDRLLEIGAIKPIDFSHWAAPILAVKKKNGKTRVCIDFSTGLNNALELNRHPLPRPDDIYAALNGASYFSNLDLRDAYLQMELDEESKDLCVINTHRGLFQCQRLPFGVKSAPSIFQHLMDQICAGIPGVFAYLDDGLIASKTLEGHISALYQLFTKIKEFGLRIQLEKCKFFQKELLFLGHIVSSKGIRPDPARSEAISKMPAPHDKTSLRSFLGALNYYGRFVKEMREIRTPLDQLLRKDENWNWSEEQQKAFEKAKKIMTSDLLLTHYNPALPIIVAADASKNGIGATIGHIFPDKSEKVIEHASCVLSDSQQNYSQIEKEALAFVFAVQKFHRMLFGRKFTLFTDHKPLLAIFGSKKGIPIYSASRLQRWALIMANYDFDIKYTNTASFGQADVLSRLIANYPKPEEDVLIANICVETDCYINTILQSQTDHLPVTAQEIAESTTKDETLQKIVNFVISGWPTKCREPEIAPFHPKRNEILEIGGCLLYKSRVIVPSQLRGRILKALHFAHPGIVRMKALARQYVYWPGIDSEIERVVRQCDECQGAQKCPIKAPLAPWTVTDKAFQRVHIDFAGPCQDGYVYFILVDAFSKWPEVYQMSSITAKSTVFTLRSIIHRLGIPEEIVSDNGTQFKSAEFAAFCKEFGIKHTFSPPFHPQSNGQVERFVDTFKRAMKKCSKDDKNWTEKVLLAYRTTPNNAIDGYSPDQLFFGRKLRTKLALVLPKGHRNDSENIDKIQLDKRRKDYSNKMAKQFDERHGAKEKVFFPAEPVLLLNYRNQKTYWLHGTIVERVRNSPTYRVHVPVLGRIVHRHSNQLRRNCVFEENSKHNPGPDQQPIPPVNGQAQNLAHQIADPVDQRTDQQAANDPPTMALRRSQRKPKPVIRFSPSGR

SEQ ID NO: 140883 - protein, 72 aa, Heterodera glycines
MADNNWLSSSLSLNLFETKCVLLWVLEKTLYHIKGWIRTDTDEKREEEAKGKGILDKCHWETIKREQLTTAN

SEQ ID NO: 140884 - protein, 228 aa, Heterodera glycines
RLAFLFSLLLSFVSATQFLRSKTRALFHFAMPTKAASCGPAGKCVAMPTKAASCGPAGKCVPFPHGARCQCASGRMGTECQSECRDIYNSCDRWLQEGRCVWTRPFSAFFLDNCPFTCGICQRAGQGLPVPLPPMLEPLQGLPVPLPPMLEPLAWFVGRWQTQTIGPDRFPAPLSRGPYIEILDVQLAEVPSFDRPPLNISVTARVTARTLDGWEEHNEVGFLTVKPA

SEQ ID NO: 140885 - protein, 74 aa, Heterodera glycines
ALVTKFCHFQYWQDEFLQWDPDTYDGATEIFLASTDIWISTDIWIPEFSLYYSVNFNDAVKQSNNDVRVNYTGE

SEQ ID NO: 140886 - protein, 32 aa, Heterodera glycines
MGPGAKQKSAALAEKDGKLAKGKGGEGAISDQ

SEQ ID NO: 140887 - protein, 227 aa, Heterodera glycines
FPFFSQRCTLLLGSWAHSNDSIKYSLFSKNLSLIDFYDNQEWQLDLVRPTQFGIVFNLVIPSAIITLVAVIGFHTPSTSGLVAVIGFHTPSTSGKMRDAKFRLGIMTLMSKMRDAKFRLGIMTLMSMSMILLAIVEDMPMSMILLAIVEDMPKFSISSSRKGRGSFSGIPLIGLYYFMLLAIVGMSTVTTQMQMFVYVERNVRIHHHVPFYLRWMIADFVPSCHSSF

SEQ ID NO: 140888 - protein, 67 aa, Heterodera glycines
ESVLRRDGCIVVKDNVAKGTEKEFDEVDNSWARPREMLHKLFERADCRIVLERKQPNIPKALYEAWE

SEQ ID NO: 140889 - protein, 194 aa, Heterodera glycines
MTQPAAVQPNLQQLIDVIAQQQTQINQLINVQRNNQPNPAIIQTIPSMPDVAIFEHCDEKHRITEWLERFTFAIDSCAPNAADDIKVKALMNKLSETAFSEYSKFVLPAKVTDFDFDETISKLEKLFAKPQSIFVDRFACLMATKDDGEEFQQFVNRHKRLLKDFQYDKLNEEQFKGLMLLTALKSSKDAVLRQ

SEQ ID NO: 140890 - protein, 157 aa, Heterodera glycines
MSSSPSTAVFIFAYTLFSVELITCVAVLAITFLNLAVIVPTKLLHLNLKSILIVQSIAVMLYVLPRVVMLFQKFTSDDPFAPANVVLQNIMTFDALFRRLLGHALIIERFIATLRTNSYEKFSKVFFTLTWFCITFAIAFVNTNNTMNQSVDYLPKF

SEQ ID NO: 140891 - protein, 84 aa, Heterodera glycines
MANPADMALLFQQLTDTLKNIANQNANPNKQNSDLFATINSQLSEFIYNPEADLVFEIWHERYGPFLETDGQSLPDEMKTRLLV

SEQ ID NO: 140892 - protein, 100 aa, Heterodera glycines
MSAAQVSFWLVGASVCGATAAQVSVAQMAAAQMSAAQVSFWLVGASVCGATVAAQVSVAQMAAAQMSAAQVSFWLGGASVCGATVAAQMSAAQMSANPKN

SEQ ID NO: 140893 - protein, 253 aa, Heterodera glycines
CLPKRKVNSKANVKNILCFKLDGIGGGKKCHFPPFARHSRRTHRMARCSVGFERREELAKLAVQHATNSSDQMEDGDLSLVSFGSSALPGALADYSPRDEAKSNYLSEYVSKTISAVEWLIKLDRLRQEEAIRRAMAKLSAERAPKAEIEGCRASDGRMTRTISLPTSQGDGQKSIGAIRPLAYGISPTAKPIATPGDGPLTNGQKQSKSYGWVLPVAPPSVTSPVRFVQQFGFIFGLRVHGFVRKNANAKTF

SEQ ID NO: 140894 - protein, 88 aa, Heterodera glycines; identical to SEQ ID NO: 124691

SEQ ID NO: 140895 - protein, 119 aa, Heterodera glycines
MSNEAEKEFTSTGNPKAPALHVVLDWIHRSWQEISKEVIIKSFEVCGLTTPLDGTGDEKIACFKPNGAIGPIGIKFLREFRATETVKDGRNDQEEAGLSEDDGDVELDGVGDDDEFLIC

SEQ ID NO: 140896 - protein, 23 aa, Heterodera glycines
GGLFFNLVRKGDIIGDRAFKGDG

SEQ ID NO: 140897 - protein, 32 aa, Heterodera glycines
MSYSESATQKMIARKVYKKEKPETVGQLNKSN

SEQ ID NO: 140898 - protein, 176 aa, Heterodera glycines
VPIMIILGGQVRSSQIYNAQEFCRFIRYVSTEEKKQFSSKRENYVSTEEKKQFSSKRENELLLQIPKNGVTVPYRVVDNPTRLKDEEWDRVVAVFVQGPAWQFKGPAWQFKNWKWNGNPVEIFANIGAFHLQFEERTRDTECDSFSVSCVVIGRSQRHQGWSEVKEFWAMLDGRIK

SEQ ID NO: 140899 - protein, 55 aa, Heterodera glycines
DDESSILPFYRLQHSKSLPVDRTPTPTNEQEENVTSNIKIAKKINVTADGNCLFR

SEQ ID NO: 140900 - protein, 104 aa, Heterodera glycines
MTQNASAGIASELVLNRNASRFISSLLKIPTVKIRDTKSVEHKVAEISRTGYDKLIVISDFDYTLSRYHRNGEHCKTTHGIFSGVCVNEKNLEFYEKAHVLETK

SEQ ID NO: 140901 - protein, 127 aa, Heterodera glycines
MANVHLISNMMQFDENEVCIGFREPLIHTFNKNQTVIKQEAPFFHKLADRNAVLLLGDSLGDVRMDVGVENESVVLKIGFAFAMKVINEFGYRQDARTPSQIRNIDYQMGVYSHADGSAYIEQGETK

SEQ ID NO: 140902 - protein, 38 aa, Heterodera glycines
MSAIQLSQLLKATSNRKIEHPVLINHICTALKDFFSSD

SEQ ID NO: 140903 - protein, 162 aa, Heterodera glycines
SFSLVRDIKRGEQKHHPLLERFELMLRLVVPLNSHSTPQEWHKTGAFLEGRCFVDTAQRQLIPLRDVNGNANVREVAVILLMDRHFTQRIGPSEKGPDRPTGINQMNIRHLKLAGIHPIVFTERHFRKLGDDERSQIKFIREKILSLSEEFHTNEWTEENNS

SEQ ID NO: 140904 - protein, 101 aa, Heterodera glycines
MSIYNFFLLFSSLLVVVLQQCSAANATDKNNEDNVTKAISSDKIVPKSDAIVHSGPVVESAFAVDNLSEPVKKWTNWRNGKKLEVNEAMEVPLVINPGWAN

SEQ ID NO: 140905 - protein, 158 aa, Heterodera glycines
MRTFYDNLEGEAKKGATKKIVEECYGWVDEVATEDERNALKQMHHQSHDECKAKVRELMGRLSEERSEQVENRMGFCEHVYYGKMDGEGDGGAGTAGDEHHHHHHHHTKRRASDGKSGQCPNKIGKKRIKEKANKQKYRKSGLKGKSGQNAPTPNIAQ

SEQ ID NO: 140906 - protein, 18 aa, Heterodera glycines
MAVRKRPGPQHSLWVPKR

SEQ ID NO: 140907 - protein, 86 aa, Heterodera glycines
MGTRTDAAADGARAQRQTMLLPWPSVRRHVQGDADGQYQSVRAVLPKWVRDAHRERGLPRAAGHGQCRTNAATDEDSDLWATGRGQ

SEQ ID NO: 140908 - protein, 77 aa, Heterodera glycines
MGHIFGRKFECFEKGLISLSPPGLYLTDKSVKIRLFVESVPPPVTASLEVPIPHFFFACREAQMINLLYRSLFSIAK

SEQ ID NO: 140909 - protein, 116 aa, Heterodera glycines
MKHNYHDGTSNAYASSPVPTISTCSAPPPPPPPAVPMSYMNPKQHKHYQCYQQQQEPLMDGYGYAVPVVPMPNNDHNNMRSFCAALCRCHLKNVSMFCIAFVEFCISGQFQKAFIH

SEQ ID NO: 140910 - protein, 31 aa, Heterodera glycines
MAHFFEIMGWEKSKTSVFGVQAVKMLDVKIF

SEQ ID NO: 140911 - protein, 208 aa, Heterodera glycines
YLTDKVSKQIFATSSAADFSAHNKNQKLFHELHVQAHENVSILFADIVNFTQLAAQLNAKQAHENVSILFADIVNFTQLAAQLNAKDLVKTLNELYSKFDEDAQKLSCMRIKFLGDCYYCVSGMPVNRPSHADMCVLMGLEMLEMIKTIRQVRIATGVNVDMRIGVHTGSVLCGILGLKKWQFDIWKKWQFDIWSDDVSFANQMESTG

SEQ ID NO: 140912 - protein, 96 aa, Heterodera glycines
KLTLPFSPSLKHSFVRLRFRHDIPSIPFSSTPFCFACVNFCLLFGHFFFPFPFFLLLSLSNEWQINALKLLFLHGFSPLCTVYQSFCLCILLTHHL

SEQ ID NO: 140913 - protein, 97 aa, Heterodera glycines
MSDLTHDGVERLPLHTFTENAYLNYSMYVIMDRALPYIGDGLKPVQRRIIYAMSELGLNNSAKFKKSARKRGDVLGKYHPHGVGGCYEAMVLMAQPF

SEQ ID NO: 140914 - protein, 96 aa, Heterodera glycines
PWNNTTSTTTAEGTKEPNGKEEGLSAEKAKTNRAENATENVPNVSSTFAVPSRHSVPDLPPACADHPPGLIGPIPVWMDGPGFETVGNDERRYSNN

SEQ ID NO: 140915 - protein, 86 aa, Heterodera glycines
MTASLQQIRAQPGWTADKCKEQIEVAKSENRTFQRQTLQAHLVHLLNKEHKFNEAIQLGTDGRTKNRNGCKIIFLGIKQFFIEIPI

SEQ ID NO: 140916 - protein, 22 aa, Heterodera glycines
LRWRALPPSPFGIFLCRFARHD

SEQ ID NO: 140917 - protein, 89 aa, Heterodera glycines
MIAFLLDDKNFSIICEELKLRKIDTTNLWDVLFDMIILDAFEDVQKPPSAIAALLRNGFISTSMKQSTLNSLIWSMIKTKRQRLQVTEI

SEQ ID NO: 140918 - protein, 129 aa, Heterodera glycines
MPWLPFLLILLPANIMTMVMYAFRAERKHISESETHFRNAMEYSAIGMALVGTEGQWLQTNKALCQFLGYSQEELRGLTFQQLTWPEDLNKDLQQVEKLISGEINTYSMEKRYYNRNGDVVWALLAVSL

SEQ ID NO: 140919 - protein, 127 aa, Heterodera glycines
MSGKRLFTNVLKSAVGTVNDRPCIPPEGLNREMLKRRPTPAPVPQFTTRSAERSPVRKTYAPFRKGMPLERAEEAIYKIRKSLLQAADALSELADELFPHGEAREKDEGKEDEEAQWGGPGPSHSFM

SEQ ID NO: 140920 - protein, 22 aa, Heterodera glycines
CNWVNLAKSGTASTRIWLSSML

SEQ ID NO: 140921 - protein, 21 aa, Heterodera glycines
CPFGDSTLWGAKIHAELKYRV

SEQ ID NO: 140922 - protein, 204 aa, Heterodera glycines
IQWAFLLARRARDQGMIESDIIYVDLLEKIRQYRVNVLTLTLKIRQYRVNVLTLTLYDWVPIPLVYTQVVNLAVRLYFVIALFARQFLKDFGGRICLISQKVDIIVPLMTILQFFCLISQKVDIIVPLMTILQFFFYMGWIKVAEVLLNPMGEDDDDFEEDDDDFETNWIIDRNLQCGLMIVDECYGREPPMERDQFGSEAMRR

SEQ ID NO: 140923 - protein, 214 aa, Heterodera glycines
MLIAFMKRNHETIIIEYSMEKYEAYLCIKMEFYKLNFMLLFIINSLNKTLSVNNFCEKNGKLLPIFAEIFGQGWETEQNANCHPNDQNDLNLAHSNRNVQIDKYNDQQKLEIIHKFHAIKEGIIKRRKLERKVRNKIEQKIAEKLGICRPKIYKWNKEFEFVYENKFYKQKKQEFIERIDDFWKNVQKWKTETICGRVGHCWIYINKMEKGIWH

SEQ ID NO: 140924 - protein, 53 aa, Heterodera glycines
MAFSLAKCASILCCAVLLAVIICFSNKNLYNICINAMILPYKHINYFCVHLLV

SEQ ID NO: 140925 - protein, 55 aa, Heterodera glycines
MAFILAKCASILCCAVLLAVIICFSNKNLYNICINAMILPYKHRLKHSLAMCPIK

SEQ ID NO: 140926 - protein, 121 aa, Heterodera glycines
MDGILTGAGFLRIPRELVRGHFTQERTARIEQYFGCGFVFYQLPQVIEQETEPPNITSPTPNSSPNSNGQKTPENAESPSGAVASPNAADPSSNATNSSSVTGSPNAGESCSNAANSVILF

SEQ ID NO: 140927 - protein, 129 aa, Heterodera glycines
MSDKKKQKKSSKKRDKSGDRKKSSKEQPRTDAEVQQPRTDAEVQQPRTEAPEVVNGATPSTGVLTVYEEPPSTAGQTTVYEEPPSTAGQTTVYEEPPSTAGQTTVYEEPPSTAGGDASKTTKPTTGSQN

SEQ ID NO: 140928 - protein, 18 aa, Heterodera glycines
YREATPEGFGLPINLGTS

SEQ ID NO: 140929 - protein, 147 aa, Heterodera glycines
MLSEFSTLITAFLAQLSTEEKDKWAPNALRQTVEALSNGKNQHQLLLVPSDFVAFLLNKIITSFTNKNGGTVEKFSGNSGKKISENFAPPPTSSSSSRHVRRRFRRDMSPSLWLALACAMTGFVHNSMLYTMMAYILIVHHILFYDH

SEQ ID NO: 140930 - protein, 219 aa, Heterodera glycines
TDSNYGTLKNLDADIFTKNAPAKPAAAPKAGQAPHGGGGPAQTPTTDSNYVTLKNLDADIFTKNAPAKPAAGGAASQKSAAGGAMSQKSAAPAGGTSALGTASQKTAAAPAGGTSALGTASQNLTYDFPLDYLNMSSQWGGGRLVKPAAAPKAGQAPHGGGGPAQTPTTDSNYGTLKNLDADIFTKNAPAKPAAAPKAGQAPHGGGGPAQTPSEKMAKF

SEQ ID NO: 140931 - protein, 63 aa, Heterodera glycines
QKGGEAKGQRERSVLKKRKGKTDEQRKKGRKCGEQRTNFAHLGEEESVNRSNKAKNGRNELIC

SEQ ID NO: 140932 - protein, 193 aa, Heterodera glycines
MVLRVMYVIELLETEEGGIELVDPSWCKRLAQIMAGLSVAALAGDDERTLSLSQAPPGGSSSIEWTTTGTSLEMQGTRTEDTGRYSCVATNEYGQASTSAFFRVLKVEKESAGPSFVKSLAERRNCKEGEVISFECEVDGWPEPELVWLVDDQPLRPSHDFRIQYDGQIAKLEIRDAQPDDSGTYTVNIDFIN

SEQ ID NO: 140933 - protein, 131 aa, Heterodera glycines
MLANNRSALLNLLIGVLIGFVLSLALFPSTDFPSVKLPTYSRPVVLIKEDQQKQRNANVQQQQRDELLNNHDHVDEHRNEHRRRFDPHTEEEVDDNDDEHGAAPGIPLFFHTNGSHVNEAKIYLFFLKQLI

SEQ ID NO: 140934 - protein, 112 aa, Heterodera glycines
MVRLVFRPYTQVRRSICTSESLRTSTRVSSGFILLRNSSPSFGSQRILSVSAPSHAIETGLSCSLQGSHISSVRSLLSLRLWVLHPMTCAYAKLLGPCFKTGRTDDRLYTEK

SEQ ID NO: 140935 - protein, 90 aa, Heterodera glycines
MNPKRSQMGTNQSELSYFWTVASKQKLLKIVQQMCKLHMNVSAARFSTVIATLKRKRYLRAGEQSDETFTIIDLLFANSQMRKLPFLFST

SEQ ID NO: 140936 - protein, 17 aa, Heterodera glycines
MVDQFPFIMIDLSFISQ

SEQ ID NO: 140937 - protein, 131 aa, Heterodera glycines
PLPDNNFGEVSGFTPEQYQRVNGYSNLFWGWGDEDVDMFNRILSVGYPDERKRELSAPELGFYTSLELAKGVNDTTNTIGNEECRQRLLDSAVKRMPLDGLNTIKGTYKVVSVQENKLFTNIAVMNNKRDR

SEQ ID NO: 140938 - protein, 144 aa, Heterodera glycines
MRCLRMIYFLRFIYLMFVDHFVIILALLICPFSVAEPLPLCPEVPPTLIGRQLPDKKMQMLADTEREHPEMAKGGEWKPRTCIAQQKVAIMIPYRNRAEHLRGLLANLIPFLQRQQAHFRIFVVEQAFPVGKRVDKFNKAKLIN

SEQ ID NO: 140939 - protein, 178 aa, Heterodera glycines
MTLTVKLPAAFLDLCQVWAERQQAEERLSGQGLVVEIDESKFFRAKYNRGRMINRAYDWVFGLLERGTNKVRFFNVQRRDADTLLPIIADNIEANSIIISDGWAAYGGINNMQQQYDHRWVNHRMYFVDPNDPRVHTQGIEATWRALKNGLRRLHGTNSDMFVTNLSLSVYVPSVPWK

SEQ ID NO: 140940 - protein, 40 aa, Heterodera glycines
MAKSAGMPTADQRNRRVFRSLFWIIAVNIGGIVFIQYVPH

SEQ ID NO: 140941 - protein, 75 aa, Heterodera glycines; identical to SEQ ID NO: 139835

SEQ ID NO: 140942 - protein, 85 aa, Heterodera glycines
EPIVPVPEFVVDLCDFEDLYLAEFEDQHLALIRLSETNWRLISRTTATADQNDDPNRDEHHQNSGEGPAENGSEKTLIEIGRFFS

SEQ ID NO: 140943 - protein, 121 aa, Heterodera glycines
  unsure (1)..(121): unsure at all Xaa locations
PKNPWRRXIGFIQQIRIELLFPFLFHKMDAASAIKRRGMAKDWLDNSAGGAKLGEIGGTIQQRHLGKLFHRLHFPFQYFHSLVQLFHSPRAFFHPKRSFFENLVGLILKSTQRMGQLNDDF

SEQ ID NO: 140944 - protein, 99 aa, Heterodera glycines
MPGAPVTVASVNIDTDTLLRTRHTDAKHSKDDENRENDGKFDDANDDGEDGEDQQKGGEETVAKEGEEEEDNGMGIERRGRHNAKAETIGGAQLAPMVS

SEQ ID NO: 140945 - protein, 78 aa, Heterodera glycines
MCISLTTNMRAKTTNCSTLQITFASVDECPDYGMNSASEDERRHFLRRYFVHFGQPIGEECEMDKMLCKIRHFEAVHS

SEQ ID NO: 140946 - protein, 51 aa, Heterodera glycines
GVDECPDYGMNSASEDERRHFLRRYFVHFGQPIGEECEMDKMLCKIRHFEA

SEQ ID NO: 140947 - protein, 194 aa, Heterodera glycines
MATVLRSSAELSVESIVALFNCYVHSIFTFFCSDFDAQQQQQMFGTNFVTFRLRQFVQSIEKKMNGPGATEGGQDSVENAESILKQISATDWTTGEIHSQHSPYVDTIVQECSQFKQKFVRLFPYVHISDELYAAIWSMLLLCIFRILVQGYADVKKCSIEGRALQLLDVEQLCGELEEITGLRQFHNHPFILV

SEQ ID NO: 140948 - protein, 560 aa, Heterodera glycines
NEFVINSEAIKRILDDPRYADKKVCVVSVAGAYRTGKSFILNFFLRYLRWHSAPVADRTVDWLEMESTLGGFSWRGGDDRDTNGILIWPEPFLLEDRNGEQVVVLLMDTQGIFDMDTTVKKCSTVFALSTMVSSVQIFNINKNIQENDLQHIFNINKNIQENDLQHLQLFTEYARLALDEDNNSKPFQSLLFLVRDWSVPDDAEYGSIGGQFQSLLFLVRDWSVPDDAEYGSIGGQRILDKRLKVTRRQHPEHQQLRLHIRSSFDNIRCFLLPHPGREVATNLHYRGKLDKIDIDPDFKAQLRSLANYVFYPNNLVVKQIGGQPITCRELAGYINAYFEVFSKAEMPNPQTIYDAYFEVFSKAEMPNPQTIYDVTAKTNHYEAVESAKAVYMREMEESCGGDSPFMSGAELRAEHERCKEQAMRIFKTAKKMGGPELAKQFAQKLKQDITEAFESFEHANNEAFESFEHANNSKTVHLRTPAVLVASMIALYCCQLFFQLLGLDTIASIFSLFLTLIFVALGIWTYSRYSGHFRHAQVFIDGRVHALLHNVLAPNCVHIR

SEQ ID NO: 140949 - protein, 113 aa, Heterodera glycines
MRLEKCWFCSSTIYPGHGIQFVRNDATVFKFCRSKCNKLFKKKKNPRVFKFCRSKCNKLFKKKKNPRKLKWTKASRRIRGKELVELVNDVTQAMEIRRNEPTKYDRNLWETAV

SEQ ID NO: 140950 - protein, 72 aa, Heterodera glycines
MSLLYFRISRDLDFMKMVYKDVIASNSSIEQFMGFCEEMHAQGFHKQPLAIYLQRSDYFVHINKDGEFQLKQ

SEQ ID NO: 140951 - protein, 69 aa, Heterodera glycines
MRKSSMNLLLLNLALSDLCLLSINSLYLMPKLFERPILKFSLIYCHFHIFMTGVCGLVSILTYMAICVE

SEQ ID NO: 140952 - protein, 49 aa, Heterodera glycines
MSRVARKDEVPIKILKRVQWPRELYLRITANEVPKMGTNWMKKQDRSVM

SEQ ID NO: 140953 - protein, 75 aa, Heterodera glycines
MCTLSDPTNQPEIFLLLSTASLVLYCGEFECYALIWLLTWWRNSQISENGRRLMVSLSVIMSMGFVCDIGVSTFE

SEQ ID NO: 140954 - protein, 19 aa, Heterodera glycines
AIYEAIPEGFGLPINLGAS

SEQ ID NO: 140955 - protein, 65 aa, Heterodera glycines
MDDQRMPVSAAFSVPQIATALADLTNPDHVGNEALKDFDHPMHGERIRQINRECQRQFKLHGLLA

SEQ ID NO: 140956 - protein, 294 aa, Heterodera glycines
MSTSKMVGTMFLHQKEGQSEGTDLGQCSMGRTDTRHPRGKRKEETSNEKKKGKKAEEVMPKKSKESTSKSRKKNESSGEEEDFDDDSDGEEEEYQPKVRRREGKRMKKDDILQKKKQKSDPSPAKKSDSKKSTKTTKVTKVEVKEESGAGVEHKKRKTTKVEVKEEPSSSQGSPSKKRVKKQEEEEEVWRWWEEDESNAGASDGSIKWQTLVHKGPVFAPAYVPLPKHIKFKYDGKEMDLSLPAEEVASFYAKMLDHDYTSKPVFNQNFFKDWVKVMTKAERAEIKDLAKCDFR

SEQ ID NO: 140957 - protein, 145 aa, Heterodera glycines
MSNQGGKKQPTDSLIRAKYPDPIVVALLANSSSSPPTESPSSADIRPTSLGQLLLPSSSPPPSSSVAPITDQSPTVPGKGTPPTIRVDNGRVHKCAVPSRVAQLRVELRRQTLLLQCADHKQIRPLGQSERRESLVDSLRQLSAR

SEQ ID NO: 140958 - protein, 18 aa, Heterodera glycines
MENAPEVKSQTTETEKGT

SEQ ID NO: 140959 - protein, 205 aa, Heterodera glycines
LEHNPYLTAAEREAIGNRKEELRQLSLSVKRNILVDLDISTGAMHQQKAMPLSVLVERHLFSKNPSKRAIPWLQSVQHKGPLLIAALEDDAPIEYFNGEDTQKSEATGEGDGVSCQRRNVILAKATLVDCITWTEFSREYSAERTLFRPLQNAFVLLVADAEALSPPIPHKCPSEFFEVGRSLVNAVNLALVNGGGIYEETLTTF

SEQ ID NO: 140960 - protein, 210 aa, Heterodera glycines
MVEMGTEIQTSRNELKAFQEEVDKAKNITLEHVEKNDLKKAKKSADVAKGIARQAKTKYTSTLEGYNDKSEKGFSGIVNRLNEALGEHIKRKDIENIQVSEAEKGPQKRERLANEDVQFQYDSIDQKFIVYLSAAVSHIDLSKHLAYVLGFKNTRLFHAEEANYMPDLTGGVRQLYIYAPDLIENTIIGNQMAPLLRIVNVVDDPGSISE

SEQ ID NO: 140961 - protein, 219 aa, Heterodera glycines
MPFHQQTQHTAKCKWKCHNCLRVGSAFRGNCVQGNDNFFETCLGCNKHHQQKEHVCGQKFCKICLGFHAPRDCYIPYRPKVKKEKRFVFFDFECTTDFKPDPQLMRFKHQVNFCFAHVTCTRCIEKGIWDQELERACALCGRFRTYAWSPFEFWHTDVECRKVVEDPLATFTKWLLNFETEVLGMEPGAKKRRKRKNISHSIVILKSIKIIFLYCNSIT

SEQ ID NO: 140962 - protein, 233 aa, Heterodera glycines
EEDQSVEEKVEEDHQSVSDTASGRETGRGSESGRRSGSGRESGRGIESGRESGCGRESGREIESGRESGRESGRGTESGSGRESERGRESGRESGRGTESGRESGRESGRGTESGRESGRGTESGRGIESGTESGRESGRGTESGRESGRGTESGRESGRGTESGRGIEEEQKVEEKVKEEQKVEEKVEEEQKVEEKVEEDQKVEEKQKVEEKLEEEQKVEEEVEEEQKVEEE

SEQ ID NO: 140963 - protein, 96 aa, Heterodera glycines; identical to SEQ ID NO: 138093

SEQ ID NO: 140964 - protein, 63 aa, Heterodera glycines
LTSKNNSLPKSFLQPLIANLISCRLKAIHCLPVSAQQSTNRVFDFLQKIIHYPKVFYNHLLPI

SEQ ID NO: 140965 - protein, 104 aa, Heterodera glycines
GPPNTGKSYLAAQIAKDSEFPFIKVCTPEEMVGYSETAKCAKIRKVFEDAYKSPLSCVIIDNVFEDAYKSPLSCVIIDNIERMMDYSPIGPRYSNFVLQTLLVL

SEQ ID NO: 140966 - protein, 179 aa, Heterodera glycines
NDAGGGGESCSFESLKVLPLMFAYFNAHKQYFMASSSIVQTGTASNKEKEMVASLFCRLAALLRIKNHAFGSVAKITVRCLQGLTQALDIRTLVKTNSDIVRTGLLIFFLLIFFSNCADDLFLAVNELKEGGQYSLLRGENLKSGVSMEFAFQMIIPVSGVSMEFAFQMIIPVLSTVFS

SEQ ID NO: 140967 - protein, 144 aa, Heterodera glycines
MASAQNSGHAVDPSTVSADLNDICGDTDGMANEEEADDAIVKEIVTALLSGGPFPAAEENDEQSQAMEQQQTNGTAMDGPNLVEKSWSAVAICIDGVGTGATAFIGAVTKTGATAVPVRRGQWAKRRAPRLAQIRKATTWHSPP

SEQ ID NO: 140968 - protein, 160 aa, Heterodera glycines
MQKKRRKKQKKKHHSEKELEKRVANGQKGENEGRKEENEGRKEEEFKMAKGTEEEEEEEERRSGTYSSSGGEVYLNEREEEELLMVMEQGLDRRLGKERGQVGEGKDKQQQQNGDKEHKEEEEEQKQQITTQNDQTAEIISSNHSQTPKSPNYHSQQTQE

SEQ ID NO: 140969 - protein, 50 aa, Heterodera glycines
MNGITAGDYGAIGGTYFCRASKNMDIKSRNMAIKYGQRIAKYGHKIAIWT

SEQ ID NO: 140970 - protein, 375 aa, Heterodera glycines
MQQPNLLKIHGSLQQKLSAKRTAAHLTTSPLSTIPSKRQQFLDGAAQLDITALLTSTEVSEPVRAVILQLDALLKLAVDMVHETSIQDTRAVLEEDRREHSVVLMGVPESDSGLSSTRRAIADQQQVLDILDVCEIEAMPTKVYRMGQRKEGGPRLLKVEMPTRKITQTFLRNKTRLKNSKFQAVSVRPSLSPEQLKERHNLINCCKTARAQFPNLNFIVYAGHVIPQNDVSVFRDDPVEDKYAIFFSSVRRNLEINIPETILSVKSAKNFYPPHLLASIREKARLYKLMKENRGKYEPLYKSISLHIKTQIRNIQSRKENKILSGDKNRLFSYLRKYFKPVEDPPVIQYNTLFVSDSTSKAEIFAKIFSENYCK

SEQ ID NO: 140971 - protein, 36 aa, Heterodera glycines
MTYFEYLETKEAQEQNPGERQSSFYTQKREYYQPEP

SEQ ID NO: 140972 - protein, 196 aa, Heterodera glycines; identical to SEQ ID NO: 140372
  unsure (1)..(196): unsure at all Xaa locations

SEQ ID NO: 140973 - protein, 463 aa, Heterodera glycines
HQRTGAFGGANASPQQQVGGNRNHWSNDPAAGSPTATLLRLLPGKPLRLNRFQSAYRPKPEHPSPNFSKWLSPGSDGRCVQRAGTNSSFTDNNCNVRSQNSSFTDNNCNVRSQSRQIFTGFTLILPVARVQPRTSKGITDLLSRQIFTGFTLILPVARVQPRTSKGITDLLLLNFVRLNTENPSKKLCPQKQANYLVGRVSLVIGINQTNRHELRTAMHHHPPNHEKAINLFPVLSQIKPQAPLLHEKAINLFPVLSQIKPQAPLLNRKTFVSGKLNRKTFVSGKLPTRANKSRRIASWHRLRSELGRYLIAFELKTFLPKCFRCSPSCYGPRISPLTQYEWPRLSLLTIISVSKTNNRTEILFYYSIFLTAAIILCILRAGITAAAGTRLALSILVKGFKLYPFRPASEIGLVISRHYLLALRVAISQAPSPEISQAPSPESNPYPPLPVITMVVRYTTIES

SEQ ID NO: 140974 - protein, 93 aa, Heterodera glycines
MDTEQIPQRPRTVDTEEYVRTRIEQIAELLELWRYVLVPILFITFVLPLAFTFQILNLDMLIHVQKDNVTFTLDNNERTANDVRNKIKMRNFI

SEQ ID NO: 140975 - protein, 71 aa, Heterodera glycines
MPHPLTIFLNNQGQRVVENGVLEKTRIGRTTNATGPTLLCRRERDNAKGKVPKGKVPKGHATKANWQQMKI

SEQ ID NO: 140976 - protein, 127 aa, Heterodera glycines; identical to SEQ ID NO: 133730

SEQ ID NO: 140977 - protein, 30 aa, Heterodera glycines
NFHISSGRINQIAASERCQAPLLQPSCKDG

SEQ ID NO: 140978 - protein, 120 aa, Heterodera glycines
MVGWGWMKGPVNGPYYATYAQYFRRFFEEYAKQNLTFWALTIENEPGAGLLPFWSWQAMYLSATTQRQFAATLLGPELKKSVASKNVKIMAHDDQRSNVYEQAETFYGTPGGEQTIDGVA

SEQ ID NO: 140979 - protein, 53 aa, Heterodera glycines
MIGTPHYYMGRPIEMAKSSHRETCRLETENLSPETSQLENQDSTLTDQDQFAD

SEQ ID NO: 140980 - protein, 76 aa, Heterodera glycines
MGSDSHILPGTRVSKMDPGKDYYRTKSPVLTGFQGSARLFKTRTLVSDCKFFAERLSEMGPGQDPGLKVLYFDIAP

SEQ ID NO: 140981 - protein, 24 aa, Heterodera glycines
MEKACNIWRDYIDFSALELLELAS

SEQ ID NO: 140982 - protein, 338 aa, Heterodera glycines; identical to SEQ ID NO: 130842

SEQ ID NO: 140983 - protein, 62 aa, Heterodera glycines
MAILHQQTGEVNCESISLDNDGQSDGKATDPQQQKEFVEKCAKMEMDFKISTLELEKVGFHR

SEQ ID NO: 140984 - protein, 131 aa, Heterodera glycines
MSKRTTPKQNGSVMNMDLSNSLANKTDLTDLDLRMVDDPQHCLPSSSGASSSVPVNVQPPNHSEHSLISRARFDARAPAIDLRMRYKLNGLRYFQDIAVPFRAQSGKIQKFRAKTFAGAVPIRRSNMKKSH

SEQ ID NO: 140985 - protein, 110 aa, Heterodera glycines
MPCSFGLLALSTTPIARPVPREMPALPDRPAPPASRANAMAAGPKSPKKRSTNPASAALTTSSMACASPGATSKKSDPLAPRDRPALPDRTDRPENVNANTEDDAEDGPR

SEQ ID NO: 140986 - protein, 183 aa, Heterodera glycines
VPLFDFLALSHKQKETLLKLVVLSLSAIVSFLVRLFAVIRFESVIHEFDPYFNYRTTKYLTEHEFDPYFNYRTTKYLTEEGYYNFHNWFDAFAWYPLGRIIGFAWYPLGRIIGGTIYPGLMLTSMFIHRFLNLLNVTVDIRGTIYPGLMLTSMFIHRFLNLLNVTVDIREVCVFLAPLFSSFT

SEQ ID NO: 140987 - protein, 127 aa, Heterodera glycines
MRFGEAGELWGSFWGCQTFTCKDEHGKDIFRINGCAERKDRKCSKVYYTHCMKIGGLSYCSHCDDLVDGKVCNSFDQLINLDQSDDQLNSILKSNTNSTSKAEKLGPASAFTWISSNLLLIFGNGEK

SEQ ID NO: 140988 - protein, 121 aa, Heterodera glycines
MGRPKDGPTKLRISQIEIRSHPEESDLYELPAFLRFDWANYERWTVTDQQQNPFGGDYRFVYFGTKGRRKHFDQPQRDQRVQSPPFGPTAGASPDGSPCGDFGCARTDDGGRIREAMRSEK

SEQ ID NO: 140989 - protein, 19 aa, Heterodera glycines
MALKFALRQQKLPLALPSA

SEQ ID NO: 140990 - protein, 88 aa, Heterodera glycines
PHSSVLDCTDLLLTVDDCPGDFPFVASAHATIRYVCRGTATTLDKAICPPGGAILFWPFSSIGALRDDYFASIIELRLRSPGALLIPS

SEQ ID NO: 140991 - protein, 137 aa, Heterodera glycines
MVRRGGRSSSPKASAPVRSVKSTSPARSAVPSRPAGTQPTSGATAPQQKGPGLLGQMAATAGGVAIGSAMGHAIGNMFSGGNAQEVAAQQDVPANSDNFETTKQYSQPFLRTRAKVASPRDSTTSSIVEKLALAVRP

SEQ ID NO: 140992 - protein, 37 aa, Heterodera glycines
MGIEETIKMDRIEIVKDLAAYELTIGYSRILTSDDEL

SEQ ID NO: 140993 - protein, 72 aa, Heterodera glycines
MLKPFVFLFLILSSTKYICPNKHKDIRDYTDADIEKLYDQWEENDEDELPEDEKPPCQRKRPQIDLESLQQR

SEQ ID NO: 140994 - protein, 47 aa, Heterodera glycines
MTKSFLERDNFESELGATQQDDPFGEDFCDISSNEIIDVFADGDLAG

SEQ ID NO: 140995 - protein, 28 aa, Heterodera glycines
NSCGNIKARKYYARLCSLCTALGPTLYV

SEQ ID NO: 140996 - protein, 352 aa, Heterodera glycines
RENFFQKIFFNLKSPAKFSGIQKIFKGQKRYPEITTDEVNKFLEKQKTYTIHKPIRKRFLRLKTVPSGFHTDWQCDLCIFDQLKKHNDGYKYLLVCIDVLSRMIFSAPAKSKKSEDMIEAFDHVFEKSKIIPMKIYSDSGLEFQAGKIKNILRKNFIKNVMYSPDLHAGVVERANRTIKERLYRYFTKKDTLRWVDVIDKIITNINNSVNRTLGAKPSSINLKMPVRSGKNKFKIGDIVNKFKIGDIVRITKEKGKFSKGYLPNFTEELFKIVVANSTTPDSYRIEDLEGNLIKGIFYNQELVKTWMIFTLYYLRTHQGRRTLRQNSQFTPRDFGIGHKLVSSSLINYLPLL

SEQ ID NO: 140997 - protein, 28 aa, Heterodera glycines
MDKYSITNCTIFVLSYKFYTVFVSVTVE

SEQ ID NO: 140998 - protein, 127 aa, Heterodera glycines
LQYLTRLLLIQSHLSSNSYKSSCTTCVSSSHQQHYSTVTETKTVYPVKTYSWCTGTACGAQAQPVQPVAPAASGGGTSISTGSSCSSGTCGQQKQQVQPVAPVQPAAPASTSSCSGGSSCGATAQEV

SEQ ID NO: 140999 - protein, 68 aa, Heterodera glycines
MHAFCARAIYHRACQSKAKQQRCCFERIKGIESVYRLLEKFICNLSTILRSELEMINFTIQTSFRCSN

SEQ ID NO: 141000 - protein, 35 aa, Heterodera glycines
AFRAKKRNAKCETPKNANNAKGEMRKAKPRPIPAA

SEQ ID NO: 141001 - protein, 111 aa, Heterodera glycines
MMVYAVTLSEKYSVEELREYTGSENNLYTNARIDQFIQEVGNSISRCPGGQRVGFVHVTPVPDVEASVTPTPFELNATISISSAKAKDGNPKKQNKEDEVAKARDQVILSR

SEQ ID NO: 141002 - protein, 24 aa, Heterodera glycines
RTLSTAVRQRSSKIYSMPQILWAG

SEQ ID NO: 141003 - protein, 164 aa, Heterodera glycines
MTQSELKILYSLRQQAYQANIAAEHIAQKYDPSIFIINETWLNPRNTIENELSINGRYRVMLANRNEKKGGGSAILTKTNIPYQTLFSGTKFQSEILHIKLLFKKPIQIINIYRPPNCTVQNTKKLLKFISDQSDSENIIYCGDFNIPNILWDENKRNYGYISL

SEQ ID NO: 141004 - protein, 493 aa, Heterodera glycines
NILRKLPRRNSTSPDNVPYIIKNCAEPITKFLADIFRLILDSGQIPEIWRTSLVVPIYKGEKTDPLNYRPVSLTSTVCRVFERILSSKILEFLNSIVDKEQFGFLKNRSTTTQILKTMDDIYNSLQKNQQIDIIYIDFVKAFDSVPIDLLLQKIKKIGIEGKIQNFLTNFLKNRSFKVKIGEELPESFKIFSGVLQGSVLGPLLFLIFINDLPSFIANEASSVGIKMYTDDVKLYYAHENDDKTNHLDKAIEALEKWSKINGLEISTGKCFVLYLGKNNMKKDYLINSKKISESDNVRDLGIIIDSKLHFSGHINKIVRNAYLRVFQILRVLKTREIKTLTTAYKTFVRPQLEYATEVWNPNLKKDIDKIERVQKFFTRKAFRKCGFLYKKYKERLKITDLHKLEERRKINDLTTAFKIIKGFTSLEAEKSFFFSERPRRPLLLRDTAKTQNNFFNRIVKNWNNLPVVAVQINKAKEFSTKSNEFVGFSILPY

SEQ ID NO: 141005 - protein, 67 aa, Heterodera glycines
MHAFCARAIYHRACQSKAKQQRCCFKRIKGIESVNRLLEKYICNLSTILRKSVNRLLENIFAIYQQF

SEQ ID NO: 141006 - protein, 77 aa, Heterodera glycines
MPIYDMTPQHVGRGKTVAELIAEDQANSGQDLLAEIQHRPKQREEINQLLESQRSGPSNFGQQMDELWDASSDEDKS

SEQ ID NO: 141007 - protein, 22 aa, Heterodera glycines
PLYGTGANTLCVVNFMLILALF

SEQ ID NO: 141008 - protein, 95 aa, Heterodera glycines; identical to SEQ ID NO: 125597

SEQ ID NO: 141009 - protein, 137 aa, Heterodera glycines
MLRDDVGEAPKRRKNDKKRRGRKKNKKNDGTQNHQPLTTDDIFGTGAVNLPKTEHSQPAKELSEETILDEELPPAPADLPPFDAFPSPPPSSSKRRNTTIGTQLPQLPDYGKRNLIIIRDFLDAQSPNPRFWCRWRD

SEQ ID NO: 141010 - protein, 195 aa, Heterodera glycines
LVEDISDQYDDSEQPTIIHHEPATPTTMFDNYGPIEKIVVVGTGLMGSGIAQIAVESGVKVCLVGRSQEKCDQTRLKINTGVQKSIKKRMANETAEAQQQLVEATMESLELVTNLDEAGLSDADIVIEAVVENLKVKQKLFIELEAKVSEKCLLVTNTSSFLLEDVSCKMGAAKREQFGGLHFFNPVPAMKLVEV

SEQ ID NO: 141011 - protein, 201 aa, Heterodera glycines
MYFGFICAILAFSLYMGEGMPINPPPDENDCDFTTDLEVLAACKQRYINRRRGLNPDQNEPRIGSKLDKYKEQLKCVKTNDHKRKRKITDEDRQEKIELYKRLKSNPKQKNRRMLGHLSKLLNVEPSKQNAQTDQSFENESAGQSSSQPSTSDAHRSVSEEQSLSDDDQLVPDYSTAAAENSSKNLPKESTSEKRNGSESN

SEQ ID NO: 141012 - protein, 126 aa, Heterodera glycines
MKRRFAVVALVAYLLIGALTTTCEAAPYAKLSKPVAKDDQKEPGAIVKPSPENQASLNRIHSFSASSLPSQSPASPPHVQPKASFQRVDSISSASSSTANPTADNQIDTLPPKKRFSKLRITKTKE

SEQ ID NO: 141013 - protein, 62 aa, Heterodera glycines
MLSNSHCLSLLSLALFDNFSGGKPKKIFNENYILLFIGFIEFFCDEVNLLEGREKLNIVNKN

SEQ ID NO: 141014 - protein, 85 aa, Heterodera glycines
MGKKGPSFFRKIRQNQAKMGESGKTGASQWQRTHELTTAAADAVEALAEHLRDYNVAVSILLVTIAAGLAEMNNHYKGNFKGNRK

SEQ ID NO: 141015 - protein, 33 aa, Heterodera glycines
MGVNGSVTEFANKIRELVEQASPDPHYTDEARE

SEQ ID NO: 141016 - protein, 155 aa, Heterodera glycines
MGAETYSNWKQCHQGNGNCQFPWKIIANFAKTVAKENHRIQTDQHLAFASASSPANFIIYISFASSFAASVVPFELTNEKTREQLALKRANDSDHFLLIRCPIAREASKWTKWEEEAIGWEIHDQWNRISIQVYHKEEIGDGLLDEIPGPSDQQK

SEQ ID NO: 141017 - protein, 51 aa, Heterodera glycines
LADEAFGYLKRVIVTPAVYPRLIKFPWLNIQSTGQKSDTVNVHKDHPSPLF

SEQ ID NO: 141018 - protein, 474 aa, Heterodera glycines
YRSRKSLGAARCVLRHLNVAVYAAGYVLAEGNKERRQVIRRQSAEWLLRQKSEINNIRRHIGWITDELTRRRTGKNPTSRQLSNFAWLQRRYQVLGKPGETRDLEVQRERLVSRLRLAQDRVNSSMDREERARKRMLPLRRKLEEPLGDSKLDPKQARTFWASLIGERKEFGKIPELENWAEEVRSKVTDGQGFASDHVDQTVWKKIRKARPLKAPGPDGIPNLLWKRLPSANQALFKWLMGIKRKQLSVPSWLTKGRVVLLPKGGDPVDPANYRPIACLNTQYTGMVTAWVSEHLTTYSILPIEQRAMVSGTWGCTHAMVIDRAITSYAEATGLLYVGFVDFAKAFDSVSQPWIRYALKVAGVHKRIRCLIGILMKCWSVRYEVFKSGRVLRSALLAVKNGVLQGDTLSPLLFCLSVAVVSSAVGSLFDFEVTIPGRGVMQQQNHVYMDDGFASEASLTDVVTLERTASALEN

SEQ ID NO: 141019 - protein, 91 aa, Heterodera glycines
FIATTGKRDQYDQLLRSSRSIPVCWTNGAAPSSQTEGLPPPFARQTAHQRPAQWFRPLWQCHRFRPLFAFCRRPPYLEVKVLLRRQSCYYL

SEQ ID NO: 141020 - protein, 136 aa, Heterodera glycines
SFSRTKRFNLYVPDGYAYYWRDLQEEQRFSGTRWWMISDSVCRTYGFGKTPLVFIDGGTTPKATKKFWKMSCCRTWARFPAIHFTFQQNNASIHVSRNTTSGSSPLNPVILQFIRSKMYQLLYFSPPIMDLNYFVE

SEQ ID NO: 141021 - protein, 60 aa, Heterodera glycines
FCKQSETSVGMRNYIEHSLTKFATENPYCAIYVVPGRNATPVLRAEYSNGRLVHVNAKAF

SEQ ID NO: 141022 - protein, 82 aa, Heterodera glycines
MSEQKPSQNVGKTESIGQKDTMDGKQQKAQQKNTLEDIGTTALESEPTSEELKNFAKMFKQRRVQLGFTQAEVGQQLIFVPI

SEQ ID NO: 141023 - protein, 1548 aa, Heterodera glycines
VAQLVQPILVNASHQQLAEPFCADGTHNIQFLIGCVAALGQPLPPLCLIVVSVDHRPAQQTPAGPLAVTNCVLRTGDGHRVEASGWQAHAGSLAALCVGSAYWFTNCVSRAKYQRLDCWFRIGVGGPNALVVPHVAPEFPANIAPVVPVQVGAGRDAVRALPNVTNAGDEQREDADLDNNNNNNDNHGLEPRPSRCASRTAGARPTQRRAAEPAERSIDECFVIERSTAMRNVPRNTRGEICELRFLPLEEAQRPDLLMETIIQQLLDRVLAGHPRPSMVGLQLHPPGFDRPYVIGLRPPEQHNAAALAAAIERLNEQSAAGIDLLAGTTVTKVLAVWPLDSIRADPQRGGESLVRIHNPNDRLCLARAVVMGMHDRETRMAGGGGKAAFNLFASRQDQHGPAAAQMLTRAGIAANSDMYTLDDVQRLQQWINNEHGVGQIRLVVLEKEQEYRIVFKGEGLAAKFNLCLVLERGHFNYIGRVEQLFDVPNYCIDCERRADARYHAFGCKVVCRLCLRYGPGYPCQTEQLPNGGSSARKCADCQFVFPNDGCYNFHLANNPPAPMDGRGQRQRQPICQWRRVCRACGRIAYVATHQCPRDQPADDGICRRCNGPHTVDEPCYIQPIDDGSVRQRASIAVDNDDSDDDDDDDEELPLRLCFFDAETSQDTPLQLNNRTVQKHVPLLIVAEVICERCLQAGISVSDGLGRRAPGCVCMTGMVRGQLFRQWSSPPFANAPGDNSASPVGAPAFNQRRFFFHSFDNDGNDPVDQFLDFLLHHGPKKAHTVCIAHNGGKYDFHLVLEALHRRNRPPKHLCTTGLKIYSMRLSGRHQRRVTFKDSINYFFCALDALVKSFQVPDHLATLKPFFPYLYIRRQHLSQRLINLPSQEFYAPDTMKAEKRAQFLRWRWHADNNGNGFQLREQLIMYCVNDVAILRESVIRFRQLIADNTQGLDPFLHASTAAGLALATFRRCFLPANRLVHSPEGGYLRGRRASAESQRYIRFFELEHPEAQVQCASWSVGEAHIEDSGYRVDGLWRREAPLRPLAIEWLGCYYHGCPACFPDRQQQLAAGRTAEDLYERTERRLFELENDHGCEIHKVWACQWTERLRHDPNLKRRYDAVFVPCPLDPRNDALRGGRTEPFKLHHVCSDDEEIMCIDIVSLYPYVMKANRFPVGNPRVLTREVLLRPPTVPLPWNAPENNIFRGLLLARVLAPRNIRVPLLGYRTKDGRFTFPLCAWCADRRQQRPCRHEDDKRSWVTAYTHVELNKALQLGYVVTDLFEATGWPEGCVTDEQQKAFVDDFERTEGIRLDSTKMEFNPGLRLIAKTLANSLWGKLAQRVGQTEICYTRTPAEFHALLDDPTVDKLDFVHVSDHMDRCVVRKRPEFAKAPLTNCLPVAAFVTSYGRLHLYDYMEQVSAIVGAELLYCDTDSIYYVNKMGGPCVAEGEALGQMKREHTDRRIVEFVAGGPKNYGIRHTARDGTDERANLKIRSFRLSYTAQQLLTFEAMKNLTLATYNIDGPIDDALDNDDLYVYGGGEHRAIRVNFPQN

SEQ ID NO: 141024 - protein, 231 aa, Heterodera glycines
MKFRLLYLPILFFVIEINQIKIENKKLPQKSFDEIFGEKWEEKEGKQRNEKNKREIIEKYYKIKEKIKEKGRKYSEKEWRKIEVKIAKKLGTNRTYIQKWNKEFGLQKKKSYKSKTDEEKRQIIQKFIKMKNEFKQKRKYSRKEWQQNYEEICKKIGVNRGTIKKWKKQFGISCKITEKEKMEKMKKYWKIKRENPKMSDKETAKILQIDRTTISKWKKQFGGEILEDLNG

SEQ ID NO: 141025 - protein, 134 aa, Heterodera glycines
MDQQQKIKTKRNKFKLEHDGALYVFDQLSADGLKKFWRWRLHTDLNNVVQKLVGVHSCDMNAAHVECQRLVTGLKRRAAETCEASATIRAQVLQNTCTPVLAAFPSKYATKKVIKRLRRDENAPRVEPLNLEQL

SEQ ID NO: 141026 - protein, 44 aa, Heterodera glycines
EIGEIAGATEVTVRQTYRLLLPKALELFPPDFRFETPIDQLPTS

SEQ ID NO: 141027 - protein, 65 aa, Heterodera glycines
TKLRLFKLYNMDQQQKIKTKRNKFKLEHDGALYVFDQLSADGLKKFWRCEFHGPSDKKILIIFSV

SEQ ID NO: 141028 - protein, 109 aa, Heterodera glycines
MSQNRDENSQPPVPDGPYPLAQERNEFVEDEAPVLLEMLDRLSQGGICQAMGLFSFALADCLATFHTFAILFDCETPVPFDEQHKRYVFEHRDKPRLIYVSEDGSVIQA

SEQ ID NO: 141029 - protein, 96 aa, Heterodera glycines
MWAMEHQGDMEMEIGGNVENQRGWLSQDELVMRSSSDELDKLSTCLSEASSETQERRRPSLISDIVQAQLALWTLVLTVFYSYAWQQHRKKFLLSL

SEQ ID NO: 141030 - protein, 81 aa, Heterodera glycines
MSNTKAAGQSAAGASEIADQVEQKHNAMKSTYDKVLALLEEKEGGNEERKQRAEELRKRTTELLAKIKRSREEKICELFFY

SEQ ID NO: 141031 - protein, 60 aa, Heterodera glycines
QLLDLNFLTLTYINKGGGGVDKKFFGLIILLIDGCAFAKNIGQMARNLKKSIRLRIYLQA

SEQ ID NO: 141032 - protein, 261 aa, Heterodera glycines
MEENFGQPSVRSRMLAQGRALRERVGREGNQNQILAEKAFRFEFERQSAHSSSDEKSLGRSGYEGRAEQEQTLVEGLKAELLRVKDERDVAEAKVEILLQKLSDKEQIFNFLKTNNVKLLVEREQIRCEFLSMEDELKTVKEKLEMAEQENGHFSILSVQQNLMAQEQSRKIMALMEEVEEMKAKNSGEQEEFLKNSENRIAEPKKSVSKLPLKLNIVKKRNPKIAKPKKISQKPEAGKCNFLPLNSIIFRKPPPQFKPNY

SEQ ID NO: 141033 - protein, 195 aa, Heterodera glycines
MDNNSADPVTKQLLQICVALLQQVQNQQAVISEQDHQLQHFRQQKMMEEAIQDHERRRSVVVQGLPEPAGDKPSERVAADRSELSHVLDELGVECPISSYRMGPPYQAGSGHRPRLIKIILPASKFQRQLLAEWNKKRAHIKQSGKWQHLNIRPSLSPAELEERRAMQKECTERRKAEPNADWIIYAGNIVKRSE

SEQ ID NO: 141034 - protein, 119 aa, Heterodera glycines
MGRRTLSKHDKFERNVTFFLAVLGLSIALFIYVSAKIDTVASDMSDEIITLHALQSKFNEHYNEMLKYYNSRILAAQSDFNSRYDRLQSEFIQIQSEFWKKSNKFTERIVNLELEFKRY

SEQ ID NO: 141035 - protein, 214 aa, Heterodera glycines
MEDGLPLPMPPSKAKVAARQKAKTSSTTTAAKVVATQNACCSSSSSTAANPPPPSIRIPKGKTPKKVRPRRPEPDQPDDQYELRAVLATAEVVSGGTTHLCLYVDFLDYQGQEDWCLSTKSDALELTHFHDIDSTMDSTLHAIVGRPVAPFLQQRLNARPLFHQLRQQQQNGPQVVEQQLPFVFSSSVDVTPAQRAKANALFEAFKVREGLNEE

SEQ ID NO: 141036 - protein, 82 aa, Heterodera glycines
AFPRVGPPFNAYFGAVKSGRQAFLRVGPPIVFCISFLYLSLSLSLTHISSFLCFDKPDQKYLKIQANALFEAFKVREGLNEE

SEQ ID NO: 141037 - protein, 86 aa, Heterodera glycines
MPKQNEIVLKYSFLDLTWFLDIEAVFYAISKTKKCLVVKTIFHISLHNFVSSARIETGIRPLERAARALQEEKMPCGENNISHFTP

SEQ ID NO: 141038 - protein, 102 aa, Heterodera glycines
MSRVTQMDCIRVYAPFSQSGSGTHIENVVYLELLDLETQQPRTPNRGLMDVDNDPDAAIPDVGPRVPDVDNDPDVERDNGNAAGANDQEPNDFDSSFDDFFD

SEQ ID NO: 141039 - protein, 58 aa, Heterodera glycines
SKPRKNGVSKNRNYAQKAFQTILALPIPYTIAFIHPIMSAKIIRVPKIACDLSLEKMV

SEQ ID NO: 141040 - protein, 30 aa, Heterodera glycines
MLYLDVKEKSYRGKRAGAETRAPKRKIFVF

SEQ ID NO: 141041 - protein, 41 aa, Heterodera glycines
MCRNRTWQQKRDSKQRKEERLNAARAQIDADVYNGKFFFRR

SEQ ID NO: 141042 - protein, 45 aa, Heterodera glycines; identical to SEQ ID NO: 124527

SEQ ID NO: 141043 - protein, 117 aa, Heterodera glycines
WEKKDEANGSKKRQSKTQRDEKTTGKRPMEEKGTKKDGERERADEGQRRTERRRDNTLNNPEYRNGECFKIESHSLPSSNVSKPNQPPHFASSSLLKPVPMSKSSSNSLHVGIASTQ

SEQ ID NO: 141044 - protein, 56 aa, Heterodera glycines
FINIFSQTALKRTKFYLQVILGTQMLSLSKREMNKNLKIFNCFLNMRKILGLTFFL

SEQ ID NO: 141045 - protein, 207 aa, Heterodera glycines
MSSFYINEPVTNGKVVGNTIFNLLKLNEYEVDKNERPIYPHKITSAKVLVNPFDDINPRKATKDDERKRSKREKNATNVAMAATKRNTSLLSFGDEIEEEDEQSEHLTKKFKGKSAHDVLEDELLSRERAVKAEELTTSGDQREAEEADERSREERLDRVKRKLQDQREGKRAKRAAGGKGTTRGDEEEDLEQLVDDEKEAQRREEM

SEQ ID NO: 141046 - protein, 281 aa, Heterodera glycines
FSRRRLSAPPDPPPLARSPNKKFVKNLIFDVLSGDSVVLQLPPSVQGAAPTELTVYLANVSAPRLAKRPTENTEATPDEPYAWEAREFLRKKIVGQAVLFMREFQATSGREHGKILLGSSGTSDAENVSESGVSAGWLEVRPGKQSDAENVSESGVSAGWLEVRPGKQIDDYGKKLLDLQEQAKSAKKGRWSEEEIDDYGKKLLDLQEQAKSAKKGRWSEEESAKHIRNIQWTIEEPRELVALYSGKQLDAVVEQVRDGTTFRLFLLPSFEYITVALSGIK

SEQ ID NO: 141047 - protein, 48 aa, Heterodera glycines
VFEAVPLNRCAQIYGETESFRNSFPIACTLILRWIFAPHNCLSTPNGH

SEQ ID NO: 141048 - protein, 36 aa, Heterodera glycines
FFEKKNLKNFRLFIKNFGSRNSYPKNVGNRKSFRAI

SEQ ID NO: 141049 - protein, 190 aa, Heterodera glycines
TFKSNFVVDTKGAGAGQLTVRVRGPKGAAGAGQLTVRVRGPKGAFNVEMQRDSAQERTIHCKYYEPREPGDYQVEVKWHGHHVPGSPFFVLIVDTEQELQRFLAGGVPSPTPPSPFGGVPSPTPPSPFVPPGWMAPPPPPPGVLPLPPIMPSPPSHEANANVAAPSHEANANVAAPVAGTPTAIYGGRHH

SEQ ID NO: 141050 - protein, 15 aa, Heterodera glycines
LKAIHCLPVLGTAKH

SEQ ID NO: 141051 - protein, 147 aa, Heterodera glycines
AWPFLVRGAICLVYSDNERDSSLLNSWLIASGHNFLEGFSVFSRTKLSNNRSVMPLDVRGCTRATLAKSACLPSPKGVGKPVKICRDWDRTLQLLSVNEEFLVGASHQLALNTSLPFVHTARRCPGLSHFEKFGDGCSGRSVCRLEP

SEQ ID NO: 141052 - protein, 46 aa, Heterodera glycines
MPSMLMDDEHLLSAWTARASHWTSFAITMKKLGRKSGLYSSSTLTS

SEQ ID NO: 141053 - protein, 98 aa, Heterodera glycines
GVNYKVGKFPFVANSRAKTNNDVEGFVKVIGDKDTDRLLGVHIMGPNAGEMIAEATLALEYGASCEDIARVCHPHPTLSEAFREANLAAYCGKAINSI

SEQ ID NO: 141054 - protein, 45 aa, Heterodera glycines
AVLVRFITAPNLLASQQSSLTCQIGRVRMIPQCQAPHQKQNDITK

SEQ ID NO: 141055 - protein, 44 aa, Heterodera glycines
MASDGQAMAKWLFTPRMDDVPKVLRCWLNKDDGDLASKIEAFKA

SEQ ID NO: 141056 - protein, 57 aa, Heterodera glycines
MAQSPAAPAAAAAASTASAILSAKAAAAAAVDDELGSSGGSGSQTLVEAIQPSPQRE

SEQ ID NO: 141057 - protein, 179 aa, Heterodera glycines
MPRPISNKIINIGGLVEMKAKELEPEIKAVVDNSQAGAVIISFGTMVDIKTMKSEMKLAFFEAFARFPDYEFIWKIELSEEEAKMFAKYKNVHPVKWMDQKSLLMHPKMRAFVSHCGLNSVSEAARFGVPILAIPLFADQLYNAILARVKGIAIQLDVGQLNGEGAEQLIIEGLDRAIT

SEQ ID NO: 141058 - protein, 16 aa, Heterodera glycines
MISIGQIDKAYWNLRK

SEQ ID NO: 141059 - protein, 156 aa, Heterodera glycines
MDNVDLLNPSFMPLSKMSHSFLTKFLLRALNAYQKNIKQKMNFVLPLSVICCFFALPWICYGTHCKVGIYETSGYAAIVASECAADQQFCSAIGCALGTEHIVILWACEQQNDTQVIVSRLSFGTYNHTCLAQIGQKGANMSNEEFAFPELNDYIK

SEQ ID NO: 141060 - protein, 64 aa, Heterodera glycines
MANEHVKLPEAQEPDKIPTLPAVALNKSIQCRTGFFRGNGYGKTEVKECVGGEYCYAVSCQIGD

SEQ ID NO: 141061 - protein, 65 aa, Heterodera glycines
MAMIAPFDLLPPIALLVLIAMINQCSPLTCKIGHANHKMGEKSANGKCEDKVPNAQHCFSVLCME

SEQ ID NO: 141062 - protein, 115 aa, Heterodera glycines
MPGKFNFHLPTEKKLLKMEIYYQISPKQMKLRSEFFAESKLGPFLEEFAGLWLLAADIWPKFGQMPTKFVFMVANGCQLIRVDGPPQKCATFYHLAFEKPRAIRQQIIKPLVGIN

SEQ ID NO: 141063 - protein, 101 aa, Heterodera glycines
MPWTVYFMASLTEYSEYGRRCTASLISPKFVLLAAHCFDKMKEFQPFLLGFGSNSRVFKSPNYDGFVVKMTRVTNLNVFIHPKYTKNGLGLNDLALIKALN

SEQ ID NO: 141064 - protein, 15 aa, Heterodera glycines
MNFEIQLQMLDTLQH

SEQ ID NO: 141065 - protein, 98 aa, Heterodera glycines
AQQCLRSVNWVRRLVNMIDADRLVHAEAHEFGGIQLPARKLEAFRLVRELLAVVTAHPNLPQNIQQTVGLPISANNRSSVPVCIKIGSSDHDPYYKGK

SEQ ID NO: 141066 - protein, 182 aa, Heterodera glycines
QKNQIIPPPPLPSANSLPSSQLHMCVIFNKSTMYRYTMYRYAVRHWSKPAHSYLVNNAGQTPLTLATKLGRREIFDEMLELMKVEFWRFSDMTCSAYPLEALDTIRMKVEFWRFSDMTCSAYPLEALDTIRLDGTTNFDSALTTVVNGDSSDHLFDSALTTVVNGDSSDHLEMIGNEVIQRA

SEQ ID NO: 141067 - protein, 44 aa, Heterodera glycines
MSSEQNGNDKQIENGEQQNRRRRRDGEGMRKGQMKQKTSTKLYL

SEQ ID NO: 141068 - protein, 37 aa, Heterodera glycines
MGRPFLEHMGGRKYYSCRRCKTYLTNRRELISHTFRG

SEQ ID NO: 141069 - protein, 28 aa, Heterodera glycines
DKLMGLRSSSGEEQFSTIPARFYEVLIY

SEQ ID NO: 141070 - protein, 95 aa, Heterodera glycines; identical to SEQ ID NO: 124528

SEQ ID NO: 141071 - protein, 98 aa, Heterodera glycines
MPIQCLSEHLFWKETNEKHTQFPSVQAATLDTSAKGPVESERPRPPNWEENPVPGRTPRFSWMAPRIFEKAYQISYRGLLPRQPNMQMFRPFKAVDTV

SEQ ID NO: 141072 - protein, 78 aa, Heterodera glycines
MNCAAELVIKPDQIGQLQRLPTVAISKTTKIPKSNLTERHRRRLDEEGFNTGVCTFPPSPSSQLVPDTIPITTVGTKN

SEQ ID NO: 141073 - protein, 98 aa, Heterodera glycines
RPLPSPLSFLHHFPFALIFSSFHPSITPRSLLRSILTVFPICLLDGHSRLTFSRDKRIIHNFTLNEPNFQILKSFVALNFSIILQNFKNSLSFKKVII

SEQ ID NO: 141074 - protein, 69 aa, Heterodera glycines
MIPGFSNWDAECEGSFAIEPIDGAELRGQCLAKIAKYQTKRKALDKAVGQNFFVGIQTKLWHSDGPSRN

SEQ ID NO: 141075 - protein, 76 aa, Heterodera glycines
VIGSWNLRNAPQKRFPFIELNGERISDSQIILWRLSDYFKIEVIARIIVVTSISYSKDGLDNEQRAKARAIERLIE

SEQ ID NO: 141076 - protein, 41 aa, Heterodera glycines
GEVPGSERLHVRRCNNDRRMDGRNLKSERPVRRCKDKEDVS

SEQ ID NO: 141077 - protein, 237 aa, Heterodera glycines
MGRVKEVVPEEAADFFDQLTGRDKQVLREVLAKADTYQSTGEVLQDLRNGSSTLYDKAVQSVKQLRNALGGGFSLSNLKAQAQQLVARYRQLDASTKEELRNAFPTIAFVLDNPVVQTMASGLFDIKTKDEGPMGERGRERNGEGERGEEGDRDNGGMTRGGGRGEDGGGRGGEVEDEVGERAERRNVVHRRKNRSAVSVASMAALAATSAALVTTNGAMSTMINQQRRSNLGRRDG

SEQ ID NO: 141078 - protein, 18 aa, Heterodera glycines
MGGSKNMPEDYKLEPIDE

SEQ ID NO: 141079 - protein, 85 aa, Heterodera glycines
MHAIRHVIFPTACLLPLRQKQKEHEVIRLVVTLSENGQMPAIGTEFQKKHGLPLASFIVTEAKMATKNTLAKLANAFVEGKNYSK

SEQ ID NO: 141080 - protein, 79 aa, Heterodera glycines
MPWITAISRKIFEAEMEKKDEGKKEDEMAKEKSNKLKKNMSKLEEILGKQRAEKGKKEQRKERRKVMREIAKPRPKRDE

SEQ ID NO: 141081 - protein, 43 aa, Heterodera glycines
MNIVFNVTPTPIPHTHKDVLNLFRKYLSIPSFLPTLCCVQLYK

SEQ ID NO: 141082 - protein, 39 aa, Heterodera glycines
MVPKQGIRASPDKVEAIQKMPTPENLKELHSFLGMVGYY

SEQ ID NO: 141083 - protein, 232 aa, Heterodera glycines
MKADSSRVMEYIQKLDNYDAPDIANIAITDKLYEEAFAIFRKFGVNASAIKVLIENVKNLDRAYEFAEKVNEPAVWSALAKAQLNESLVKEAVDSFVKADDPSAFIEVAKKCNETDHWEDLVRYLQMARKKSRESFIETELCFAYAKTGRLTELEEFITEPNHAQIQLVGDRCAEDGMNDAARILFSSISNFAKLAKTLVELGDFPGAVDAGRKANSTKTWKQVTYELCLLS

SEQ ID NO: 141084 - protein, 237 aa, Heterodera glycines
MLFLLFIFVFLIINNSTDKTLSVNLCKKCRPTFAEIFGEEWQNEIIIGGDENENETDQNANFHQNESTYQNDQLDFQQKKEIIHKFHAIREGIKKRGKYSAKVWVKTEQKIAKKLGISRQKIYKWKKEFGQYLKNNKNYYEKKKKEFIERIDEIKRMSKKGTQKQFAKELGIDEKTLRKWKKEFGIEIGKRYSNEEKMSKMNDYLKMKKANPSLSDKEIAEFLKITQRTLLTWKQKF

SEQ ID NO: 141085 - protein, 954 aa, Heterodera glycines
KPKWHKTQKGGRPNNKQGQSSSAPAQQCWRCGWTNHSHWECKHKSAKCQKCSQNGHLEGQCDKVQEWRRRNKLPIPKRKIGNLRIGTAMKVNSASLFKTDVAVDGKDIKFVLDSGAEIIVIDELSHEVIGSPRLRKCTESGCMFDGTQVKFVGKGVANFKFRNICIKSEYYVAKRGSLNLLSVQMMDAFGLLNELKAKIDAPVNLCRVGDETRGFTKAPKPSQNSTVKAHIDHLKATFPDIFKNELGRCMKFKAHLTLKADAAPVYRKARPVPYNAQEAIDGELERWEKMGVIGKVEYTEWAAPILAVKKADGSARLCIDYSTGLNNALQDHQHPLPLPEDIFATLNGGKYFSQIDLRDAYLQIELDDESRKICSISTHRGNYEVKRLPFGVKSAPAIFQSVMDQILAEFEFATAYLDDVIIVSQSVKEHADHLKKVLEKFQEWGFRIKLEKCSFFREEIKYLGQIIDRNGRRPDPEKISAISKMPAPTDVPSLRSYLGMVGHWQQFVKNMRFVRKPLDDLLKQDSEWKWSEKCKQAFDKIKEILSSELLLTHYDPTKEIVVAADASELGIGAVISHKFPDGTIKAIAHASSALTPAEKNYSQIEKEGLALIFAVQKFHKMIYGRKFTLLTDHSHFLPFSEAKRDIEYISTNDFGQADVLSRLIAKGKSDEDRVIASLRSDSEIDDILIGSIEALPIKFKEIVAAAEADKTIQKVKEFLTNGWPRNVRDESAEIKLFHRIKEQLCITRNCLMYADRVVIPEKLRQKTLHSFHKGHPGIKRMKQLARNYAYWPNMDADIQQMVENCQPCQMEAKAPVKSNLQPWPKPSAPWQRVHIDYAGPFFGKEYLIIVDAFSKYPEVFEMATKSTAATIEKLRYLFSRHGIPEILVSDNGTQFTSNEFAKFMAVNGVNHLFSAPYNPMSNGQAERFVDTCKRTFKKLKGEGAPSKEIIETFL

SEQ ID NO: 141086 - protein, 181 aa, Heterodera glycines
MQLSQSGTKPKREEGQTTSKANYHPLRHNNVGDVVGQITATGSVSTSQRSAKNVPKWTFGRPMRQSAGMETEKQFANSKKENWKLKFTFENRCKCTESGCMFDGTQHLKTTFPDIFKNELGRCMKFKAHLTLKADAAPVYRKARPVPYNAQEAIDGELERWEKMGVIGKVEYTEWAAPILA

SEQ ID NO: 141087 - protein, 107 aa, Heterodera glycines
MAQANIQQLLDAISQLVTAQQQQQNNQPNPNNNVPVPVLPDISDFEPTDEKGRISEWIERFSFAMDCSAPNATDAVKVKALMNKLSETAFSEYSKSCLPSKVTDFDE

SEQ ID NO: 141088 - protein, 71 aa, Heterodera glycines
MGEISAQSPAKGEESELEINDTTQQELDIEDAARFIATFAELSDGFCVRLGLGAGENMPSGGFCAIAETWY

SEQ ID NO: 141089 - protein, 26 aa, Heterodera glycines
MFEFVRSSWVKDKVKQKKLIEDKKKL

SEQ ID NO: 141090 - protein, 50 aa, Heterodera glycines
MSKPNKCCLTVVVVVVVGVVVVVGVVVVVGVVVVVVVEVVVVVVVVGVVV

SEQ ID NO: 141091 - protein, 68 aa, Heterodera glycines; identical to SEQ ID NO: 134199

SEQ ID NO: 141092 - protein, 117 aa, Heterodera glycines
KRSSNNPNLCPTSNSMSDIYGFINNISDRISRRVRRKRPTESGVSGVSGAPPETRKDDKAKGGGCSKKCACIIVCSILTLIVLVIGGLVLAAVLTPETFKNAPLLSLIAGKKNGGAD

SEQ ID NO: 141093 - protein, 247 aa, Heterodera glycines
CFDGQRAAENICGGEGVRAKLIQHCKLLLQAKQEELCGRVLMTLCKMASTARTRQYGEGSSIRRDLLLRYFGAGSVQGNGNEREKPRKVIILQPVRISDQLIWPFEISEISLYEIQCKLCDAKAVDLVVDLIVLDPSYDIFLKTVQLAKAMLHGGNEKVQMSFYKRLQERKLVQMSFYKRLQERKLSARFFKVLVQKMQTAQNRVKTDILCGLARTRPALSAVVSRRCTTMSVPLIQQGATGGGGED

SEQ ID NO: 141094 - protein, 341 aa, Heterodera glycines
LLLAIMESRHDSENADRVLRNMAHINGGGKQLLKAIAQAYCMPNTQNFELFRMRQKLLCNEQSGREKKSGTFWRTIATKVPFVGPKFAEKPEQSGREKKSGTFWRTIATKVPFVGPKFAEKPQQQNQQQIASPLSKPTNLAFGTLADPREVGHNIYILAHQLARHSAVGHNIYILAHQLARHSAELDVMLPENAKDENTREALAYYRTHTGQIEIVRADRKMERVIFPIHNICAYLTSETKESVFINTEKDAQGSKVTDFFERWPSLYEEMKWQRKLQDRLWLSACTKRRLWLSACTKRLPLWGRMGFFMAVLINLILAVAYPDHEDSSAARPRMFSRYAP

SEQ ID NO: 141095 - protein, 195 aa, Heterodera glycines
MVSSTLLLIALLGLLPSLYLLGIFQLFDVVASEDTLRNVIRSVTRNWQSIILTGLLALILVYHFSIVGYLFFQRGALQNLPIEFLQFIPSDFRLEVHKLSAQRAEEGQKPCPNDLPCEFRFHCDKKSDGEKCDGREKWRRTAEKEKEEEEEEEELKIPSCDTLLMCILTTLNWGDHLGGGKTHSLNGRKFIQMSI

SEQ ID NO: 141096 - protein, 24 aa, Heterodera glycines
ITGVSIIAVLFLVFLMLSQNLVRF

SEQ ID NO: 141097 - protein, 104 aa, Heterodera glycines
MMSHFEMIGTDNQMFPQNVRLNPGLALCSSAPFGGHIGTSLPSAVTVSPAAVASVGGGELQQFAIPRISQQSQAQPVQGLQFALGQSAIFGGESARDGGGQQTQ

SEQ ID NO: 141098 - protein, 206 aa, Heterodera glycines
MSSLLSEVFLNELIIVMVGICILVLSALCLVVNLAVIRPLGAIATPSYVFYTIVTIILAINRLVVLTSDRLDNLLFSPICIKLWFLLPALVSLSFALALSSPWAAIAYWPDQFSWAYDDSRPLSHWVQIVEEIIELGGIPTAGLIYAAIFFTILYKWLLPNTKMAKCALNFMWIANGAVNPIIYFAVNASKMPWFRHSARQGRRRQ

SEQ ID NO: 141099 - protein, 63 aa, Heterodera glycines
MSSFVSLLLLIGLIPLHLTHGNNRIRRDATEEEAENKSAANNSTEEETSKMQHLINLIIHLIF

SEQ ID NO: 141100 - protein, 110 aa, Heterodera glycines
MCSTERYTTAPTYGSTPKAWLVRQLPRNVGQRPQQQVHLQLPCYDFCPVQATAIKSVPVCIPTEAGTLTVPEFLEMAQSRAATGGVYKGQGRIQSELMTRPYKEFLVHGQ

SEQ ID NO: 141101 - protein, 153 aa, Heterodera glycines
IDGRAPPGVFLVRGAICLVYSDNERDSSLLNSWLIASGHNFLEGFSVFSRTKLSNNRSVMPLDVRGCTRATLAKSACLPSPKGVGKPVKICRDWDRTLQLLSVNEEFLVGASHQLALNTSLPFVHTARRCPGLSHFEKFGDGCSGRSVCRLEP

SEQ ID NO: 141102 - protein, 130 aa, Heterodera glycines
ESEWVVTRERYKYDEQFNLLQPIDGKISGRVAKEHMLKSKLPNSVLGKRVAKEHMLKSKLPNSVLGKIWKLSDVDKDGHLDSDEFALSNYLINLKLEGHELPTELPKHLVPPSKKAMAGDASSSDNQIYP

SEQ ID NO: 141103 - protein, 34 aa, Heterodera glycines
MPSNFIKYQSFLSGNKNEVLTIKELIDCRLKACW

SEQ ID NO: 141104 - protein, 113 aa, Heterodera glycines
MSHENAGNSVLEFVSAGSKQYSIKYRNDKNGQIWYKTKIRGITFNKKNQIDHDEFKNMIINYENNKKLIFDYDKFGPTRESYILSRNLRKEYKPIQKKGIIGNNFEIIPFGLW

SEQ ID NO: 141105 - protein, 48 aa, Heterodera glycines
MCRLRWWPNFLSIPALQLWPLKAAMWTREMPTLCSTNAQIQSLPNEMK

SEQ ID NO: 141106 - protein, 130 aa, Heterodera glycines
MDEKPALIDSKLFSYESFVVVAENPIVSEAVTHKRAVMARVQVAVMSLRKRKRGRMINDVIQIATDQNHSTHHNCNAGIERKLGHQRSRHIGRKVFAQAEVVQRERNGHVLFDVLALKWFIDEALEANDL

SEQ ID NO: 141107 - protein, 87 aa, Heterodera glycines
MLKKVRYMPPTDYEWVPPNGQQQLALTDGSAVAMDHLQWETIRERVIKAGTVPRLVDSLIDEDGHMDLKQVFWKCGGMLRVYTKHWP

SEQ ID NO: 141108 - protein, 276 aa, Heterodera glycines
EKEREKERDFRIWENYEKEREKERDFRREKERDFRIWENYEKEQKERDFRFWEIEKEREKERDFRIWENYEKEREKERDFRIWENYEKEREKERDFGFWENYEKEREKERDFRFWEIIREREKEREKERDLEWEKEREKERDFRIWENYEKEREKERDFRFWEIIREREKEREKERDLEREKEREKERDFIWESYEKEREKERDFRFWEKREREKEREKEREKEKEKKNEKEKEKKKERKRQRKKEREREMERERERENEKEKEKKERERERERES

SEQ ID NO: 141109 - protein, 45 aa, Heterodera glycines
MLASPGAQTQILLWGERHFFCTYATGGSDGQHVAKANADKKWGNF

SEQ ID NO: 141110 - protein, 74 aa, Heterodera glycines
MVSAKLPSIGRYSFAITGYDLNQPTKTTKATTTGTVTKVISKTNIQFSPTTLKATNKCEFLCTKYCFLQTNSLS

SEQ ID NO: 141111 - protein, 111 aa, Heterodera glycines
MDSDVLGLVGPCLLMESAQGVADFVGDYADQITAGRSDGNALGKCHNSLRKSFPSCSARSLTCVPPALPTKLEHPPPSKNSIRSVSGPPSMKRRHVAFCQMANASRIFCRV

SEQ ID NO: 141112 - protein, 769 aa, Heterodera glycines
FSFPCPPLHFLSSAFCYSIVQSKRTRKASKSAVEQIKKIFNEKATQHDAALMADEPRRGFVPRRDPTARRHHDELAVNGEDGDYFEGDLELAEWQAERLWHKLGEAKANAKLKRRRPFYKRWDRRRPINYEMAENVPEKTRQKTRQKIRLALAIWQNATCLRFIEGGPDTDRIEFFDGGGCSSFVGRAGGTQGISIATPGCDLVGIGISIATPGCDLVGIIAHEIGHALGTFHEQARPDQSQHIAVHYSNIPAIRWNNFQPIGDDQAQTLGLPYDAGSVMHYGPFGFAADQFRPTISTLDKHWQFTIGQREAPSFLDIEAINRAYGCTGQCPTDLWCLHGGYTDPNDCSRCVCPIGFGGTFCGEVQPSPCRSDQSMGRLIKDKGSPNHSLKSFSSWSASPMVQTVASPDFPRNFPSDLFCVWLFRSPPQGHLFIEFVEESFGYPCEDTCDKAFVELKMGPDFRVTGYRFCCSSPPLMTFQSFCCSSPPLMTFQSVGEEAVIIQRNPNGATRGFQARKTNRLGLYRRISEKPMPTSQPPPEVPMTSSSSSFPSVMNAILFLLPLRYAKAFSSSSPSVMPMPFSSSSPSVMPMPFSSSSPSVMPMPFSSSSPSVMPMPFSSSSPSVMPMPFSLLPLRYANAISSSPPPPPSSNECSLCLQWSEWNDCSQMCGGCGRKTRRRHCPSAACQREEKRICNRMACPEGTNFLFNNGEFHLLWKGCCVGLFLNNSKCGPLENSENPFLRIISSLLSSHDGQKEKTKRNGGKSKSGE

SEQ ID NO: 141113 - protein, 240 aa, Heterodera glycines
MERKKSTKLANSLPLTEFSCSVEGDEFAHLADQFANGKMEEEKGREKVRVERKRIVVRRKKLKNNGRRRRDREEEKGELKGKRRKPSVDEEKRHEERDNEDNATLTDWEQQRTTNWTTPEGVGTEGRGGRWTPGAVPDERQQQILEVLGIVPKSMASSENGSKEMLILQKLQNQPMKDDNELEEGPNGSQMSKNVNERTKDGEIDSEPLADLKVHNANGYSFPPANRGQFVEDEVGSSYS

SEQ ID NO: 141114 - protein, 100 aa, Heterodera glycines
MSSSPSMPSPHELIRQLMPMSNDLQNRLQQQNGTAIAQMPPNGLNVYFLRPSKALSDAAASSADWPNAKFGTPPISRPFGQGPTFGTMPNGGTAKRAGHK

SEQ ID NO: 141115 - protein, 53 aa, Heterodera glycines
METGILFFNLLRRGYIIGGWQINGDWHIKRVYTVQISISIIKIILIFFSNILI

SEQ ID NO: 141116 - protein, 92 aa, Heterodera glycines
PFKCKYCNRTSKWKADLIRHVAKTHGIRVVSKYSRSKALELDKQQQKQLLMVEEAVEEEEEDGGRAFDSSSSCCDSETPTKDENNNQNKAKF

SEQ ID NO: 141117 - protein, 220 aa, Heterodera glycines
MARNKQLVQRQQQKRRIDAIVESGDELAGDQRPVIDNSQHSAELADLLSLKRETELADHLSLGLQHNAELADQLSLNREAEVADKLSLGSHYSPALADQLSLGPQHTAELANQMSLKREAKVADQLPLGPQHTAELADQPLSFPNSHASAFAAGSVAEASKLAHSLHQQQQQRLQLDASLALLQQLLNILPPVAPPPPPPNGTEQSRDGTAGSIFRPKMA

SEQ ID NO: 141118 - protein, 267 aa, Heterodera glycines
YIDHSVIAFLRSNHQIFDKRGIDLHLCIPYSNTTDGQRIWDIFGREIWPIFSTNIHHLRYTGGDHLDNLLRRISPTILIDLDQLTSIHSFDLLPAAIGDGFNVPNETISAGQALSKWLHTPRKDGQPKRLHNFKEHFLRANAISSVTYEIHFPIHAPSIQMVPFEFLNEWTKEKLTMTKANENELGNRWIMKRCKIIGETAAVQQQKKDDNCNKVAIWLYICNDCIGPLSPPPFAEESGQSITKGPSSADKMSDGQNNKNSDQMQKK

SEQ ID NO: 141119 - protein, 92 aa, Heterodera glycines
MIGRAVRNRPFIFEGIFKFILYPRKMAISFFDKFYTSQKRLRMRRRAVHNRHFISQRIFIFRGYPRKMAISFFDKFYTHTNALEHDREGGAQ

SEQ ID NO: 141120 - protein, 60 aa, Heterodera glycines
KELEALKLFEKLFERNYDFYLDHFFARLRSHAIFGTLIILALIMGCIKAIVEGIGSAKIV

SEQ ID NO: 141121 - protein, 71 aa, Heterodera glycines
MHSHRIENIVLENSFENRTSSWWQSENGVQNVSIQLDLEAEFHFTHLIMIFRSFRPAAMFIERSKDFGKTW

SEQ ID NO: 141122 - protein, 125 aa, Heterodera glycines
MAKSQIASLVEAEFSGIFTAPSYPSAVLKKQNNISINLPVLRAVQQHFCTAVPTGTVAAPTVPCACVVGAVTGRTATGTEMDKCDAHNRWRAKGWPILNLAPFRWHLCGILVSFLWHCVWPTWTC

SEQ ID NO: 141123 - protein, 25 aa, Heterodera glycines
ARPWQQIFPDISFPPDFVKERVKLD

SEQ ID NO: 141124 - protein, 219 aa, Heterodera glycines
TEFPQNGGDVHVKMEIDSEEQAGEQLQFFAKYLTSQKLFPLQLADSQFRRYFLLQYLIIANYLLLKVKLKDTFTLTTLQEEEVRELTDKCFALLRETHPNGSLFADAVKKVLSRERLWSTWKNEGCPDLITPLLNAQTIEKYAAFKRKAVAQCVAGQLDLGNKEMTRLWNIQPNNLLACRSQKRNCTPDLVQFLSDALDELDPEQQVDEQYQSVNDEKY

SEQ ID NO: 141125 - protein, 146 aa, Heterodera glycines
MFYDLKFKSSNVQESNRVPTVANASAVSTSTASFLKKTIKLTAENLPLLKERAEQIQLATKKIEEAAKKSEETTKKIEETMKKIEDSEAERKREHSANGEKSEKRESETKSKKREREKESENEKPKKGENARKRESRKREFKKIQS

SEQ ID NO: 141126 - protein, 188 aa, Heterodera glycines
MPSLLADENDTHLYYVRAYCMNRGKRFHANYGTFVVNRSAAANEDKVTISFEQKEPCDYYAAEVLLMRSGSLYGMGWPDERPMVHFVCSSYGNGEKREIVFKRNFHLQITPALGEGEEENVYYAEVECNGNKYQTFRTFTKSKTDVVLHVSDCKSYDFSVRKVPKALFKPQDNMRKVRFQLILSEIAV

SEQ ID NO: 141127 - protein, 171 aa, Heterodera glycines
MRALWRLARAFPGTLIRCICFYAAQALEIERLVAQQEIPDILVTTADATQGHESSLAVVVTTCSVFDSGADSQPFWADAARVDVAISRASHGMIIIGDLLLLNRTETWRRYLDQATTETTVVGPEYFDFEQFNNPDNYYDKDGQLISANGGAVRSEHFYSKYGKNVWYNNS

SEQ ID NO: 141128 - protein, 199 aa, Heterodera glycines
MFIVCATIKTRIVFSLLLLLLINYPQCFVMGRHRIIAAEDMETVLNRLRPSVDRFDANFQRTFNEYGRVDSVREFLEDSVVPRFTVEEHGRVDFVDAFQQLQLRIQQFFDTKIRALHRLVGAAEKEAQKVDMDKVMGPTLGSEGRCRDQMRALNASSVHNPSIWKKSNGKTNSGIHVGILGMKVLGDDKQLGHGIFKTF

SEQ ID NO: 141129 - protein, 150 aa, Heterodera glycines
MYIETAQHNLGKELTDQSVRADLIAERQTLCKTISLLEKYNGKWEAIFLRVKGQALQDEEQNYRDFKPEGKAFMHWVDQARGLVDTIGGALGLSELGDAIPQPNQPAQVVQQAPVVHQRHDVTLPPITLPKFSGEPREWPLFWKLFETSV

SEQ ID NO: 141130 - protein, 177 aa, Heterodera glycines
EEEEKEREKEDREKEKEEEKEEEEKEREKEDREKEKEEEKEEEEKGREKEDREKEKEEEKEEEEKEREKEDREKEKEEEKEEEEKEREKEDREKEKEEEKEEEEKEREKEDTQNEHEEQREQHQQQVGHGHGQAAESVETRHGQFEMSAEERECLSFFDFANHPRISDRIFAAICFR

SEQ ID NO: 141131 - protein, 20 aa, Heterodera glycines
YRICSNYSPVSINPAVSNYP

SEQ ID NO: 141132 - protein, 24 aa, Heterodera glycines
ECLAQKWAKFDIQKHPKLRGISVM

SEQ ID NO: 141133 - protein, 83 aa, Heterodera glycines
MAFRCDGANYYNYFIVDEKAINNVTCKGIKKDVLPKLPEYFFYDSSQFASLKVSICQKNGFFNLFKEYYLEVTDMGNPTDSKA

SEQ ID NO: 141134 - protein, 93 aa, Heterodera glycines
MNGVTRTLKWANVWRKLASRLAIRVMPKTTIAFSHLCRKLICPQTIWTNHFGSGNTFTIRWKKYSLEYLVYHLHLFGNEIELKDNFEKNRLIY

SEQ ID NO: 141135 - protein, 76 aa, Heterodera glycines
MEPAAVVVVPSSSETVPSNTTNQIADKRDDTATTSSIDKIMLSPEEWEVRMRGGILSKALRRYAADGHLKGDDVPK

SEQ ID NO: 141136 - protein, 182 aa, Heterodera glycines
MAELRCQLRLSPPSSALVALPPFPSPRPCYDFAPISSSSPTSAVANGREGLLIELVRQREQQQQLFRPTAVLPSEVQLLTSAINSLSNGSPQGLALQMQQQQQQQDNNGTMTVPTNGIGQDAQQQQMGQQLTTAFDMREPLAVVQQRTMGSSEEANAMPTAEGAAVDSDCATPATISQQNLQ

SEQ ID NO: 141137 - protein, 33 aa, Heterodera glycines
SFSRLSSPLLFHPFVKFRSLRLFSVVRSVFVLL

SEQ ID NO: 141138 - protein, 191 aa, Heterodera glycines
VRRTDLLADPRSKLADWFRPGTNRPIPTDKGGNLFLDIPTDKGGNLFLDRDPKMFRHIIGYLRLKKERCAASLALPAKPDDLAKLPAKPDDLAKLIGECEALNLVEFRLIGECEALNLVEFRELALEMLQKYVRTEEQHYVTSVTSYVQMALRDYEAWQFEQEQARQAENGQGRGGGVKRGTNPQGNFNTV

SEQ ID NO: 141139 - protein, 25 aa, Heterodera glycines
MEKACKIWRDYIDFNALEKASECLD

SEQ ID NO: 141140 - protein, 36 aa, Heterodera glycines
KPKLFGLFKKGLKIFKNFIHLPLDKKSIREPYLTFN

SEQ ID NO: 141141 - protein, 206 aa, Heterodera glycines
FLVNYLIDFTFWQITGFGFAKRVKGRTWTCGTPEYLAPEIILSKGYGKAVDWGYGKAVDWWALGVLIYEMVAGYPPFFAEQPIQIYEKIVSGKVKYVKYPPHFSSDLRDLLKNLLQVDLTKRYGNLRGGPTDIKNHKWFSLVDWVAVLQKRVTPPPLPQPAIRRMFEALYPKVKGPDDTSHFQAEPIGVGDELRIQCLQIGIVCED

SEQ ID NO: 141142 - protein, 95 aa, Heterodera glycines; identical to SEQ ID NO: 124528

SEQ ID NO: 141143 - protein, 80 aa, Heterodera glycines
MANTFGYLRGYDALHGVGIVLKENDNRADASFNYCINGLLSNLHKNVAQNIVFLITHSSGSGKTIALLRRLLKPIEEKAG

SEQ ID NO: 141144 - protein, 101 aa, Heterodera glycines
MGGTYQLIVQIDSKNVPGSPSRVILTFYLKLFLLFQVHSHQLPAELISVDAKPLKFGVINEDIRTIIDARKATAGHLSAQCSGPTRPEYCELMDNRDGTIF

SEQ ID NO: 141145 - protein, 22 aa, Heterodera glycines
ILGSKYNYAGFFVLVVCELVTK

SEQ ID NO: 141146 - protein, 46 aa, Heterodera glycines
  unsure (1)..(46): unsure at all Xaa locations
ADLKLSIACRFSAQQSTNRVFDSLQKIIPYPKVFTTTYCQSNLLQX

SEQ ID NO: 141147 - protein, 160 aa, Heterodera glycines
ILQNVSIQLALEAEFHFTHLIMIFRSFRPAAMFIERSKDFGKTWTIYRYTIYRYFAYDCSASFPNIPEGPPRKHNDIPEGPPRKHNDVICTKKYSSFEPATGGELVYKVISPHIPTEDPYAPEIAELLKITNLRINFTKLHTLGDDLLDSRPDIDEKYWY

SEQ ID NO: 141148 - protein, 55 aa, Heterodera glycines
MQKCNCPCWSVMAIKLSPIFYLKIFLKVLLAIVETVPAAMMTTVLTAALTMCGHW

SEQ ID NO: 141149 - protein, 67 aa, Heterodera glycines
VSDNINTAKQLSATFLCFFLSNLLFTILYIVITLNLVTEAYQISLVYACGNWSIAILCVATEFTIMT

SEQ ID NO: 141150 - protein, 68 aa, Heterodera glycines
LACVGPLLYSVLHKGVGLRIEKPPLILVLLAMSTVSMLLLALFWEWTMPIFGAQHSVAILLLTFLMAL

SEQ ID NO: 141151 - protein, 73 aa, Heterodera glycines
NRSGRGNFRLRYNPMAAVELTLLGNRLEDRARKHRVAIGASTSASTVNEANAGENGEGGSGQNQNVAFFWANN

SEQ ID NO: 141152 - protein, 18 aa, Heterodera glycines
YREAIPEGFGLPINLGAS

SEQ ID NO: 141153 - protein, 169 aa, Heterodera glycines
MANMKYLPPELLDEMAFYRRSEVIKKHKLAKDDLPWTNFATEGFYDSIDGSMLNLLLSNLRELYLRVKQTRAWLALVVQAELFPATMLLIEELCEFIESPGLYFGAVPESTSEEDPYQTVACVGPTVIIWVMFLGDKSCLRKMRLVSSRLRHLWLPFRHRSKTDCAIAT

SEQ ID NO: 141154 - protein, 314 aa, Heterodera glycines
MSCAPDQDVLEFGASVNAKCERADMTLSKDEIKCLIFITGLSDAHRDLRQECLRQLERAKSATPPRTVKLENLLEECRSILSLQHSAAALTSSGQAHAIQCKPQVLKEDKPKNKGFKPKTQLNSGKNFRNEGNNSGNVNSNPKRQEFRAQTCGRCGKGHSYRVCRYPADVQCFGCGKRGHVKQMCPNRAQSNSVAVASTFSVAQTNRDWIWIELQINDKPIKLAADSCSNLTIIQLPIWESLGKPKLKNAVANTTAPSIMGLDWITLFEQKTQLPIATTLPVLFDSTLHQSVNAIQSPKDPTDLANQIKAQFPQ

SEQ ID NO: 141155 - protein, 123 aa, Heterodera glycines
MGRLIPTQNLCKVCGDKTFGRHYGAWVCDGCSCFFKRSIRRSAEYKCVAGTGKCLVDKCRRNWCQACRFNKCIAEANMAKERVQKERGPRKAKRSKSGKRNEVPKEAEKSQRESGETDGRGQR

SEQ ID NO: 141156 - protein, 55 aa, Heterodera glycines
MLNNWSNAIGNIGVAKMGNANWTVPLAHCIANATVKVGQAINVIKQRTVVQGRNV

SEQ ID NO: 141157 - protein, 280 aa, Heterodera glycines
MDNAKPKAKGTPPNSNVCAETDGQVKKHKGSRMMEKRKNNWHFSGPNCNVPTDECQKWKKCLNNGKCITLIDGDELPRKRFDVVVSPTKCSDLFVPGSFNKLTVHKFRVEEAKQAEKSVKSTKRLLIITYQMDPLLLQFIQINLKCLNTELVSNVVAKPPFYICDRLGQWDRLATFGRTFALPSCTPTENAMQEVIGDLHFEGPCDRAAKCARKVIQTIENASKSFGSFCTRPFCDGQLGIKTECLGERSAISGANPSTTAAQNPPSAGATPLVDTYERK

SEQ ID NO: 141158 - protein, 102 aa, Heterodera glycines
MANLCPTGHHQRGPMFGALCGGRGNGRGGTMRNLGFTTPANGSNSASDCSLIFCPPGHFRNTTIGPADDSFNQLNSAFEAVCVPCPIGYYQAKKTNGKEAFK

SEQ ID NO: 141159 - protein, 42 aa, Heterodera glycines
MEHRNSEEAKKREGTFVGVLVNNARGLFQSTSSQRLDDLIIK

SEQ ID NO: 141160 - protein, 102 aa, Heterodera glycines
MIMAKVQFFNCRTEAQNVFTDSLKKAKNGEKIREKGKANQKAISAEGKAPQAKQSKGLPFDANDAIGVQANFFGIRKGNETVPGNTLREKSDRSLNIQSYRN

SEQ ID NO: 141161 - protein, 92 aa, Heterodera glycines; identical to SEQ ID NO: 125147

SEQ ID NO: 141162 - protein, 92 aa, Heterodera glycines
MIGRAVRNRPFIFEGIFKFILYPRKMAISFFEKFYTSQKRLRMRRRAVHNRHFISQRIFIFRGYPTKMAISFFDKFYTHTNALEHDREGGAQ

SEQ ID NO: 141163 - protein, 35 aa, Heterodera glycines
MTSFSAPFQHFALSVANVRADLSQIRVCPVNATNG

SEQ ID NO: 141164 - protein, 28 aa, Heterodera glycines
MGRMVVAFLTTNSRQMTMNYVLIDRFWV

SEQ ID NO: 141165 - protein, 63 aa, Heterodera glycines
NSNRNSYNLGLFLHQRRVKAAKKMRNDRLFWRILNGQIGLLITFDAHFCLLILMCLSDEKIHF

SEQ ID NO: 141166 - protein, 120 aa, Heterodera glycines
MVAFRDPKTVAEKRFNTALCKGRSVIEHALGIFKRRFSIAKTSCRLRLRRIATAILAAAVLHNIAIEMRLPEPPLATEESNENDDLNEINEDENRNAILNYRQARQAGIEKRHELVARFT

SEQ ID NO: 141167 - protein, 26 aa, Heterodera glycines
SKSSLTTAQKNMFFVRFRPRGAQEKN

SEQ ID NO: 141168 - protein, 76 aa, Heterodera glycines
MLKLEKEGNDDGYFVWVLKRCPIGGTTAVQWEHKNLNNVNFIIFEFGRLSPPKTGQMNAKYRLKMNAGPNGQRKKK

SEQ ID NO: 141169 - protein, 56 aa, Heterodera glycines
MSGTITRHELPPKRFFSVFDPFDDEYKHWNKYGSKRMDERLNRQCYYHNKRHYFVG

SEQ ID NO: 141170 - protein, 24 aa, Heterodera glycines
MEKACKIWRDYIDFSALELLELAS

SEQ ID NO: 141171 - protein, 174 aa, Heterodera glycines
MDFNNLSSNSTILGDLFYTTYKNAGLSAGLVTMAVLIALCAVPGNCMNLFLVYLTIKRKSLRGSSNYLLALNSFYEFLHQTGHYIFLFTILSGRNFIPFFGSAIFQLQSIFGYNAAIFTMIETAVDRFLAVVTPKLYASENERIYIISIGTFPLCGHTPKLYKKKGKGPRFYAS

SEQ ID NO: 141172 - protein, 104 aa, Heterodera glycines
MNRRWICADVWMDILPSFDRPQLGLKMALISDRFDILVDKHFDGKGELTIWNDHRNSQGHGGRANWTKSETIYANQGQQGQIFVEFPMQDHPLPTNPDYGPYDY

SEQ ID NO: 141173 - protein, 51 aa, Heterodera glycines; identical to SEQ ID NO: 124998

SEQ ID NO: 141174 - protein, 106 aa, Heterodera glycines
MAIKYGPKIAKYGHKMAKIAKYGHKWQKCQNMDINFSKLSAKFLQIYWLKLHMRYISKFFDSDFFPFFRDFLAIFMTFLVDFLKIFSALNSQPYASLIDLYFAFSF

SEQ ID NO: 141175 - protein, 118 aa, Heterodera glycines
MDTGFVTFLRATTSVAYNVRLELLVANEMNIVEPFELVNEMTQEKLTLTKDEEICLLKRCPIVGETAAVQWEKDENLDNLNGVIFHLYHDCIGPLSPPDQSDEKVFSTPGPSDQRKKE

SEQ ID NO: 141176 - protein, 33 aa, Heterodera glycines
MIKVFILVLFCTFSVSAEYDDYIDDEIEGQSSA

SEQ ID NO: 141177 - protein, 91 aa, Heterodera glycines
AYGDKNSKRKWNLSKINAIEYCGSSRVHHHTHIGSGGVINHLFNNIIQLDGPTLLDLQSDQSLIAWRSGEGDKSRIKGTTFSSTLGYVICD

SEQ ID NO: 141178 - protein, 71 aa, Heterodera glycines
MNTEKPGGNGIPRENTGIPFPFFLPDGILTGTGKWLEYRSGIPARHFRFPIPVPVSFLSKTGKKYTVRMGV

SEQ ID NO: 141179 - protein, 210 aa, Heterodera glycines
MNFRGATEAYAIVHSMPFARLSHHVVKLAIHLPNQQPIVYRAFQLVSKAQQIQQGELPETHCSAYWKQWQNEWKNDPKFKDILFEKVPEQFRWAKDKWVLYKRQQIKRPPIGRIVPVPPSDPERFALYSLMRHFPGDPDHLKMVNGLLCTSFTEAAIMHGLLEDGKIWDKTLAEAALSRWPDQMRWLFVSIMVYGQPSNAIELWNKYKDQ

SEQ ID NO: 141180 - protein, 119 aa, Heterodera glycines
MTTNLPQGNEAQNSGSDFDPVYFSPEENQRWANLLVRMRAFEQAVCRQFRQIETQFAQISNQIQISNTADRVRELESSLKELENTMEMDTFQAQEKMIDIEQEVGKVNMRIDYQERLTK

SEQ ID NO: 141181 - protein, 83 aa, Heterodera glycines
TFIFEGIFKFILYPRKMAISFFEKFYTSQKRLRMRRRAVHNRHFISQRIFIFRGYPRKMAISFFDKFYTHTNALEHDREGGAQ

SEQ ID NO: 141182 - protein, 210 aa, Heterodera glycines
QVQQLKEIAPKAKLKKLGLADIGPELSSESEGDEEEEDAAHNTEQQQQDDANDVPDDLTMDERADAARRREVLDFETPVYARELREQQQQAPLLSPPRVRAAATPPRRSPRASATPLPPRGSGPLPRRLVDLRGPLPRLFHLRWPLPRLVVLRRLPLKPPTTSRKSRAENATIWASSVGVVRAGSTRSKRGAAATTAASIRSNANHGFAW

SEQ ID NO: 141183 - protein, 68 aa, Heterodera glycines
MSSVFFLIPANIRGLIVKTATNCKQFGWVSMRLHIVAVAANRAHAVLFPFHYAQKVTKNIEELVSDIT

SEQ ID NO: 141184 - protein, 77 aa, Heterodera glycines
MNKISLIPSSSMALLLVVVVLLIIPFVPFTLSEQCLYDSVTESCLKVNCPFDCYVASPGTCGCNARMKFDSIWKRLV

SEQ ID NO: 141185 - protein, 97 aa, Heterodera glycines
LFEYPNRTLEKIDFFVFGAVPPNRCAQIYGETESFRNSFPIACTLILRWIFAPHNCLSTPNGHLKKSIFFVFGAVPPNRCAQIYGETESFGNSFPIA

SEQ ID NO: 141186 - protein, 17 aa, Heterodera glycines
FAYTENNSVTISPEECC

SEQ ID NO: 141187 - protein, 115 aa, Heterodera glycines
MPKNFVFSRHMAIYNTFRSQRLISFIYFSAFYNKMDAIKKYAIKKFHDLVKTAKSPQLPTTLPMEKLVWPIGKNFLKKLGQPIMANSDRLALYTILGAQTMTNSVSWAITFFLLY

SEQ ID NO: 141188 - protein, 234 aa, Heterodera glycines
LDSTEYPVIVQTMWPRGSADVDANADPSVPRNRLVLKSKAPLGGPIHGCMATASAIDTFLAKFLAQPQDREYADLCVLPELTDREYADLCVLPELTEQTLLENLRDRFNNGKIYTYIGPILVAVNPFSFFPIYNPKYSRLYCQSRRLGILPPHVFAIADITYHNLIKQKFAIADITYHNLIKQKENQVVVISGESGSGKTESANFLLHHLTTLSQKGNQATIEQQILSAGPVWR

SEQ ID NO: 141189 - protein, 1347 aa, Heterodera glycines
MDFHLPCVIVHLILCVFVLPFSYSHQQQSIGDNQAEKTLENALGNTAANQPRKRPTPPSSPPRAFVDEFEKRTDNGPRAENAENQPNLLNLNRHEFNQLDEVGATTFEPLISRLINSARFDLPQQLHQNSSAATANNISMVLPIAQEMMFEFVPHFERDFYELMVPQGYNEELNYTLSEVQILLKPGSIVQWEQNENGDYNFELQASHGHIKFTSKLRAKVLKGMREITSMWTEEAELTKPTVTTLVTEPTTVSSDSQPFTVSFDDFTDEKSDSSSSYNETTASSSDDEPAQIILDLDHNLYNINTGSSTEPTKTIESKDSKDEALFMLDPIEIELNNSLNSILSASREIKWTRRRENEMGEDEAENVGMEGKKAEEENKKKEERQKDKGKEEEEEVENVGREQEKEEEGKAEKKDEEVGKEEKNGQEKKEETKREEEKEEKAEAKKEENENKEEKETGENKEEKKHHLLDVNDYIKAIQIELDAQLMGQDNDTIWQIAVPFASLPSLAHNPVPNLAISIPESKSQPISHDEMDYLVRLELHSSNDTVLDMRPHHIGPGDSAQLWLNDQEKVANEPLDFTLFASVVDWNGHQISQPMSIFKGKFVVEDPPKGPPPQIHHPEALTGYEFVIDENATDGTEIGRIKLENSDTNNADEHAEFELFGHGSHLYGQKTKFKKSRKFPRFKIDSGGIMRLYCGAENGWKSGNGFRSLPEAVTVRVRDVNDNPPELKLFSDEIVVVNGQLRGDAPFMIGISDKDRQEMVKNRIFKALISWASPSSISYPKSKIMICAPENRFNALSLAGNLSIFFKLEQFDEINGLFGVILKDGVKLTEEGTHELLLVVVDGSGQSDTKIVPNNLKLYHFKNQLYNKSMPAYRIHTGVPIVQLQLKHPPPSTVTVNYLISDGNPGWLSVEPFIGNVFGANVPKEGVPPGNYSIQVVAVDQEKRQVLAECQLLLELTGEPVIDEQLQFPSPYVSLSIARLDNDDENDKIVDLVPFPEGEYLRHAEFNYGDLRAWDEAEKPAQLSKGALTVFMPGNGTIRLDMAKLRNVRSLHLNFTIKPNPNFIATNGSEKINNVTLVAITLQSDETKTLALQRQREKPCFAAPWTNESVPIRLRITEELPIDHPIIKLPAYNPMNSTDRLKIFMDGPYSKLFTINDDGVIAVKARLDFEQLLLDDHLIEILLLATSMKSPPQSTTALVQIELLDVDDMAPVIQLVNGMLKEPNRVLEDDQNALIIVDIEENSGHGKLELMLLNVSDVDSKKHQCELIGGEGKFAIEKKIQLNVLDKNDNRPVITWDRQDTQIRLLDNMPAGSAVGRFFARDKDAGDNGRVEFSLGQRQQPAATK

SEQ ID NO: 141190 - protein, 138 aa, Heterodera glycines
LNKHIQSHYRPLNLPWTLCMRSIFQWNNETVNVWSHLLGFVWFVYLQWWALNESLPSVNAPIADYWVMGTAMLCSQELQKFYGTLIGAMVVLIAIYVPFRRFSIQSKCRFGVPDVLYLSMALIALYPTWHWTQANANY

SEQ ID NO: 141191 - protein, 104 aa, Heterodera glycines
MARQIRCDRLLPPVVAFANPRRVDLFPLDGHPTADHLPSHGTDQTAASPYGPNASSICRFAFCASAFVVGPTGNESLKSHRDINQRRMTTQIITEGKMEKQFRI

SEQ ID NO: 141192 - protein, 137 aa, Heterodera glycines
MHTKVAKHSPTLKFEFNPNEKPTVGQAINALLPTNFGMPLAQAMAQFDFKVEIRERAIECALVFVDFDQWENSFLEHHGVYKVLLYPKSGNNVRTNDQSMTQPWATNTDQKKADCEFPIIYRQFQEIRIIRAKSANN

SEQ ID NO: 141193 - protein, 97 aa, Heterodera glycines
MPLDYIFFTRKYIRPGFPGPKFMKSANATRHRPILVPSLLQHLANQFGITDLHLSIAQGFWRPRIWGAQMPCTEVPSGNELIAKFDTCQVANCRQYL

SEQ ID NO: 141194 - protein, 16 aa, Heterodera glycines
SGVLKVANHESDMYFD

SEQ ID NO: 141195 - protein, 69 aa, Heterodera glycines
MAIQFDKCRLTSEPKLNLGFRRGFVEPKMDLKKVALFFCSGFGIVQIKPNIHDNVLWYSGERVFVTYYV

SEQ ID NO: 141196 - protein, 47 aa, Heterodera glycines
FLKLHYFIFLAKLIHKYFFTNCSETHQILFTSYFRHSDAFTIKKGDE

SEQ ID NO: 141197 - protein, 41 aa, Heterodera glycines
LIHKYFLERAVKRTKFYLHASLGTLMLFLSKREMNKIFKNF

SEQ ID NO: 141198 - protein, 240 aa, Heterodera glycines
MSSARCRMALGPALFRLRQHVTTAENLLDEPVINAETTENLEQERGHITRILSRMEVELDAWGAIMNGLQGPAREAEEALFTAFIRDDRHLTEWLEDAREMLAHIAAELADEPNQPIAAGGQQPAVVVNPPVPAVPFVNNAAFLGGANVQQPAAVANHANQPPLVPNNAQIVPNLPAVAAPAPLATARLPQLSLPVFSGEPMEWPAFWQSFESAVDRAALEPVDKLTISTVAYAERLLVP

SEQ ID NO: 141199 - protein, 123 aa, Heterodera glycines
MPGDIQIGALFPMHRQIAGSEGCGAIWEQYDHRLSARGGHPMFVLPNGRLSEEVEPRSGHRRAGEVVHNNCGAESAPGVPHSADWLLGNDHGFERQGAVRILSEVQNARIFMTNPKKMGFGKH

SEQ ID NO: 141200 - protein, 390 aa, Heterodera glycines
VGTDNQKGPRIIYLQEPTVHQISPSQFRNFVIENTTDPEWKATKNANEASSSSINIPINIDSDSDDDDYDGLDRRDALRTGGPLLLDFFTGKAYQQNLSRQNLGEYSKSNLLDMSNQPNNSNQMILPVVRNQPSNSDQTKQRSVNDDSNMLMRVNPANNLPEVIASVTNSQQLTDQNNQPLTENPTDQSVRSNQNNQHEIQEILHLPMKNQQNNKRAAAPNSRQEFGFDLEKVPKAKKGKGLAEWLGHSIDQKQKIAVENTSEQPTITDHINLSSQTTQLNNLNNPTTNQNVVDLSDKTLSTKQTNEVGPLNSMDNSDHQMMGNAVVQQVASDQSCQSTQTDKLSDQITFTNQFDPNNLENKFNQSNFINFSLSGQNQTNNDNHSEQSEP

SEQ ID NO: 141201 - protein, 67 aa, Heterodera glycines
MATDLIHWHNAGRNVPTLSRRHKAVQQAMKDNIIQWFCQSRYFYKKDIDNCLLFTYYGALGNGNNFE

SEQ ID NO: 141202 - protein, 18 aa, Heterodera glycines
YREAIPEGFGLPINLGAS

SEQ ID NO: 141203 - protein, 63 aa, Heterodera glycines
PRFITPLCSSSSEPVKRRSLLVEPMAPLEDHHELPVVVLQEERLNSQPPVSKEYLQELFVQLD

SEQ ID NO: 141204 - protein, 159 aa, Heterodera glycines
ECPQAQPGPQGAPLPQGVPGSPGVPGIDADGGVRGQPGLPGPPGAPGEPGQPGQPGEPGPAGIMHEVDGKPGPPGPAGEVDGKPGPPGPAGPPGLPGTEGAPGQPGAPGQPGGQGAAGEPGEPGPPGKTGAAGQQGPQGNQGTGGTCDHCPPPRTAPGY

SEQ ID NO: 141205 - protein, 98 aa, Heterodera glycines
MQKGYGNEWLTHYGCAKSPEKGACSDNVEKEMKDLYGLAVSCSFCTIGRKMDDMSNKNFPLYNTTNVVMPPSGRESHNQKAIYALACDTKIKKGRKKL

SEQ ID NO: 141206 - protein, 49 aa, Heterodera glycines
MNQGKEEGKSRRLAIRPFAHLGRGSLLTNQASISTNSEPGAEIRTKNRK

SEQ ID NO: 141207 - protein, 101 aa, Heterodera glycines
VDSVRVHMEEINLSFSHRFAVMPDNCLSILGTELLGAVGFILSLPDGLGIRADICAAKLKAVLGEGAGDSGKKNEMVIEGKVKWAKFLTEDEIQREMADTM

SEQ ID NO: 141208 - protein, 43 aa, Heterodera glycines
MGVWVRKEKGIAFVHIISGQVDKRFYFHYLSLRFNSLMEQKIF

SEQ ID NO: 141209 - protein, 18 aa, Heterodera glycines
SSSNSRRFSNSVSSYWRR

SEQ ID NO: 141210 - protein, 47 aa, Heterodera glycines
MTLKCLPPELLFELMPFVPAENAVPDAISSCRLFHCLLFKRVLNWKK

SEQ ID NO: 141211 - protein, 357 aa, Heterodera glycines
MERNNEPLDEEAANGNGNQGDLPSDRQDGERANAAQQTKTKKGMDAQGLGTSQTGVTPAASKNLRSGAITVRSARDRIERAADTLSSRIAEARELMDSDFTRGEAPEHAARLMAMERGLGQVTRIFEGHFDKGIAEAGAAPEERQDFLYDFVAAPLPASTKYLQLREHPTPAELLQIAAEHLGDLQAMRQTFEDEEREQSISRSSRSVDTEDSHPSKELPRTMARRSMPEWETSFRDVLARFQAGQVGQAPQRFEQANRVAPPVMPNMAALIQRRSNAPSVASVRVNNPVREWMARNRGGENEPPAQQRPQAQQPLQAEQQRFERLTLNDQGQAFPRASHHARIRREEHPSRERLRT

SEQ ID NO: 141212 - protein, 216 aa, Heterodera glycines
DRQDGERANAAQQTKTKKGMDAQGLGTSQTGVTPAASKNLRSGAITVRSARDRIERAADTLSSRIAEARELMDSDFTRGEAPEHAARLMAMERGLGQVTRIFEGHFDKGIAEAGAAPEERQDFLYDFVAAPLPASTKYLQLREHPTPAELLQIAAEHLGDLQAMRQTFEDEEREQSISRSSRSVDTEDSHPSKELPRTMARRSMPEWETSFRDVLA

SEQ ID NO: 141213 - protein, 141 aa, Heterodera glycines
GSTPTCVRSASICCLRALIDASCQAGVLYAQRHKMCATVIISELAGGAKKVVESLIKRFSPDCLNSFNKCCGNSSAEGPQLNAPILLAQPYQSVAVAIGPENGGKVKGQSNNSRAEQLDVNLADANCESAKCQHLCSVKDD

SEQ ID NO: 141214 - protein, 16 aa, Heterodera glycines
EAIPEGFGLPINLGAS

SEQ ID NO: 141215 - protein, 281 aa, Heterodera glycines
QDPLSHSLTNDSQTAAAIQIVTAFKDTILSPNVSLVVICLYSYQKESLQTEFEKQRIEVLVVTVDGYQAQESDLVILVTTRTSLRDGALSENSEFLKDSRRATVALSRAKSGLFLIGDFKTLSEGEVWNKFLETASEDSQIVGEEYLQILRNGRYMRDRYWQLIDGIGRVVQDLQWLQKNDENWRTMQQQSTSSSMSTFESRKRRADEPDQGPSARRNETWRPQQRLGQFSGAVFVRSREPTGPRGACFVCKRVGHLAKNCWYADGQSAGRGQPRGKGQWK

SEQ ID NO: 141216 - protein, 146 aa, Heterodera glycines
NGVSKNRNYAQKAPQTILALPIPSTIAFIHPIMSAKIIRVPKIACDLSLAKNGVSKNRNYAQKASQTILALPIPSTIAFIHPIMSAKIIRVPKIACDLSLEKNGVSKNRNYAQKASQTILALPIPSTIAFIHPIMSAKIIRGPKIA

SEQ ID NO: 141217 - protein, 96 aa, Heterodera glycines
MAFVGHPILADIRKGFRLRPTQTVDKSKPIIQAEGEQLTELLQNRSPSPAELPQAKANGVPKATKAPPPAPPMTQQKNEAKRQQQTMTAKVLYRKD

SEQ ID NO: 141218 - protein, 54 aa, Heterodera glycines
MAIKCSVLPHCMALETLWTKPIYKAYHKCTTEDEREKQMLFPVFGSQEKYFVKL

SEQ ID NO: 141219 - protein, 52 aa, Heterodera glycines
MRIYTNLEKIEIIEKFYRIKEENPRITGNQMSDILGISKYTLGRWKKQFSEK

SEQ ID NO: 141220 - protein, 74 aa, Heterodera glycines
MRISQNLSVKCYNDAEKKELLKLYEKIKKKHPELDKEKIGKILNVTGRTLTNWKNQFYGNDSKNKCENVQKKSK

SEQ ID NO: 141221 - protein, 95 aa, Heterodera glycines; identical to SEQ ID NO: 136768

SEQ ID NO: 141222 - protein, 83 aa, Heterodera glycines
LLENLALKPSFLSSSNDNISEIKIILLKAYKHFNIIPEEENLSEFEKITQNFANKENYEKVQKLVKAFKMSRALERNLILKIF

SEQ ID NO: 141223 - protein, 43 aa, Heterodera glycines
FVPKRNWCCQDFVNGRNCTILTVIRILYHLSFDFFQRLTVLLS

SEQ ID NO: 141224 - protein, 75 aa, Heterodera glycines
MGKDGISAGGRHWRGIKVQTKPKSGPNGEQMRNFELETSFTSQMFIHENNKKLILSFIIKLHQCRVESTSIFDQI

SEQ ID NO: 141225 - protein, 95 aa, Heterodera glycines
LFEYPKRTLEKIDFFVFGAVPPNRCAQIYGETESFRNSFPIACTLILRWIFAPHNCLSTPNGHLKKSIFLFSGQSPRTDASRFMGRPNPSVIASL

SEQ ID NO: 141226 - protein, 60 aa, Heterodera glycines
MRMAFMFGWMTDVRATKIKLAMDNGMPTKFINSSTAPPRNKRNCSVSVGVVVFMFLCMLM

SEQ ID NO: 141227 - protein, 236 aa, Heterodera glycines
MPKKLKIISFFISQKLIIPIYIATTTPSPHDHKQPITNLITTAVQLLLVGSIELGIFYKLSRYNSKIYQKMFQNIGSNNLSIRYQLSENIRIGKQLIPPLFLNLGNIFAGTMILLWDFLDLPFYIYIFNLAAIINSIFGLLIEFFIITCHPFLKRDLCHFLNRIGKMFGFNLLAYNHRIADATVKVGTNNTAPSLSAVNGIAQRNLISGKALIDNQTKPEDHFAMLKEAWEKGPMK

SEQ ID NO: 141228 - protein, 178 aa, Heterodera glycines
MKAILIFQSLFIILRGSCRFVICLFKFFLWDPIGAESMQFFPALLKIYFIGIYARNFVPHVLIVERILSTLFVRTYEKKRGHLFTILWTPFALIIPIYIATTTPSPHDHKQPIMNLITTAVQLLVGSIECHPFLNRDLCQFLNRIGKMFGFNHLAYNHRIGDATVTFGTNNTAPLLAA

SEQ ID NO: 141229 - protein, 174 aa, Heterodera glycines
LNCLPQLFLRNETIAEQFNSVKRLTDQSHVKWFGNVRIMTERLSEFQGKTKSKNGQKTDGKNKNSPANFKMYPSRNSPANFKMYPSRDIGILTEQSQRDKMAMAEKRAYVKRAYVDTQMERIGKALDEIMPKNGQNESFGGDRITQTECHNEVMHTFNVMHTFNKICFNFSKVK

SEQ ID NO: 141230 - protein, 119 aa, Heterodera glycines
MLSPRAIAQNQTVAAAAASGANVGTNAAPVRRFWPSYIDQHVAQLDFDASVMMMTSAGDECQNDDDEEDDDEEDEDGGDEDDVVQQGGGRPQQRLQIGSGMARGGGGAEETARDGNIFE

SEQ ID NO: 141231 - protein, 47 aa, Heterodera glycines
MATFNVAHLITLIGVVSIASSVVADEQQNQNKTQNGGGGLKHLLGSD

SEQ ID NO: 141232 - protein, 127 aa, Heterodera glycines
MIRNWANLTISWEDKLDSLLKGQIFEEKYAHYIRIICKSASLADFYDFCGYAETRIRLQLLIDIERFDHIRLAHGKQIIANEQSTEEIENENGTKNEQKRQVTIKKIFVIFAMFITFTIAGISYERL

SEQ ID NO: 141233 - protein, 156 aa, Heterodera glycines
ISSVVAKRLGNPLRYGNPSRRCFLSLKTVALAKLTQTIHKVNVKEIRKLSVKEVESLSFIPPKMLCHIREEFLSIPQNQKGRVFYELSAEKRSRILAELLCLLLLFDGYFKYFTATNHPLPIIVRSRIHFANFSDCTGFLYVGKCVEKSARCDGMR

SEQ ID NO: 141234 - protein, 256 aa, Heterodera glycines
MAVRKCPTFAHRRAREQQVRGMASPFQRVQQHGQPTDGAVQKCHSLAEQKSATWGLEDVDYDSEPWALGGGLLPDMQRLVISSAKVGEIFTVKYAIPLSLTCYTIQPVDLLSLDKSLLFDLFALSDEQLLANSAISLPGNSSLRPEEFFFDLNFAPFLKYGAPSHHFAAECADGGEADDGEANSKGLCSLALGILNASGLVESFNSECIVKFRQKYYPSLSSEQQMEDDSSQSPGDVPMELMPFYFNLSIHSEHVA

SEQ ID NO: 141235 - protein, 341 aa, Heterodera glycines
TVSFGSAIEDQQLAVVWLRNWIVSVSLSGFINYICPETLKVCRVLRGHNKSITALTLSEDRRMAFTADFEGHITRWNVSDGSSERVTPQVHKSQVSGLSLTSGGLLISIGWDDSVAFIENALSPSIENVQSLSHRLSSQPRGVASIGQNGERVAVACHRSIFIFTDKKQSSVIDIKYEGTSVAIHPNGILLAVGGNDSRVHLYDLPTNGGAFVEKKVLQHAGAITSVNFSPNGKYLVATDIARKVVPYSVDDGFKVASEKEWSFHTARINCCAWSSNSRYIATGSLDTNVMVWDLQQSGEHPLVIRGAHSMSAINGVAWLSDNRLLTVGQDSNVKQWTLKL

SEQ ID NO: 141236 - protein, 138 aa, Heterodera glycines
MLDISRARQITIVLNNTRQGFKIVDTGNAATPPPQQQQQHHQQRQTQTPQQQHHQQRQTQTPPQQQHQQRQTQTPPPQQQRQHHQQTQQQQQQQQQERQQTQSPQAQQQQQILRPVPLNMFQFQPVNDDLLPGKMVCF

SEQ ID NO: 141237 - protein, 108 aa, Heterodera glycines
MLKDIMEPLVKFHKVGIHLDFKLKNLIVVEKMMKSKHKKKTLFGTKECLEKVKVKTFKLIDFDGSVLYLNREKKGKIAWDLMGYTEAFSAPELLQNLSLFTEGDIEVI

SEQ ID NO: 141238 - protein, 95 aa, Heterodera glycines; identical to SEQ ID NO: 136988

SEQ ID NO: 141239 - protein, 47 aa, Heterodera glycines
FLKLHYFIFLAKLIHKYFFRNCSETHQILFASYFRHSDAFTIKKGDE

SEQ ID NO: 141240 - protein, 53 aa, Heterodera glycines
MNNDKYGIFLLYMRYMDEHPCWTFIAFALAFCIIGTIGIASNGAVIYVTIKTK

SEQ ID NO: 141241 - protein, 74 aa, Heterodera glycines
MPINPTNVIHLMEEYYHGNAPNPSPITVEEKQLAEDFLKTLIFCANKSGEIEISEELVLDDFANFHQKEDQAVL

SEQ ID NO: 141242 - protein, 147 aa, Heterodera glycines
MNFDQRAEPNGIQQNPSAMIGRTARANNQWPNYPMPWPISANDEEDTTTHSITFSFSDIQQVIAQYSQDPNRDMFQLFLGPDANKIEKSNGQFDGLVTNGVLILSPNDNDDEGASVYLSASSSNNDDDENESDSEISPNCWKEELLK

SEQ ID NO: 141243 - protein, 164 aa, Heterodera glycines
MYNSYVRTLFRIFSKKYHCCVHVKNIYFFSLDGPVFWSRRVLYVFCCSCHFDRHERDLLRLMEQWKHRIERVCLVDRPLDYPFLPDSLFGFLANHLPQLEFVYLRELDLEKINRVTVERLSQHKRLKKMIVHGCRNYEVLQDFRNLPQLLVVKGDIQGLKVWRT

SEQ ID NO: 141244 - protein, 86 aa, Heterodera glycines
FAWRNTVLHTYHTSIIFFNYFFHFITQRSRLIRSSPNFAGKLLRTLQMLINFLRIFCLEEHSSSHLPHQHYFFLIIFFILSPNVLD

SEQ ID NO: 141245 - protein, 428 aa, Heterodera glycines
MPDLVHSGAEVISIQSTSEDCERQSNGSVCRVSGTTELTISLALKDDKGKIMGSLELILQFLRLHCNQQTLKWLRSYKINVISKRRCPTMGSCTKKMEDYENFPGNNFCKKGDAIWGHKCALPSSECFFYRTYAEPTSNTIWELIRCTGWDYELKMSLTLTIGNETKSKDLTMFPGLTVKWSKFSFTPEGLTPPISPILNDYFIVSKNDIIYGGKEFLTDLTCDDPNEAKNFSCKLNKEVCRECWINREKGEVECACSEKTIEKMTPKLPFTTAKLNIRKEGKKILSETEYSPVKLAIRVNGIKIVTVTDGTKCNIKPTNFSGCYNCGTGGTLNYVCQTEFGQAEAEIKCQNGPIFLAKCSENGHEQKDILPFEMADINMNCIVECPGGQTNFRLKGTLRYVPVDEKKFRRINTEEIMKTNPDGIVKH

SEQ ID NO: 141246 - protein, 28 aa, Heterodera glycines
MKKLEKSYIYSLMGVINFYRNLHIYHWI

SEQ ID NO: 141247 - protein, 44 aa, Heterodera glycines
MILWVALRKNSYEIMLNDTALDNRQFWPNDWCEGSGRENVTHIV

SEQ ID NO: 141248 - protein, 315 aa, Heterodera glycines
MLLLEEPITNQIEIKEPVKLTYTKFYRKICNGVQFTFRLQLQNETDQFKISLLHDRPEHHDRIGSTVFEIEVALPSNFTFVVHYYGIRTSNNGSLTLNVDDQREYEFKLIISDTYKFIVNRTLFYEQNTSITPAWAINFVREKKYVDGKNTFLTDILLYESQPFILQILMADDGFYGSISRSDYTKFCDYYVAQINHEKAIMPFPPFAIDHIQIDGDLKPVKGIKLIQVILPNNSTHFLDDKNKTINCTPLPYKQINRTDGLLKVNESIIVMMELRGFNPGEKQEVGVFFYNQAIGYHDLMRIRRWHFNGTVFFA

SEQ ID NO: 141249 - protein, 112 aa, Heterodera glycines
AVASIRRELLPLVSIITPNLPEAAALLACAPAEDEAQMREQGRALLAMGCRAVLMKGGHLSESESPDWLFTAEGEQRFTAPRVATRHTHGTGCTLSAALAALRPRHADWAAT

SEQ ID NO: 141250 - protein, 92 aa, Heterodera glycines; identical to SEQ ID NO: 131128
  unsure (1)..(92): unsure at all Xaa locations

SEQ ID NO: 141251 - protein, 326 aa, Heterodera glycines
SGKTSTLILPVCVQRTSKGITDLLLLNFVRLNTEISLVIGINQTNRHESLVIGINQTNRHELRTAMHHHPPNHEKAINLFPVLSQIKPQAPFPVLSQIKPQAPLLNRKTFVSGKLPTRANKSNRKTFVSGKLPTRANKSRRIASWHRLRSELGRYLIAFEPLTFFLINEDILAKCFRCSPSCYGPRISPLTQYEWPRLSLLTIISVSKTNNRTEILFYYSIFLTAAIILCILRAGITAAAGTRLALSILVKGFKLYPFRPASEIGLVISRHYLLALRVAISQAPSPESNPYPPLPVIISQAPSPESNPYPPLPVITMVVRYTTIES

SEQ ID NO: 141252 - protein, 72 aa, Heterodera glycines
MAYHNNSQQHLNPPRLCFQNRSLSARESGAAEDEGHRFDATGVDAFWQRTATPTTATRGRRQLSASTDQLLT

SEQ ID NO: 141253 - protein, 72 aa, Heterodera glycines
INCEKRNVALQSDPIALSGSVFDRFPLLCIDQSRVHADQSLLAKEQSDVDRGRGGGAASVHVGQKNGGENSA

SEQ ID NO: 141254 - protein, 236 aa, Heterodera glycines
MAKQTRDEGKFVELDGAEMGKVVVRFPPEASGYLHIGHAKAALLNQFYRHQFEGRLILRFDDTNPAKEDAHFEKVIEEDLRLLQVEWDKMSRTSDHFDALLDFCQQLLVAGKAYVDDTEAEQMRKEREERVESRNRGNDLILCRKIFGFSFMMVSLPRLFYPNFSKNQNKLPGTVPDSAVEQNLALWKEMQEGSERGQQCCVRIKMDMKHNNGALRDPTIYRCKGESHVRHGDKYK

SEQ ID NO: 141255 - protein, 51 aa, Heterodera glycines
LQIYWLKLHMRYISKFFDSVRRFDKDGFRSAISRSTFGNWSRIFSAITCNH

SEQ ID NO: 141256 - protein, 396 aa, Heterodera glycines
MDMKHNNGALRDPTIYRCKSESHVRHGDKYKVYPTYDFACPIVDSLEGVTHALRTTEYMDRDEQYNTICDSLGLRKPCIWAFARLNMTHTVMSKRKVGKSMAPSISNVCFVQLTWLVEQGFVSGWDDPRMPTVRGIIRRGLTVEGLKQFILAQGGSRSVVTMEWDKVWAFNRKVIDPVAPRYTALENASATLVPVTVRQFVAEECGQVPLHPKDYKKTLKVTWLAKRAENFAVKTVRFDHLISTPIIGKEEDWKEFVNRDSEHFGTLLAEPALQKVNCGDILQIQRKSFYICDAKTANSMTLIEIPDGKETNNADVDDGEMPTFCARLLPSCDDSEMATFCARLLPSGDDSEMATFCARLLPSGDDSEMATFCARLLPSGDDSEMATFCARLLPSW

SEQ ID NO: 141257 - protein, 53 aa, Heterodera glycines
MAKEQRKREKANIGDRRETRGRTTEGEEADKDGKGGGDNEGGESIGKRWRKWQ

SEQ ID NO: 141258 - protein, 51 aa, Heterodera glycines
  unsure (1)..(51): unsure at all Xaa locations
TVSFFLINTRNHQIKTTKQLRILPHEYTVXINNLCLLRXLSFLFRLFFPLA

SEQ ID NO: 141259 - protein, 33 aa, Heterodera glycines; identical to SEQ ID NO: 129788

SEQ ID NO: 141260 - protein, 217 aa, Heterodera glycines
MAFMGSDMTKISPFLPFRTSEEMIVSSLGRSNSRKQYTSQHNNHCSSGGGSVGRHALPPNNSLPKRQQPHHHSHHHMNNSSRGTPCNSGTGSGKSARVRHDAAAATATGRTAKRTVATTNGTQPQRNDNANSTHTNATSTTASATTAGNNIANHAMDTMAAMSSSTIDMDLLPAEVSSGYDSDLVSRIQDDIMQQTPPVQWNDISGLEEAKRLLTEA

SEQ ID NO: 141261 - protein, 129 aa, Heterodera glycines
MHAPLYGYNQSSVVAEPTIATTDSIPIRTSFVTPEGIYRQMTVNEFFRANRIQNQVAGSVCNTPVRFSFLRIPVTRLSFAEEALPSTSDVHHHELLRENYKWHSNEMNGYIDRICHNIGREIYVFDYTR

SEQ ID NO: 141262 - protein, 104 aa, Heterodera glycines
MCSVFAKHPILLFNNSSDIFYYEISIGNKKNFMLFGFAVKQQTTLYGYEKGTYAYDNYGNIFINGEQKESNVKYFYGVGDTVGIGVNSATRQIIFTKNGQRLGW

SEQ ID NO: 141263 - protein, 167 aa, Heterodera glycines
MLCKCGECFECEDEKRRLKRNRELNTRKEQIKNCTGNHLAPAMMELKRRNMKLFKKAYRPVKGVINKITGGPWNVECEVCHETFTYFMVEWENSRTDFSWGPGRTMVEADNINQKEILAHYVGQNDLLQNEVDYYQNLGNNPPLNVPPMGEDAIILTRDDGMPIGAE

SEQ ID NO: 141264 - protein, 269 aa, Heterodera glycines
MDPAFLAEFAPPEGAELHRHKIKKIDPDLLPTSAEADTSFDERTVPLLDKESISTLLVLFLLDQEKFDTVRLQKLLKLICIDPGTCDFTIWALLSMFDGLDKFKSVDGYEAPADGGKFQFGWINELRLQNVLNRPERVLLVTSNSGQQSLLHVLKEVSGRESVPGKFLKSLETFQYLCNQLKKVEEQRKKAQLTKKKDDTEKEGAEEQQQATTSKPQADTHAKEESDEATLVRNMVDELAPLWEELSNCLSLLEKAEDSNMAVFVSSKW

SEQ ID NO: 141265 - protein, 20 aa, Heterodera glycines
FVFTDLQSKWLMPFCRYFID

SEQ ID NO: 141266 - protein, 610 aa, Heterodera glycines
MTKRLLPDQQQQGFHPLHSSVPIYAKANLRGDFNMEKLVKLESELRKGTERHRLLVKGILKLVKSSSTQPLDNELAHNALTLLLRLVSLDGMSHEFLNGDGVKTLLEMKRNPISAQMVTNGTTTPPTLNTLATLILRQCIDSDVALLQSAFEQMITATCNGQPISMQEITSRRHAMRTKRYQKDVKLLSQIVTELTQFDTFADADKNTRLMQPPNLLKLIAEVLRSYPKVAVPIFIEQSLGEKSVLRWIIERFLLSAPVNDLSDTAHLAKTVVSELVSNSSSQRITDHVVGNIKSLLIECGDFDCTVVTSDESNNGAYVKFADKVTILAKLTMHLRECLQLHEKPGIDTVNTLLKLLEGMMTKNGAEFGAMGARSYLLPSFSYDPRSFQYYDDDDLTLSRATFEEMGRPAANIDPPIASTPREDQNAHQENHVAIPNEHGDVEQLDESMGEPGHLRGDIIDSMLDTTQEENEEGGESEDESPHDSEEEDMDTGEELTQQRPAVHEGAMEDDHISEAADANEQVLQSHLVADDDFEEMDDDDDGEEDEEDETEVEGGGELADFDDTLLDYVTDFNALAQQMHDIRRRINLNIDTNALTIRPQQVQKRNDEY

SEQ ID NO: 141267 - protein, 253 aa, Heterodera glycines
MQNEVMDSDEDEQLTGNGAAEEAMLDQGEWGHQSTEEKCIYYSTINILRKGTTFSEKRIGKKKLAKLQAKAEAKALREQVKALEQTEREERKQREEEIRKEEEKKRQLEEEEKRKRAEKRRLEKEEKDRREMEEYLKIKGAFEVHEQGFDYDENEDNADNLLESFVNFVRKKKVIRCLIGLFYCHSPQVVHVDELASNFKSKPTDIVDRLKTLLQQKRLTGLFDDRGVLGFRLSHQLSLPLRTFCFYNRGGIA

SEQ ID NO: 141268 - protein, 45 aa, Heterodera glycines
MGEQVKRHGRTVKQFLLCYRNKKSLREGTADGINGIRGHLCRQKA

SEQ ID NO: 141269 - protein, 88 aa, Heterodera glycines
MDIHSVQQAKKVAEQLEREKRIRRLPMSETINDLIRYTQEMQKDDCKCFEGILITDLDGLNFDLFIPPNHAKSLRFNFCKQSKKFLIL

SEQ ID NO: 141270 - protein, 143 aa, Heterodera glycines
MGKYKAMAKTLKTFKVKASRKQLEKAKRARRRKTNGELGTEEGGTNNGDGWEGGKGGNDQEKRRTIEEKRNAICWDRKRTKKRLAKDSKTKAPGEAQQGVTTNRQITKKKAEESDEKSEKGGTEEGKGRRMQWKKTKNSRLSL

SEQ ID NO: 141271 - protein, 145 aa, Heterodera glycines
MHRQLRIGWFDQHSNEALNQEQSAMDYLMVKYQIDQQSARKNLGMVGLASHAHTVHIKNLSGGQKSRVALAELSLKQPDILILDEPTNNLDIESIQALAEGIEDFSGGVVMVTHDERLIRATDCRLWVVEDQVDGEEETPSHCEI

SEQ ID NO: 141272 - protein, 231 aa, Heterodera glycines
MSGRKSLERNHHERSSKTSHHRSAVIKFSGEECDSKDRKSSHIRRTDSDKIMRSVNSVKNRLKASLNAAIEAESTKQNTGKREMSSSNDVADSFARQAEINRIEEPGFRPSSFKSDADTSRKVINSVLFLIVFFKNNSLEKMNDKGKTNATKHDRAMFGPIWAGKELEKGRKTAQSEAKRDTRQHHRETNEKFEGEAQCQPGTRFTLAHELIQSNSKIIFRHLQMWKKSFV

SEQ ID NO: 141273 - protein, 45 aa, Heterodera glycines; identical to SEQ ID NO: 137718

SEQ ID NO: 141274 - protein, 317 aa, Heterodera glycines
TMTKIKEDIGEAFVWISVDETTDKMGRMIANLLLGKLDGKKWHPPHLISVKALEKVDSGAMARFVNEGLDSFSANIKKERVLFLVTGRMIANLLLGKLDGKKWHPPHLISVKALEKVDSGAMARFVNEGLDSFSANIKKERVLFLVTDGAAYMKKAGRQLKVFYTNLLHVTCLCHALHRVAEKVRDEFAQVVNSFNANDAVCVKECQLSFNNSVWQDLAYIHSNFGQLSAAITKLETQGMTIFDAMDVFAGVHNQMDSVYGEKATEIRKKFSDIVAKNNGIEKISQFCQILSGKNTESDVPPNLIPFYKFAPLTSCD

SEQ ID NO: 141275 - protein, 67 aa, Heterodera glycines
VGHTVDAERNLINLYPQCHLITADPSAEINDALTHQIGGKFVHAAIGGKTAMGQPVNVRREGIFSKN

SEQ ID NO: 141276 - protein, 67 aa, Heterodera glycines
MDEEIKGGKISKELENYHELLLRLFKIKFKQLINQNDKFVEEMLTKEWVIELLCRQFKKRSIKKNDC

SEQ ID NO: 141277 - protein, 345 aa, Heterodera glycines
MDDSSTPIDRDEVMVNFKRNLAFINNRYQIALPWNDRVGTLPTNYHQAKARLISLINKLRALNLVNEYQAILDEQLQKSVIELVDSPEQSIGPVHYLPHRAVVRTDKTTTKIRIVMDASAKPKHSPSAPSLNECLHTGPLLLKDLTGILLRFRRMEHVLLADIEKAFLQLGVREQDRDATRFLWLRNPTNNDLNSLKREDILVFRFCRVSFGLTVSPFLLNATVREHLALFDSTLAKRIDENLYVDNILIEMWPNEQLQPVVEEVKSIFKAAGMNIREFYGSNIDGIKQLPSEDQAKELENTKVLGITWKPKFNRIVFKMPTFDGKITKRTILSHIAQVYDPARF

SEQ ID NO: 141278 - protein, 75 aa, Heterodera glycines; identical to SEQ ID NO: 138893

SEQ ID NO: 141279 - protein, 31 aa, Heterodera glycines
MAHFFEIMGWEKSKTSVFRVQAVKMLDVKIF

SEQ ID NO: 141280 - protein, 65 aa, Heterodera glycines
MDSLRSLCFDFFLAANEYAIEKGLLPKNEQNAEDYSDWLCSAIGLEHRPFLPYTNAVVNVIKKII

SEQ ID NO: 141281 - protein, 76 aa, Heterodera glycines
MKIGVLLTRSEWYRHNGLGDGDRASLHGQFRGCRPANGGAPYACRNAIQSGQISSVKLNNHYTDTRKWKEELGAKH

SEQ ID NO: 141282 - protein, 278 aa, Heterodera glycines
LISLMQYFNWTRFGFVLQSDSNGVSGGCTQKAKEISMIILSSVSSSVSITYKVRIFNTQTSDLNTIVTGLRNRARIILLCFDDVTQLRTFLFDGGLKTKDYLYIIPDNDLILSFDYLYIIPDNDLILSFNLNLSRMPFWKQGAVNCTNYDGRDADGRDADAEVIGRLTFRWHYDITQSALSNRNYLGYFGRVINRTRDWPFYCPESDCSNVANGSVYSLLLYDAIYNGSVYSLLLYDAIYNYGMALNETFRQFGIRPEVYRNGTLLAQNNRKTFMGKK

SEQ ID NO: 141283 - protein, 162 aa, Heterodera glycines
EGFDNLYDLEFLRMLSLRDCRWIDDWVLSRIGGMFANTLEMLDLSNCHRISAKGLLGLRSLSKLRFLRLDGLGKTEGIAKSALLLEETLPNLVVIGIDYEHAMAEMEAEKKLLSNDRVLIDAKGTKFSNGTNGEKSVKLGRILEIECINAEEDGYQSLLIPA

SEQ ID NO: 141284 - protein, 124 aa, Heterodera glycines
MGCQVTTVAKFATIRFNSTSNKVDDKNYDGFLARFPRSNSNVFIHPKYLTNEFLGESYYDLALIKVAFLAQLKKLNFISRKFVQIPDEHVEFTSKLPPVCLHCGSIERFKNGTSFVAGWGKTDG

SEQ ID NO: 141285 - protein, 234 aa, Heterodera glycines
MNATPNDQIFKLCSGKDQCWTVIIYAFIVTFLTIGGVLFNFSVIFITIRTKSFRGTVNILFAFYSLCEIVHLGGNFLSIFSAFSGQYFMPYKTLITFAFAPIICGTCAVILLLFIGIERLSAVLFPFKKINQNSFLAIVLVFNIIQIIMLTIIYSHCEDTQLDSVEVFANYYEVAVLFYTVRFLNIFPIFFKIITLIKSQCSTSGLFEATMTKAITTRPNSTIEYSVHFSQLSQ

SEQ ID NO: 141286 - protein, 77 aa, Heterodera glycines
MGGQRRAIRWTSDGTSKIHGDQKHSVPMYMFSFSMIRLIIDEPTELCATLFQQHARTMLDQVDIMLLLHRQDGEATP

SEQ ID NO: 141287 - protein, 106 aa, Heterodera glycines
MPRGGEKGPKTIEEVHEEAEKEQQVNEMERIEHERKKENEKMQQQTTRKGSRPNYGGRSSADRRSAAAANVSSLLPSSRAESRIAGLSKLREVDSFVLGGGEIPTE

SEQ ID NO: 141288 - protein, 210 aa, Heterodera glycines
FQQKQTSGLAQACAWAAKETEQVVMTQRWPGIRASRTWEEPSRRWTQLRGQCTGTHTSTPDFPVRTLPQAKGLRALMSRVFSNASTLVPRQGVPIHELIGLVNHGNTPLTRIPTPPPTLGSASPVLSSPQHLCLRPHLHKSINSPNFFNTQTSCMFIHFDSCQSLEKLRPRQRWHPSSSHHRSMPSTSASKHLNPDGRAPHSEIASFFQP

SEQ ID NO: 141289 - protein, 89 aa, Heterodera glycines
MAQLPLEDIATLPTQKGVFNAPFDNKATYYVRVINLGRSASATPSRPPNRSARSNSSSSTTSDGRTLRQLNMDMIGSHPTVPKLSFCPP

SEQ ID NO: 141290 - protein, 42 aa, Heterodera glycines
MGNIVFCVQTKECVLFVSIYGRLCADYRKTRERVFVQFNHFI

SEQ ID NO: 141291 - protein, 70 aa, Heterodera glycines
MQRNAKRPPMNGTGGPSRVLIGIYIESMGNFQAADMSNTERCMQLGASEEQKIINKWPIKSNISGELSDG

SEQ ID NO: 141292 - protein, 304 aa, Heterodera glycines
AYVASQVNVSWFKIGATRYNPEIGLPEFKIVQLTPESCDGSYMYAIMSGTFKYDKFSCLEAVIHLNRQIGYHVVQSFIPTGLIVMISWVSFWIDRRAVPARVTLSFTTLLSLSTLGNGLRFNLPQVAYAKAIDFWFGSCMFFVFLSLVEFAAVNSYMREAEKYERDDDFSSTSRSPVLPFPSSHQKNSKKKSGNKSPILSANNKNDYNNNNKKDEQENETKAIGAKLHNWTSNAIAIPSRFGRCADGGAAGDTKRSITTHNQQQQNGTMRMIRRGISPRLFSKFPANSPSFANEKRENNHRFFE

SEQ ID NO: 141293 - protein, 36 aa, Heterodera glycines
MHSFKLFASLFLVLCVISLVICQDKPAAVKRGHLLN

SEQ ID NO: 141294 - protein, 43 aa, Heterodera glycines
PHKITQFSLTNLRKKCILSSFLHRSFLYFVWFHLSSARTSQQQ

SEQ ID NO: 141295 - protein, 25 aa, Heterodera glycines
TCTCGVVVKLSTFHNFSPGFNSPLG

SEQ ID NO: 141296 - protein, 63 aa, Heterodera glycines
MEEMVVKWASVVFPEFGIRYNGADIMVANFLSVVRRITVTPPIKLTRFFLNTFMYSMRQSSRM

SEQ ID NO: 141297 - protein, 29 aa, Heterodera glycines
WLTKTSSTWVLSILFQIAPNFFYSLTRPN

SEQ ID NO: 141298 - protein, 87 aa, Heterodera glycines
MSLNSRLSNHTGDEVVDNESHSPAVATPPVPKSKKRTAASLKQNDSGNNKSLSTLIEAAKMMEGGSSSEEHHQDGVSMPNSPAGSSG

SEQ ID NO: 141299 - protein, 70 aa, Heterodera glycines
GISVLYSMVDKTTRCGAPMKVWQPTRRKRLRAFWMRRIGMWRPFDRICPPLPLRGALFISSMPVCPTIHR

SEQ ID NO: 141300 - protein, 293 aa, Heterodera glycines
FRKTKLQKNKNILYANQPKSIYICEALNLVTMTTCSCDWCSIQSYYAPRWGTSVWGEPTLVKGCLSGTMLRRGVKSHCETADDCQEPFTCFCDGKDYCNKRSRKTEMEPIQLFTCICEGTHCRFTCICEGTHCREKKTCTGELCTFVTNHRSKERERELCTFVTNHRSKERERGCVNSSVPLVERRSAGACMMPPITGAMHHTVAKRAEDLLRTESCVCQGDFCNAERPKPVPENSRERPKPVPENSRCTAFAQFELLGQKMKSKKTSCTGLLGQKMKSKKTSCTGEFCFRAD

SEQ ID NO: 141301 - protein, 36 aa, Heterodera glycines
MAHANVLAFVVLPSVVALPRVGQKRLGQIVFARRKN

SEQ ID NO: 141302 - protein, 111 aa, Heterodera glycines
MIRKRKINRSNKNGLKIRRRADDSEGAEEAKEDATGPQHSPSSSADEADDGQQILANSAEGEQQKEQKDEEDEERTEPHSVALSFDEKGEVAATIVTGRIQEVVHVLANFK

SEQ ID NO: 141303 - protein, 89 aa, Heterodera glycines
MIRKRKINRSNKNGLKIRRRADDSEGAEEAKEDATGPQHSPSSSADEADDGQQILANSAEGEQQNEQKDEEDEERTEPHSVALSFDEKG

SEQ ID NO: 141304 - protein, 235 aa, Heterodera glycines
MLLTFPFCLLLIFAKSSNCQMQNFNCFAQNGPNRRLSPAQLADTAFWHEQFQKIELINSSDFKLKEFICELSQKQRIFEAVFGTLPRPKKCISCENCANDQTKSGGKNYSRRKRLLQFISKAIQIDWDGNGLLNRSKSLNAFKGISPVVVDRQKGDEHDEGEENEQLDCAICLGPIDYGTEVRPLPVCKNNDGTNEATLIEITNGRTEENEEGRREEEEGRRTTAEEGGAEIDQV

SEQ ID NO: 141305 - protein, 102 aa, Heterodera glycines
MANITAGDTIFLHFNWNENKNGWWWGELWKFLAKKSFKFSNEKKWPNFKHKKALKMLRFFAILFILSASAAPRALNFGTNLEKTSPIVAVSSIKLNQKEPPV

SEQ ID NO: 141306 - protein, 19 aa, Heterodera glycines
EPMNSCIGCKYRRCCTPNS

SEQ ID NO: 141307 - protein, 164 aa, Heterodera glycines
MPQVVPAAVARRKRSIFGNFFAGLFHRNNETSTEGRRPSNGTESAEEAEKVKEKEEEKEEEEKEEEKKEKEEEEKEEKKEEEEKEEEEKEEKKKEKEEEEKEEKKEEEEKEEEKEEDEEKEEEKEKDNATDQSAVGREKRSPFGIFMKYKKNGKQLSIGQHATN

SEQ ID NO: 141308 - protein, 189 aa, Heterodera glycines
MEIGQNANCHTIEENGTKQMQIVNSDGNPLPIPQNPLPNKVTGFRGIQIKYIDQNVVTFLRRFHRFFAVCSTDLYLTTGNGHILDFVLLNIWPMFRHSMHVMFLSSIAFRRLRQLAPSLLNDCPSLHTILFDGDILPEFPPDESANASDGQAQMVVYASSEWYAQVAQMLCEFSGIPMLLLLLLFTLTF

SEQ ID NO: 141309 - protein, 121 aa, Heterodera glycines
AKPKKQQQHNDYQELIDSLTVASTLLPSQPEQHPPIIAQTMDTQPMDFVDTMSAMTTFLPSQSTTNSAPVPKSQQSETLVDVLSAAVSFLPSEGEKTKEQQHQTDDDVSTVKANLDVKEED

SEQ ID NO: 141310 - protein, 303 aa, Heterodera glycines
MENRSPKRPSNYRIDHIPSKKPRQGLVINQILGVVQQGGGETSSSKEAPKDYVQKLGSSVEHVAKFHYTKMKSRFSISDVPSNPERLLAGIFQHCIDSATKDSREHEIEPTHLGCLISSPLLSEGAITIPTRKISDNTIDTILNLFLKVAQSKQQKNVSLWGDPFTVTITTVDRSGLQFKRRVKGGTRRKIASVHHRINDQCLIKINNHTGDNYCLFYALLATMIAKTRGWPRWQFGRYLNNQHGQQGQLHHDAVELMKQVKAPMDLDGYDADTFVPLIVDHWNNMQQQHRFAVFIFWLVGTV

SEQ ID NO: 141311 - protein, 54 aa, Heterodera glycines
MPKEREKKWQKKKEIEKILTAIENERKRTDFQKIMKPFEQFLKQQIQGEEIRDG

SEQ ID NO: 141312 - protein, 80 aa, Heterodera glycines
MKEDLLQVELIPLAEEKAEKSEAIETGEMDEEMPIELSVYELGMYRRFKHMALLIGDIGRQMFTVECTVNLRKELFICPF

SEQ ID NO: 141313 - protein, 103 aa, Heterodera glycines
MGPYIKYDFVEGNCADFTKSLLKLISWTKSPEMKSDGTEGKENGKYPPEKPIVHKQIELAKVDFLQNPRLVQLVKDGPEIIKGFMRAVTQTVTAIGGMARRRN

SEQ ID NO: 141314 - protein, 18 aa, Heterodera glycines
YREAIPEGFGLPINLGAS

SEQ ID NO: 141315 - protein, 33 aa, Heterodera glycines
MYREGRRKIAIAREIGVTHSCVSKVIRRILSDH

SEQ ID NO: 141316 - protein, 17 aa, Heterodera glycines
MFGQKDIKFGCLTVELV

SEQ ID NO: 141317 - protein, 162 aa, Heterodera glycines
MSSDESTTSSASVVSVQLREVPIKDFKDVLPVLQKTLNELEHPFIKKAEEISGMEPEYTQWLVYWCVFAEFCQFDYLFGSINGPSAAVRASEDRLSALLGPSANLWRSQLVREAYPQSACRDERIGQDEEDVLIEQIMYHCVMSRMILCCDSYIMCYVLYVE

SEQ ID NO: 141318 - protein, 147 aa, Heterodera glycines
MQLKQALKRGVSSGDLKQVRGIGASGSFKLGDGTQPTLAKASPAKKKSPVKKAKKAAPPAPAAVPKKTSPKVPAPAAVKKVAVKKPTPKKAPKAIARKVAAPPPPAPAAKKAPVPSSTATKGKKTTAKKAVTTAKLPASPPPAAPPA

SEQ ID NO: 141319 - protein, 230 aa, Heterodera glycines
MLSHLNSNLELFGEESVHAFDDWADRFKDYLSLTGKNWTEDEKVTRLKLALKDTPRELFKELKSNQITTFTSALEALRAKLDSPQRREVAKRTLSVCRQREDETVAQFLRRLMPLIDSTNPSLTGDLRKEKICEEFLGRLRPNMSFLIRLVGLTQPKNLEMVKAQAEELEALLLSTGGGVTQITQLINSMTEQRGNEEPNEQNEENSNNNGATMVGNSEMPLHMTRSART

SEQ ID NO: 141320 - protein, 44 aa, Heterodera glycines
MNVNKMRQFVVSSQNVKTQLGHISVCAMLVSLRDLTAKAASVKK

SEQ ID NO: 141321 - protein, 145 aa, Heterodera glycines
MAIKQSLKRVLKADRERKKAEVRKRLEEAGRAKKAKKGFLTPERKKKLRKLLMLKATEKLLMLKATEDLKLQQQQRAEERQKVLHERIPQVPDLNSDSKVMNKGEKREREMGRRERGRKKGVIRQSNCQMAMSTTAQLLVLGEVS

SEQ ID NO: 141322 - protein, 84 aa, Heterodera glycines
MDAILATDWLHNAFPERKTTTTTTTTISSVGEELDDAVKAVRIYYYVKHGVKLVYPQLPCVLQFGGGDHCSLFPLECLSVIKDA

SEQ ID NO: 141323 - protein, 28 aa, Heterodera glycines
MLRKRQTQKLAGGKLVSICDEGILVSCW

SEQ ID NO: 141324 - protein, 52 aa, Heterodera glycines
KIFYRTGSGRINPANPAILQILHLKSAGSCAGLRILGNFKKFCINKKKSFKV

SEQ ID NO: 141325 - protein, 32 aa, Heterodera glycines
MCYVSAVFLRLCFGVHRGGGGSSPNFMKGISH

SEQ ID NO: 141326 - protein, 43 aa, Heterodera glycines
MGVWHLFICISGQVAKPSDFIISRLGTIPHWDRIFFIFSLPLF

SEQ ID NO: 141327 - protein, 195 aa, Heterodera glycines
RQWRRNIMDIWAHTKNIEKDSFAMGKFEEIFGRLIRFYEPIFGRLIRFYEPKALLPKDVVFELHCRDFINRHAISDKHYLREIGKGLYLDEIGKGLYLDLCAYDHSCRPNTVYSCRSFVATLRPLLCAYDHSCRPNTVYSCRSFVATLRPLHANVKMLDRSTTSYSYIDLLCAKRDRRKLLKECAKRDRRKLLKE

SEQ ID NO: 141328 - protein, 103 aa, Heterodera glycines
MAFMAIIMDFWCNISRIFWYNEKKIRQRIEQLLSKIKGKKLDDIAKAMVNINVDEDENQKGKNLKELLLWENGPENMSIYRALTICIKNAISEFNKRLIKQKV

SEQ ID NO: 141329 - protein, 116 aa, Heterodera glycines
PFLDRGAICLVYSDNERDSSLLNSWLIASGHNFLEGFSALSRTKLSNNRSVMPLDARGCTRATLAKSACLPSPKGVVKPVKICLDWDRTLLLLSVNEEFLAGASPQLALNTSLPFV

SEQ ID NO: 141330 - protein, 183 aa, Heterodera glycines
MEKQCLEYLGTITLFARAIQAKMNFIEQMSKHWANKSVNGIAKKWEHFIFNQNIVFEFEQQSINFVENFIQIIDENETDKIKNYGNYSPQSPNDHQTTQFGTYNSDEFNAIFATLEMHECSMLIAKGVINFEMIKQIKLAHYLNGETFSNAGNPPPKKCLCVDAKIEQQYVNKLQKMLNQKKL

SEQ ID NO: 141331 - protein, 257 aa, Heterodera glycines
RGAGASTAQFGFHSVGRQPMQTDRDGRLRNAVQVRDRGHLRKVEERFPGTEITRPFWHSLRLSKIARPGRPLKRTISDNLRNFDSNTRQRHSDDAPVPCSFSSHCKDELSKRHSEDDFYAPSKASADRLLSSFIPIQHQHMLHQYLNDHQTTFDQNRNQQRQRHETSTSSNNSNTTITDNNNKPQPAQQQQQNHHHMLLSIQQAIVAAAAMAATVQHQQQQQQQLRQQQQNGTNKSNAIVGDEQQRHMPLQQNVQME

SEQ ID NO: 141332 - protein, 144 aa, Heterodera glycines
MTRWKRRVTARATGEWCGEQIDSLGRPTATPPHAEPFEYGGGPRRESVDGPMPTLSRLVRQRKTHKKQIHNLAIVNELKLARQSQERTMTRGRAEKRRSAELLHQRHIRLNRRQQMKTNSVTTTTAKSKPTEEKEREATETDSK

SEQ ID NO: 141333 - protein, 47 aa, Heterodera glycines
FCGIKYHFESVSVASLSFSSVGLLLAVVVVTEFVFICCLLFSLMCLW

SEQ ID NO: 141334 - protein, 88 aa, Heterodera glycines
MSKFPSNLSQGRFVALIVHPLSVRRRLAVESSAVKLNANEVPTDRNIVVNDEQSLNVCEAIAEQPMAILVTDNGTQLLRTNAVRLQYL

SEQ ID NO: 141335 - protein, 56 aa, Heterodera glycines
THCQRLRQQLPQDRPKSQSVDYGKSPSPLDPNPRLKSPPGTAPLAQSARNFWNSVH

SEQ ID NO: 141336 - protein, 73 aa, Heterodera glycines
MQTGHKPLSDEGSCPFTENLDTVLEEICKQKNKTSVCQTGDDWKARAKSIITKVAWSYANVATALAIVKNRYA

SEQ ID NO: 141337 - protein, 95 aa, Heterodera glycines; identical to SEQ ID NO: 136988

SEQ ID NO: 141338 - protein, 105 aa, Heterodera glycines
MPTNCRRHRLPLLMKLKLIRRFLHMCGQYLPLLYCLLSYSAAVVVCCVPCQHPLRRKVPKTMPNGGHCRQQQQRGTMAATMVALPYQQDFVACAAADYVDDDAEI

SEQ ID NO: 141339 - protein, 60 aa, Heterodera glycines
MRRDHEEEAGAAAHPPVPKRALFVHGLPSGVRQKQLPRAHQMHHGGPKVRRRETCAKRDK

SEQ ID NO: 141340 - protein, 138 aa, Heterodera glycines
GEQKQDAWVSQVRAAIRQVDEPRLKNLLRSVQCHTNIPRKEAKFVNFLQNSLRIRDRALCVDAWNAIKRAADAEAAKAKRTTAEDAVVTTATEEKETAEHNGDDADKIATGRTDNASATTENMEGQAEEENMEDETAK

SEQ ID NO: 141341 - protein, 53 aa, Heterodera glycines
MTNSTHFVVKISKIKLQGTGNFDKNRDRDLPGPEKSGPGPRFSSGTGTNREFS

SEQ ID NO: 141342 - protein, 102 aa, Heterodera glycines
MFLTNVIALGEFSSPFPGQKGAPSEAPRLANETLNSVDWPTSAPNVDRFAVADWWQFGIDAGCLGGHCEQCGDTECDPCGHRSAIQPKGHPKENEMHQQIVF

SEQ ID NO: 141343 - protein, 107 aa, Heterodera glycines
KMDLKLILLNIFSYYLLQLYIPSTMLVIVSWVSFWLDRTAVPARVTLGVTTLLTMTTQTSGINAKLPPVSYSKAIDIWCGACLAFIFSALLEFACVTYISSRMFYKR

SEQ ID NO: 141344 - protein, 30 aa, Heterodera glycines
MTFLRATFGENTDQDQDYGLGIHTDYRLTD

SEQ ID NO: 141345 - protein, 118 aa, Heterodera glycines
MKSIHCNQLKIEYKIISRELNRQIKLFYNEKETKVVPKGNSCIHRHIRNKLGQNASLPPLVSSNGVIVHEKADKCNYTSLWYSAILPSATQCIAVKMCRGPMIDAVQNGSYAVSLLAL

SEQ ID NO: 141346 - protein, 82 aa, Heterodera glycines
MFAKLLLLLFVCIIGKKISLCEQILSPPTQDYSECGISDFDPFNEQRSAEDTEISHVVKGYTVDDDRALPWMATLQRLEGLF

SEQ ID NO: 141347 - protein, 26 aa, Heterodera glycines
GAGELMPNYNGCREYVWSYSTDRLKM

SEQ ID NO: 141348 - protein, 19 aa, Heterodera glycines
TFSFSSLALPNTHTIFEML

SEQ ID NO: 141349 - protein, 123 aa, Heterodera glycines
MCQKYPTPKLSDQLMVGKMRMISMEKCIEYTSKDSNKEFTNLSNVLPFVNNTRALLTEFNSAHLKDKLCVIAEPSLAEKGDSGGPLMFKTGKNNNWAQVGVASTSTCNPEKPKSTDGLTIQKV

SEQ ID NO: 141350 - protein, 92 aa, Heterodera glycines; identical to SEQ ID NO: 131693

SEQ ID NO: 141351 - protein, 204 aa, Heterodera glycines
RINGLCIDRSRNAWALAWEQAFISLLKSYKSDQFSVSFMAERSLEDEISRQSNADAFTVFLSYTFMFIYVAIALGHMRRCRASLVHSKFTLGICGIIGCVLSVSSSIGLFALFNMSATLIILEVEPFLVLAIGVDNIFILVHSYQRLANDVDRPLPDRRLANDVDRPLPDRIAQICEDVIPSMMLSSLSECLCFSLGGLNGAKK

SEQ ID NO: 141352 - protein, 126 aa, Heterodera glycines
MPAVQMFSLYASVAILLNFILQLTCFLAVFIWDIQRQESGHLELCGFCVSPVPFQPTDTESRIERWMRDYYAPALLYKFSRCAVIFLFAIWFSLSSAIMNRISAGLDPKIAVPEVQKKMRKGKAFN

SEQ ID NO: 141353 - protein, 19 aa, Heterodera glycines
EPVNSCIGCKCRRCCTPNS

SEQ ID NO: 141354 - protein, 50 aa, Heterodera glycines; identical to SEQ ID NO: 135818

SEQ ID NO: 141355 - protein, 127 aa, Heterodera glycines; identical to SEQ ID NO: 133730

SEQ ID NO: 141356 - protein, 150 aa, Heterodera glycines
  unsure (1)..(150): unsure at all Xaa locations
TERRTANPSLEASSPTYSNKRVNADQIRQLCPFPPHXFTSSLTLSSKCFATFPHGTCSLSDSWPYLVLDEVYHLIWAAIPNNPTPRHVKMGRHRQLDRSCTFSGAPVKGNLNKRANPCSRSIRYTSQPQRSCDSALDSSQFTRRYYGNPR

SEQ ID NO: 141357 - protein, 56 aa, Heterodera glycines
MFFIGITDLLMIPISSIITGYLAITGAVFCTAPTFIYVCGACAIGFRPSVFDQYHQ

SEQ ID NO: 141358 - protein, 29 aa, Heterodera glycines
MSYIFLDFIAYYFYNFGDYDQYFPKWVHY

SEQ ID NO: 141359 - protein, 18 aa, Heterodera glycines
ILFDRARQEKATVGTKFA

SEQ ID NO: 141360 - protein, 90 aa, Heterodera glycines
VQRNEVERHGLPLTDKEHEQWETMAIGGGGADQQQQQQPLQDHLDRLARSREAMVIDGEPQQMISHDEHGQPIGMTTVQVGVINKFIITN

SEQ ID NO: 141361 - protein, 63 aa, Heterodera glycines
MCAGKIGRKDGSAKSMWWHLEGLHMKSSYAEKEMESKKRKRSVLKGTKDKDLKALYAKAYPNL

SEQ ID NO: 141362 - protein, 36 aa, Heterodera glycines
MPTALPNAGPKLRDMMKYAPPPSTTPLVATADTLMQ

SEQ ID NO: 141363 - protein, 128 aa, Heterodera glycines
AKLGLMLGVYLPTIQHILGVTMFIRLAWIVGVAGVSHTFMMLFICCLCTFLTCISVSAVATNGVVEGGGAYFIISRNLGPAFGSAVGILFYLANTVATSMYLVGGIEILLLYLYPGMTIGGKNAHTDT

SEQ ID NO: 141364 - protein, 80 aa, Heterodera glycines
MASNYQGFGFTPLYEKEEPASFYVDKKKIEERAKLGVMLGVYLPTIQHILGVTMFIRLAWIVGVAGVSHTFLMLFICCLC

SEQ ID NO: 141365 - protein, 422 aa, Heterodera glycines
MNCPEDLIVGGIRRDAQGVQIRHAEAFQTVFLVASAGDVYQRLIRSKNHRMEKFGVSFTQAHAGAIIAAWQRNFTKSIYDHTLNKPAQGIRVVHPLASTSIQDMLEQFSEFQFFVIFIGYVLMIIYAGWSQVHWQGWWFSVKSSCLLAIIGVLVITLASVAGLGLSTAMNIHFNAATTQIVPFLTLGLGIDDMFLLLHNYNDVLEAVRQKEVAVLLKETGMSVLITSINNILAFLTGCILPIPALRSFCGQVAILLTSNVLCIILLFPAFIALDLRRRKAGHRDMSFAALFCCCCNSSCFIGGKKGGGIENGGQKHAKMMEGGAFKKRKECSSRNQLVKTDSTVTTHSSEIDLQQMSAAVFGPPSSGPLMANVNFGPSSSPPSASNNKPVTSSATKSLHKWYTLVGFLHGYYIPLLRRPIAK

SEQ ID NO: 141366 - protein, 16 aa, Heterodera glycines
FRNKIQNFNGHLAQRN

SEQ ID NO: 141367 - protein, 465 aa, Heterodera glycines
ANCTGWWKFHVQMNIIHFISRFMRTWLHSLQSSLDRAAKIGIFPDDDLKKMAADALARTDDFLLARKLLCSAGQRFNCTEMIQRGAKLIEDGRINPRGFYNYLTAWFYQDNMMYYVSQAYYVSQAAFFPTPLPWHFSAADESVVPPADPLLYSQIPFYMNGLTDTQSIVQMIKEIRAICDRYSADGLPVYPSGIPFTFWEQYLKLTFYLVSAILIIGVAIIGVAVLLVISIIIFNPWAAAMVAIIVVTMFNPWAAAMVAIIVVTMTVELAGFMGVFGVKMNPISAVTLITAVGIGVEFTAHVVLAFLTSLGSRDERMVACLEHMFIPVEHMFIPVIHGGLSTLLGIVMLAFSEFDFVVKYFFVVMTALVIIGLINGLALLPVLLSLIGPPCEITPVNGITPVNGSNLLPCPASERYRPEDSPNCFTTPSSTHHQQSDEQKRRRGCKRMLAVDDSSSASSTEDGAG

SEQ ID NO: 141368 - protein, 77 aa, Heterodera glycines
MATLDAVEEPLDLIRLSLNERVYVKLRQERELRGRLHAFDQHLNMILADVEETVTITETDEETFEEIHKPSKRTIPM

SEQ ID NO: 141369 - protein, 328 aa, Heterodera glycines
LFSLKTVKRLAERAAKAVKGIKEEEEEKESNDEDDDEEEKDEEKATTKMTKMEKEFDDGLNEAIEEEDEHKLGTKSAKKPKLTPEQLAMGEEMIYSKKRAQDLEDWAWNRYTSNDEALPEWFVSDEKRHCQLEPPVDKERVDFYAKREQRELNTRPIKKVAEAKARKRQRRIRRMEKAKKKAEGIVDNEQMEHGEKVRELRRLYKKAGSNEKRKVTYQVVTKGKRGSMSRPDGHYRLVDKRMKKDMRKQSKTGTKRTNKAKANTFGRKGKMREKSQNPKERMNSERKDGPKQKRKNGKNGGTRRMGGEKRKSGKPNGTRMGGERKRKR

SEQ ID NO: 141370 - protein, 34 aa, Heterodera glycines
LFSLKTVKRLAERAAKAVKGIKEEEEEKESNDED

SEQ ID NO: 141371 - protein, 24 aa, Heterodera glycines
MEKACKIWRDYIDFSALELLELAS

SEQ ID NO: 141372 - protein, 78 aa, Heterodera glycines
ICAPPAPPPPRKKRPLPRPSPNPPPPPPINANAPLPPAAPPPPPLFALPKPPLPFPLLPLSIPRLLSVDELSITLTIL

SEQ ID NO: 141373 - protein, 106 aa, Heterodera glycines
ECAERSLNTCDENADCIDTPQGYSCQCFAGYVDVSSNAHLPPGRVCTVQTSCPKQRTDLIFQTSCPKQRTDLIFLIDGSGSIGSQVSAEKRRIIICDWFRSIKWTC

SEQ ID NO: 141374 - protein, 43 aa, Heterodera glycines
VKHPISALLCREPAGNGWLLICKKLDWQYVVVKNFCVRNYFLK

SEQ ID NO: 141375 - protein, 69 aa, Heterodera glycines
MRKKKRKAKKENGRKRREEKEKKEEKEEEDEAKEEDEEEEEDEEKDEEKEEEERDGDEAHYERFVYAIV

SEQ ID NO: 141376 - protein, 238 aa, Heterodera glycines
MAKQKRNEFRIERQNSYGQQNCGGDEAKRGGRGSGREGGGAGKWGQRKNNREGSEYNDGEHDNAVDEPNDAGASRMGGNQTMLKKWTLELEDATEVREKGKRKKREKQWPKERQRGIRVRSVQLRRTDRPPLPRGGAGPNPFPAHFGAECAAEPNGGRQRHRRLCVPSDLRFGSSHCVDKTDQKRRHFYSMGHQTAPVHLQLHGHEHTQKNEDIPRKTVEQIHNGNCQCDHGGPGHLL

SEQ ID NO: 141377 - protein, 342 aa, Heterodera glycines
MVRSVHENVPNVVSFSQMTTVMMRNSNNISIMRMGTAAQFNLCILLERGHFNYIGRIAQLFKVPGYCIDCERRADARYHAIGCKAACRLCFRFGGGYPCQRERLSDGQISSRKCTECGFIFPNDNCYEYHLANDAPAPIDGRGHRQRRSLCQWRRFCPTCGRVAYFGIHQCPSIRRAIGPVDCFRCKGPHMLDEPCYIQPIGVAPPLPMLGPVHNNDDNNNNNNNNNNNNNNNNEDENDIDFIINNLGGEGDEDEDDVENGDDINDDDDDDERDELLPLRLCFFDAETSQERPLQLNNQVAHKHVPLLIVAEFICEPCIRAGININDGQGQRAPGCVCLCGR

SEQ ID NO: 141378 - protein, 24 aa, Heterodera glycines
SFSIYNLSGTLLDDDAKRQKVLCM

SEQ ID NO: 141379 - protein, 36 aa, Heterodera glycines
  unsure (1)..(36): unsure at all Xaa locations
IMNAXIIRVPKIACDLSLAKKGVSKNRNYAQKASQP

SEQ ID NO: 141380 - protein, 46 aa, Heterodera glycines
MGRKSRGNGENETDQNLQVKQENKMSEIWSFYKKSQTSETALCPLS

SEQ ID NO: 141381 - protein, 304 aa, Heterodera glycines
VFDKEKADNEPKGKDPTWFLVILLPIVALMLSQIVFTERAHSIPFALPSAEGFFKACGTIIVSCLAQSLVLPMENKIKKPSQMLGPFGVLSGGIAISTIVYAIVGFLGYSAYGESLRDSVLDHLECVSNAKELTVLTYIIRIALCLSIFASFMLQMFVIVGVLWPLLEKRIEKLSRIWKIGIQFIFRAILVSVCLAISYSINNLAAIIRLIGVTTGTLLAFVLPAIFDLLTFVPLFRSQNRLREANVRLGINIGIIGFGFVILVGGLVVNVITMANKEEDWKCAANATTSGNVTATTQSYTTPI

SEQ ID NO: 141382 - protein, 62 aa, Heterodera glycines
HCAQMGICLLLLNGILGIENSESEEDKSMLWLCRCFNSKFVGPSERKRRRLLNFLLINLAFF

SEQ ID NO: 141383 - protein, 87 aa, Heterodera glycines
IIFIQKIFFWVFGAVPLNRCAQIYGETESFRNSFTIACTLILRWIFAPNNCLSTPNGHLKKSIYFCFRGSPPEPMRPDLWGDRILRE

SEQ ID NO: 141384 - protein, 75 aa, Heterodera glycines
VPPPFGFAVVVDVPPPPCVVVVVVSLSLLPMPKMPKVPSTIRRKVKRAQKVLKFASWVILILCSLYGGLFLSFCE

SEQ ID NO: 141385 - protein, 34 aa, Heterodera glycines
GFVFDFAFFPFIPIDHVNSFSIHLVSYFMKLYII

SEQ ID NO: 141386 - protein, 193 aa, Heterodera glycines
MFRRILSNAKRQRIYVDDLIRNAKIEPNKKNYGIDELRQIQEYLNQEFPGKFLIAAFTKEWGIKPIYKGDGPKKYIVCVFHENDHWDGLNFPCEKEGREPIECLKCNRLFFSDFCFQNHLKLACKLYRRCTLCDSEYNTRNKHICGIKFCNFCKVKHAKSESCYIKKINIPKNLPRYRIVSYDIECSVSIEKS

SEQ ID NO: 141387 - protein, 34 aa, Heterodera glycines
VRLGYSNIYWGAKIQRRIKVQTIGKLFPKDSVSP

SEQ ID NO: 141388 - protein, 34 aa, Heterodera glycines
MTNSNLGNDKFQPGRAHISDKLPIIISLEQLIIC

SEQ ID NO: 141389 - protein, 56 aa, Heterodera glycines
RQNAHLKLRKYKLIFAIRTDYLVNRKQINHKIRTKNDFILECTLKMHNKLIYSNLF

SEQ ID NO: 141390 - protein, 133 aa, Heterodera glycines
MAIFFLSPQRRDAPYRRPDPATKKADPKKVPAPGVKKLLTEVLSEINTLSDALNKHAAEFSRFFHFIVKQAQIGEQEDEKERQARKAEDEKERQARKAEDGKEKQAKKVEDGKEKQAEKAEEGEKQPEPAKED

SEQ ID NO: 141391 - protein, 64 aa, Heterodera glycines; identical to SEQ ID NO: 129150

SEQ ID NO: 141392 - protein, 65 aa, Heterodera glycines
MFIVLPFVRVVIESSAKDDNPINFIQPELAFSQQKMDILFICLAFIRSSNEKRAVIFELLSFMQS

SEQ ID NO: 141393 - protein, 95 aa, Heterodera glycines
LFEYPKRTLEKIDFFVFGAVPPNRCAQIYGETESFGNSFPIACTLILRWIFAPHNCLSTPNGHLKKSIFLFSGQSPRADAPRFMGRPNPSGVASL

SEQ ID NO: 141394 - protein, 166 aa, Heterodera glycines
MAFQSLGLKPPAAIQSLRLKPPAFQSLGLNPPAFQSLGLKSPAFQTLGLNPPAFQCHSNLWDSPQPAFQAMRLNSQAFQSLGLNPPTFQSLGLKSPAFQTLGLNPPTFIGIPISGTQPTSISISGTQPTSISISAFQSLELKSLAFQTLGLKSPAFQTLGLKSAAF

SEQ ID NO: 141395 - protein, 181 aa, Heterodera glycines
MALLRFNAAKSSRGKILLTNAGFEYAFEVQQTNVKNLISDFKALSKVKDGWEYWRCPCRSPYCPGRACVQIEWHQEADGVQYKLGRVTKEHNHPATFGAELEGDAGLDAVPTHDIVIPDQLVDRVIYNQNLKGSRMIIFCSQFGINTLRAYRDEVAVDGTFEVVRKVGCQINVDLDESTWF

SEQ ID NO: 141396 - protein, 88 aa, Heterodera glycines; identical to SEQ ID NO: 124691

SEQ ID NO: 141397 - protein, 124 aa, Heterodera glycines
MSGYVPTVAMFAVALLLHCFALSRVFMIVHFKLNTHKDMSPLLMALILNWTLFCLLVIPYEVYSIANWRPTQGMYCSAAFTLYCRPLLGEVREARVPSRSPNQAPSRDFLISGISSRVRKTHYF

SEQ ID NO: 141398 - protein, 53 aa, Heterodera glycines
MMQIRSKVRKNTETGIMARKRWHGKAMTNSTKPGWYNSKGGRNNGQNPKRIDW

SEQ ID NO: 141399 - protein, 44 aa, Heterodera glycines
MDANKCPTANMPIIRGTYYGTRIRVYSRPWSSVAYQNQMRVPIK

SEQ ID NO: 141400 - protein, 20 aa, Heterodera glycines
TDQKRTKLCRDTERKRNNLF

SEQ ID NO: 141401 - protein, 69 aa, Heterodera glycines
MGNEKQQSQEVKTDSKMDSENGGRTDGGKADGGKADGGKADGGRTDGGRTDQVVSEPHRLTRVFEKKRP

SEQ ID NO: 141402 - protein, 118 aa, Heterodera glycines
MPIKRNFCLISQKPNGDWTFKSECRRSDASAPDGGTSKSGTVEHRGLQEGPDNDNRHSLRGGPHSWQCPQTHHLPNYPFLFLFNVFVFHASPAEAVVPPTSGRRHFGGHSLDGTDGRD

SEQ ID NO: 141403 - protein, 18 aa, Heterodera glycines
YREAIPEGFGLPINLGAS

SEQ ID NO: 141404 - protein, 56 aa, Heterodera glycines
MQQIFVDNLPGFPDNIRISRSADSFYVALPFHRSEQKPHIFDRLGPWPLARKFIGE

SEQ ID NO: 141405 - protein, 86 aa, Heterodera glycines
MSKRMDMPPLGSQTLAKARFSSQHPTGKMYTNYDRKMGSENASLNQDFFKTRYGSSIGAVLICINRGGILLGFNSKDVLGWIRSHE

SEQ ID NO: 141406 - protein, 35 aa, Heterodera glycines
MPGCGNKYYDHVKHCAMVNFYDNEPDKNPKEDPPQ

SEQ ID NO: 141407 - protein, 21 aa, Heterodera glycines
TVHIPWGRGKSRTTGRTSYGT

SEQ ID NO: 141408 - protein, 21 aa, Heterodera glycines
MRKKMFDRARQEKATVGSKFA

SEQ ID NO: 141409 - protein, 21 aa, Heterodera glycines
MNGGSIKDDDDDELTTKATKT

SEQ ID NO: 141410 - protein, 240 aa, Heterodera glycines
MEQQDGLWPLSSTDRCQSRANCNAIGENGGLVALSGEETDESQCTTPTETLSPIVRRKTTDSKEGTKIREEKRAVEGTHGNVKVTDGIMLEKRGTQRATERQNDDERETDNRAPLDSPRSQNQHCTDVLIPTSNPIFAPCARPFFHNKMPILRPNKRNGPSLDELHLADGIGAECFADGTHGERRRTSRHQIPSVSMEKSNLPSNKNTWRTPSRLICNFEESILNGRIPANSVVSGSLKN

SEQ ID NO: 141411 - protein, 98 aa, Heterodera glycines
SSTPPPPTPTPPLAPTPPPPTPPAAAPLPPAPPAAAPLPPAPPAPAPPPATPHAPSASPAPPTPAAPSTPPPTPAPPPTPAAEGEEALENATDEGAST

SEQ ID NO: 141412 - protein, 18 aa, Heterodera glycines
MPNSQFHYYYFTWMPPHG

SEQ ID NO: 141413 - protein, 19 aa, Heterodera glycines
NRTLTDDLMEKNPRRREFN

SEQ ID NO: 141414 - protein, 30 aa, Heterodera glycines
HILAHSVEVLSIPPPGQQFFRSVQICCFVR

SEQ ID NO: 141415 - protein, 748 aa, Heterodera glycines
MMMKEEEDEEVERARNENREPAEIKLLFETGRQLDRRLGYNVPRANEVAAVYVPGADGEVPNAKIVVRERGKELKILKSTDSMVTPMTYPLFYPRGTLGWHPEMKHRNSNRRVTRLQYVSYTVAIREREFNPILYGGKLFQQYCVDEYVKIEGDRMNWIKCNQKKILADAYKNVDNMLMRRAEERGLPLGRKVILPPSMTNSPRYVEKHFQDAMAVVRRFGKPDMFLTMTCNPQWEEISENLFHEQKSSDRPDLVVRVFNLKVKAIMNEIVKKKVFGEVIAWMYPVENQGRGLPHIHLLLTLAEQDKLINGEDVEKKGISARIPDKELEAELFDLVKRFMIHGPCGNLNPNCPCMEEFVDKNGMKGRKCSKGYPKAFQEETVVLENGLALYARPNDGRTVQIFANGRRHELDNRWVVPHNLYLLKMFKCHINLEKVNSVSSVKYLHKYVHKPPDRARLELEERNDHDEVKEFIDARYVCPQEAVWRIFELPMYDRSHCIMSLPVHLQGEHICYFDENMEEEEIRERIANGSELMAYFELNKTNVLAKTMFYHQIPEKFCFKKGKWTERKTYFNTIGRMVKVSPAEPERYHLRLLLLNVKGACSYDDLKSVFDTNGNAKVCETFSAACLERGLIRNDEEWKRALEEAESFEMPWKLRAFFALILVHCNPAKPEELWNMFKDSLSEDFRRNFRKEVAYAKAYREIALSIIKAGKTLADFPTMEQINVDDDVEQMFDLAEELDLGQRNLCL

SEQ ID NO: 141416 - protein, 550 aa, Heterodera glycines
MPWKLREFFALILVHCNPAKPEELWNMFKDSLSEDFCRSFRKELAYAKAYKEIALSIMKAGKTLADFPTMEQINVDDDVEQVFDLAEELDLGQRNYALMYDEQRKISDEILHRIWNSVNEPAFYFLSGPGGTGKTHVNKTIVHMLRGQKKKVCTMAFTGIAATLLPAGRTLHNRFGLTLDMSNSSISPRSRVWQELKETDLFICDEAPMINKRAMRTLDEKLKEIMNNGIAFGGKVLLWTGDFRQTLPIQKHATRAEMVSSTIKRSEYWRLAKRYKLTKNMRALATEQEFTRDLLEIGSGKWNNENDEIILPDNCISNGDLAEEIFGQCIVLENWNEMAKSAILAPKNVDVSEMNNKVLEMLSGEEVVYTSIDLAQDENRQRADDYLDEYLNALNPSGFPRHKLRLKKNAIVLLMRNLNIEMGLCNGARMKVEQMQPNLIVCKILTGDKAGQTVYIPRITLCCSEDYPFDLHRHQFPLVLAFAMTINKAQGQTLEQVGIDLRKDVFSHGQLYVALSRARAWNKLRIRLDDGNLERKVKNVVYRELLDNSD

SEQ ID NO: 141417 - protein, 100 aa, Heterodera glycines
MQQELINQATAAIALCHKKFRFSGTLQELSAQRLLLVSQERLALLNRQMDQLNEQRILTNLSVQQLDDIPESVDFDNEDELESVTPLARCTLYIDKIVIF

SEQ ID NO: 141418 - protein, 576 aa, Heterodera glycines
LDPSPFYVQINCPAFNYYGIIPPFCLIADLLAALSRKAVPRDLECIFDFVEPWLCGRSSGRAQKKAYRILAEIYRRIGEPELETILAEIYRRIGEPELETLFEAKRTFLRAHWKRNEGIEWDATHFVYHILQVLSSFTEFDQLEWDATHFVYHILQVLSSFTEFDQLAEFSASISAEIVAFLSRLNNRSTRHQSALCLSEMSSALIRLDSPGTNTASSALHPLLSNLFSSKPAKMVPSRPFNVLIALNILAQKHCRLMDASLLAQFVAYSSSALRISPAAVRPLPIRILRILSAKMEQFMFDQFKDLIIESVFSQDTRTSTSRMRKANALLLAQLLERLELETLLKFAGDRLVWQKQLKNIEKRRRRHRRDKAEKGEEEDDDSGKSAISWTTAGGRTSAISWTTAGGRTAKADSIFDILRDSSDEEEEGEDENEMVKKKKSINTKPPLSGKLDLLDQQSMLQKVTLVGNEKSANKSERKKPGKRQKGKRGFKTNKEGKLLIALGQEAAFKTNKEGKLLIALGQEAAKKREHQKGRHLRKGRNGERGEEAKHDEDGGGRNKKRIKTNKTNKIKIYPW

SEQ ID NO: 141419 - protein, 70 aa, Heterodera glycines
MFWLGFRFGNFNFVVFFKFSQLKGSLLCVTPFLVLALGVDDAYLMLNAWQRLRIRRALAFLAQFTQILVH

SEQ ID NO: 141420 - protein, 79 aa, Heterodera glycines
LISSQKSCQFKTAKKAEFSKFFISIFFYSSKFSVLFSRLIEPVKSFRMISRLFDSVNNFKSYINSKLAQTELARRSWPV

SEQ ID NO: 141421 - protein, 90 aa, Heterodera glycines
MIAQSVPNIGHYYDEEEVMEDEEEYSYEEIDEEEEEEEEEVEKEEKRTVAARALPAAQLAEGGGQNRTAQGNDQLCHLADECRRQFLNIF

SEQ ID NO: 141422 - protein, 261 aa, Heterodera glycines
MLMIPEAEYCALRSAMNSGDYLQNEKASLDAKISQNLQDPDISEDLKAKRHDWLYKERRTVKGILENRPQKVVIENHVPGPNVAPYLGLNNQSKPQETEEPRKIIIPRKRLKEQTPDPESDNDTLEELTPEPQTTSTLKTPVPIKTIIHPTLLNGLFRYVKENKDLFKITAAGKVQSNMNLPIENSNYRDVLLYLAGKKDETPRGAKFLKDRLLKDPTVKDMVDKSKVMWGRGRKKAIKSIKTPGIVREKKPFKPLIWARL

SEQ ID NO: 141423 - protein, 86 aa, Heterodera glycines
MGEDVERLDMVQLFNTMRQEQRLAQAFAQMGLRRDYQPILHLMDLSEEKPGAYALDYREANPEWLNNLDKDKVDEGIGTEILPFFA

SEQ ID NO: 141424 - protein, 331 aa, Heterodera glycines
MENENEKSKMVATNKEFIAVIEKIKSKKTITAKDKKALQNLCIFNKLYIKHNGTIEGIATNLEQKISEQKKKQPKLMEKIEKKLHLKTKEEKQLEQVKNIQQKLKGIVDKIHGIEKSSGTDLWDIAKEFCAEEESGKEKKVDEQNKEIIETNASSSSSLSEPKQKKSKTKKEGTADGGKKRTHLLGKIDQILHHEETDEEKLLNEINQIVTDNFMNEFEKAKKAYQNEADIKEAEEKLEQIKKILKILNNELFTLNKKESQISTELESIETEMEKVGKKIADLDNEITTNTEKAKRQAKIIWEELKKMKEHFAKKLEANNSNVGEGAKETA

SEQ ID NO: 141425 - protein, 58 aa, Heterodera glycines
MKAQSELRRITSSASLHWPIGCLNNSEMQCFSHCDFAVRIVNNPKSNSENETTDEFIR

SEQ ID NO: 141426 - protein, 53 aa, Heterodera glycines
MNSSVVSFSLLLFGLFTIRTAKSQCEKHCTKSKPMGQCNEAEEVILRNSDCAF

SEQ ID NO: 141427 - protein, 32 aa, Heterodera glycines
MATMGRMVVAFLTTNSRQMTMNYVLIDRAKID

SEQ ID NO: 141428 - protein, 112 aa, Heterodera glycines
MHLIWFCIFANCFLHRNGHETFAMATLIDNWTNCSDKKPNLECAFPRHQPNWPVVQSIDDESPSLKKVSRSEITLKITKKFGVGISNIAENNPYIILVVMLTDSTFETLMKR

SEQ ID NO: 141429 - protein, 42 aa, Heterodera glycines; identical to SEQ ID NO: 125794

SEQ ID NO: 141430 - protein, 70 aa, Heterodera glycines
MAQPSEEEPSTSEAPARDNDGQPSSTPTPVTPLEMDVPSVEMVDTDVQIPFTPADEDQQIHQCRHIHGTL

SEQ ID NO: 141431 - protein, 104 aa, Heterodera glycines
KWSSKNRNYAQKASQTILTLPIPSTIAFIHPIMSAKIIRVPKIACDLSLEKNGLSKNRNYAQKASQTILALPIPSTIAFIHPIMSAKIIRVPKIACDLSLEKMV

SEQ ID NO: 141432 - protein, 232 aa, Heterodera glycines
MKRTNASNITPPRAKRAMPPALDLDQNTATLEEQERQRTLVFIGLPESNAIRPSERVQEDREAITKILDHLEVEAQPTAVFRLGRYDPQRTTPRPLKVVMPTPTHQHVVLGGWKRERARLRSQQNLNRLFVRPALSKEQLKEEYEARLRKRQQNPAPPAPPTQLPKTTNDQTPDVAKGPNQNEASEDVSKPPDVFDQKILACYAALISLPPTDKIVHQIQSLKKQYPHLFNK

SEQ ID NO: 141433 - protein, 193 aa, Heterodera glycines
MKRTNASNITPPRAKRAMPPALDLDQNTATLEEQERQRTLVFIGLPESNAIRPSERVQEDREAITKILDHLEVEAQPTAVFRLGRYDPQRTTPRPLKVVMPTPTHQHVVLGGWKRERARLRSQQNLNRLFVRPALSKEQLKEEYEARLRKRQQNPAPPAPPTQLPKTTNDQTPDVAKGPNQNEASEDVSKPPD

SEQ ID NO: 141434 - protein, 52 aa, Heterodera glycines
MSKSVIDGIKLILSTAEHSDVHFLSFPGAPIGPPDACFVNWFLTRIRSFSDF

SEQ ID NO: 141435 - protein, 82 aa, Heterodera glycines
MPWKIVALINKKDESTDNEKWLGFFLLCDASEEELPGFMISYPENHSKYAFMILVRIIFLKICSDAGFGIGRKRKPNSYSEL

SEQ ID NO: 141436 - protein, 198 aa, Heterodera glycines
EEPTTFISIRSVLINGPSVVPLPFLSSLFHLCLCSGQRFFQPLSVPAALCPSASAPPVDPMGPLLALSAADNGQSHPKQQKQDAPLAPRVPFIYQQSLAAAATAADGEDNPPWLRGNPQPKNGLRGSNAWQEAFEGGKAKANFGASFGSELGEAWIEANKATAKERHRMELMAQIEENRQRKMRERQRDWEREEKERI

SEQ ID NO: 141437 - protein, 90 aa, Heterodera glycines
PPPPPYDAGASSPFEQPHQQHQSPSPYGMMYSGGNVPSPPPPSSPYHQYQQQAPPQMSPPFQPPIGDPQQQVGGMPSQANQEKIDANDGI

SEQ ID NO: 141438 - protein, 98 aa, Heterodera glycines
MLVQQGLMQMLMKTDLEPMNVRCEFCDALHFVEKKMSGRGNSFKDCCHYGKVFVPEIPKQDFPEELKDLFIKFYARHVNFFENIRHLNSSVSFASMNP

SEQ ID NO: 141439 - protein, 57 aa, Heterodera glycines
RDGPRFRFSHFAFRIIRIFWRFAFRFLARKATFTPLRIGLNSHKIFQNFTYKLANFQ

SEQ ID NO: 141440 - protein, 467 aa, Heterodera glycines
MVSFFRKFIPNFAQIAYPLNKLTRGGAIEFEWGENEEKAMNLLKNHLLKSPSLRAPNYALPFYLFTDASALAYGGALMQAGNGEMFAIGYWSRTLTDVESRLPPTHGELAAIVHAVHNFRPIVYGTELVILTDHRPLTFLFNKASSNPKLNRWLMAIQEFEPKVIYLEGRANKVADALSRVPIAWNSIEAQFKDEIPHLLAIEEAIDREKLERETKSDHLLSRVITKIRENWIDPIEEELLPYYQSRDSLYMEGGLIRKRPNGLIVVPKTMQIQILEVIHKAHFGIVRSKAKARKHVWWPKITEDIENFVKECVICQRNAASPPRIDPEHRWPESRFPFEREYRSSPCPTLDGNCPAQLFLKREMRTGMDRIKMPKMKDTNGADPQVGDEMRNVQRKGAESRHNSKRNFEPGDAVWAQQAGEKNRWGPGVLLEPIGERMWRMELEGGGEKTVHVDQIKERRIASARH

SEQ ID NO: 141441 - protein, 36 aa, Heterodera glycines
MCQSNGTTVPLVRFIKENINQQEIKKFVNQHNQYAS

SEQ ID NO: 141442 - protein, 135 aa, Heterodera glycines
MVAEIYAITGNLRPNEEILTEYTGGQRSHVFARNDDMEQFFQALDEKINPCESSKAELLKKNLPSPAAKLRDDKNRTGVELLILPQNDSNSPKNFVKNSQKTEQQQQLVNNREQLPFLPKNLKLECNNVGKVTKI

SEQ ID NO: 141443 - protein, 216 aa, Heterodera glycines
MPLSLLVEEQAHVSAAAEAAAEAASAVDQKMSAAPNDTPAITDTKIDFMTDEQTVAAAPPPLFSEIEPTQQQQQKQQQGRTAEIIAPKVELSAEDNGDDDDDDDDDDDDETGQQVKQEADRNGMDAHHSNCAKGPLLFIDEQENEEEESEEDEDISTTHRRQGMDSSFDYEDDDDDDDNDDDDDDDDEMESVSGCAESDKCGHCHHPHQLPRNALE

SEQ ID NO: 141444 - protein, 74 aa, Heterodera glycines
MAKETDDWTIKADWTHKFEDGLAVNDKWAMSNLLGMASQLNFTFQLGPLGGKRGYMVQLFILETTMVFGMVNNR

SEQ ID NO: 141445 - protein, 257 aa, Heterodera glycines
MQSWKALKHRTANMDVLVVLATSIAYAYSVSVLILAFLLQWSSSPMTFFDVPPMLFVFISLGRWLENKAKGKTSEALSKLMSMQAKVAILITRDEKTGQITSERGIDTELVQRGDLIKVMAGEKIPVDGIVVEGKSSADESLITGESMHVVKKPDSPVIGGSLNQSGLLIIRATHVGQDSTLSQIVRLVEEAQSSKIRTVVFDKTGTITEGKPRVVKLFTTLPPSQLSIHRLALLMGSAESNSEHPIGGAIVRFAQK

SEQ ID NO: 141446 - protein, 66 aa, Heterodera glycines
MVCGSFVAIAMNVLIIYCALRIFNRKNRDTIHVYIISMTMGDLILVICQFLESMNRLTPVQFISSS

SEQ ID NO: 141447 - protein, 46 aa, Heterodera glycines
MHRIIAAVKKLVVGSVLAVRCTLCVLLVWLAFLPVFPPALAFTGRR

SEQ ID NO: 141448 - protein, 127 aa, Heterodera glycines; identical to SEQ ID NO: 131127

SEQ ID NO: 141449 - protein, 26 aa, Heterodera glycines
PQFECAVIACADNPILVRRHVHTCDL

SEQ ID NO: 141450 - protein, 41 aa, Heterodera glycines
MYHRNKGYYSTYCTFCGGLIKVHFLSKFRHFMEIFFFGNNS

SEQ ID NO: 141451 - protein, 258 aa, Heterodera glycines
MDDFYIVLPSNTPGPGNSTSKFTVRLPETLELGTNWSVALSSIIYPYSFTALGINGQEFIKVWENDSSVPTQVYLPDMNFKTAGGLGNKINEAFSHHYKIKKQRGRREAKAEDTKDSKIDVAKRAAERAGRDVERHFNQINNISNSIQTQLNTLRETNPHILEEPDIKIWFDKMVEMGTEIQTSRNELKSFQEEVDKAKNITLEHVEKNDLKKAKKSADVAKGIARQAKTKYTSTLEGYNDKSGKGFSGIVNRLNEAL

SEQ ID NO: 141452 - protein, 70 aa, Heterodera glycines
MTSALLDKALADSELSKHINADRLNEFRGTGGVRIEDDVIIWEKGNENMNADVPRTVEEIEQFMAKAKGL

SEQ ID NO: 141453 - protein, 109 aa, Heterodera glycines
STDTNHSKSDQLSDGGRLAGRLNGDGIRPKGGQKPKGGGAELLDDEGPKNGRNLNGLNCCSSLPDSSELLSSDAISDELFGASLCPLTKMAIVKIKAAIKNLLAIICDN

SEQ ID NO: 141454 - protein, 47 aa, Heterodera glycines
MANKFLIAAFILTIAIFVNGQSEAPNNSSEMASEESNSEESGSTNLP

SEQ ID NO: 141455 - protein, 76 aa, Heterodera glycines
MFASACRFVLPLFLFALLALPPANGTGLPMQKMECCQQQQMCCAAPMQCTPSCGGPPFSRCSEGKKRRAHRRSGNS

SEQ ID NO: 141456 - protein, 75 aa, Heterodera glycines
MANKFLIAAFILTMAIFVNGQSEAPNNSSEMASEESNSEESGKFLRTRLSDNTEPSFIYFKNPIICNLANSRKKE

SEQ ID NO: 141457 - protein, 208 aa, Heterodera glycines
DEASSSRKTFSENLPLISPFSLLRYILHQLNGGQLSLEDLKRNIEYAALVLETAYMDETRRICDEDDDLAEVTPERICDEDDDLAEVTPEAVPDEVREWLTATFTRQTVQSRKEKPKFKSVANAIRTGIFFEKFVRQQQQKSVSSIDAINSLCSELNNWNFDSFDLNEATNGHSLKYIGFELFNRYGFFERFKVPLSLLFLFPSPFSL

SEQ ID NO: 141458 - protein, 149 aa, Heterodera glycines
MEVEQRLPRYILDEIYLARESAGQWSTDRLRDKLRSILKRKEQIDTLLPKTDHGPRPKPSPRPPGFGSSFNPQPTLTFHTQSRTQPQQPPGSKIRPKLPCLFCDSPDHFSSNCDKFGTPESRLQRLRSLNRCFKCLKTGHPARQCPSPA

SEQ ID NO: 141459 - protein, 35 aa, Heterodera glycines
MTISDGDRRYDQQRGTEAPSHSPLLLPVLSLGFVK

SEQ ID NO: 141460 - protein, 16 aa, Heterodera glycines
MCDEEVAALVVDNGSG

SEQ ID NO: 141461 - protein, 125 aa, Heterodera glycines
MGITLKHMGDGMDKQRSWGLFIHKILPLIGIPNIHKLFVTFGGAKRLRGLLTSTSAAFLIECPNLRSIYYDWYCNGHDRPVDANAKVREWLLWPRADGRPKVLYRSFCYDISDEYNQASGGKANP

SEQ ID NO: 141462 - protein, 76 aa, Heterodera glycines
MFAIAASASSHASNNSEWQALSAKFGQQISEIESNVPSLALAFPKCLLTALKEKKQRKGQFTSKDSFQTIGQYVSG

SEQ ID NO: 141463 - protein, 145 aa, Heterodera glycines
MASEFVLVPDEIYRGLTNSDSGDINLDFVQRALQRTKRNELSRYLHLRDEHQNKPAKVEITKGLKTLRGNESDDDDEQIIDLGPEGPKPPASLSRQRQRRHHRYNDDDVEMPPVPPSPTPQAGTRAQKRKQMNFIPHGRRGSKDN

SEQ ID NO: 141464 - protein, 356 aa, Heterodera glycines
MSINLRDKKSLMENILPAVDISHTINGITVSSERIAVARTIPFDIVGKCKECKATECETEWCISKEGVTIWCTRFKISPRFVPFDVIYELPGYTFFKIRNKGRVFNVDHGSRSDACTQTPAPIYHLPPPPPPPKLPKRKQEQQQADAPAFFSALSAASLGVEFGATTVNPSAQQTQPQESNFASSISAATTGLDFGQMSTQQPTHQNRSEASDFFSPIAAATMAMDVEQKKTNPKPRQQQTDASNFFGPISAATMGIGAEQPKPKMIQQQQGVASEFASAISAATMGMSNEQPKQQPPIEKQKEQTDEEILDEFLESVSAATTYLDVSQKKKPKKKGKKEAEDEEAAAIASISRKQ

SEQ ID NO: 141465 - protein, 25 aa, Heterodera glycines
MMRATRVRFAFLSVVRLQRNLSVVD

SEQ ID NO: 141466 - protein, 36 aa, Heterodera glycines
MYSLKRNQVATMFWNTEMKNLHHAPSFEAAIEKLIA

SEQ ID NO: 141467 - protein, 62 aa, Heterodera glycines
MFPHLKIQSHEIWEKIDDRFGKEKNAGAGKGRRRSGTARDAPPVHFASVVAAARCGGQTASR

SEQ ID NO: 141468 - protein, 229 aa, Heterodera glycines
SRRSNESDWRNASKYSINQTDQKHSLGWQFDHHIVTLNFQVWEHVAMLRDELPFRAGEEVAVLDCPSPQLWYGVCGPRSGWFPASYVRVNVPQEGLVQTLCWWSIGSVAQVRPFRRLSIAEMRLLRRRIVQELISTEREYVRLLKNLVQGFVEQCRRRRELFPEGFVEQCRRRRELFPEERVQRIFGNLELILMLHSRLFRELETELDEKEPEKRAVANVFEMELLLRS

SEQ ID NO: 141469 - protein, 146 aa, Heterodera glycines
NGVSKNRNYAQKAPQTILALPITSTIAFIHPIMSAKIIRVPKIACDLSLAKNGVSKNRNYAQKASQTILAYPIPSTIAFIHPIMSAKIIRVPKIACDLRLAKNGVSKNRNYAQKASQPILALPIPSTIAFIHPIMSAKIIRVPKIA

SEQ ID NO: 141470 - protein, 93 aa, Heterodera glycines
VPQRTTEKNRFIFVFGAVPPNRCAQIYGETNPFGNSFPIACTLILRWIFAPHNCLSTPNGHLKKSIFLFSGQSPRTDAPRFMGRPNPSGIASL

SEQ ID NO: 141471 - protein, 15 aa, Heterodera glycines
LKAIHCLPVLGTAKH

SEQ ID NO: 141472 - protein, 89 aa, Heterodera glycines
GCTRPGPDTERTYTHSVGPTNSAVKKSSNVQLKIEAKFLTQYCPTFVFHSYQKRILQKALVMNNILMIREFAILKMLEPGLDSLLDLDL

SEQ ID NO: 141473 - protein, 72 aa, Heterodera glycines
ARLSFGGHVGPNDRKWDERRPDELQSRGPRSEYHGGTIKNVREAAAKCTKKYNVAIALDTKGPEIRTGLLAG

SEQ ID NO: 141474 - protein, 58 aa, Heterodera glycines
MLGKIGFLKKYLYFHGDKLIKNCARCIFLIVREFFDGLGSRKSHFLSDFFLENLLSYS

SEQ ID NO: 141475 - protein, 66 aa, Heterodera glycines
MGMMWGNSADLLGKSANLFASPMAYDNAPASPAGFGLPHIVLVIDNYWINTWRVPFCNGICCRNNI

SEQ ID NO: 141476 - protein, 53 aa, Heterodera glycines
NIKTFLARNILMDLPSKVNVEGAEVPCQNEKAKIGFGCFGTKTMDTRETMRIL

SEQ ID NO: 141477 - protein, 89 aa, Heterodera glycines
FLSKKFFFGFSGQSPLNRCAQIYGESESFRNSFTIASTLILPWIFAPHNCLSTPNGHLKKSIFLFSGQSPRTDAPRFMGRPNPSGIASL

SEQ ID NO: 141478 - protein, 136 aa, Heterodera glycines
MAEDRQIKLLMEKMDEKFADMKAELKAEISGKFAEIDGKFAEIQDQIQDLKAEINQKAAKISIEVPAQGLTIQQATKAGLLDLESGQLTIMCDTATNLSLAKAIEIGMLDPHSMTVCDSSHGEKRELHLDKALNEG

SEQ ID NO: 141479 - protein, 126 aa, Heterodera glycines
MTCAYAKLLGPCFKTGRTDDRLLHRERTTESPSWTELVAGTCRTRPPPTPSSSQHGPETIAQFTQSKQHSPDPGTRPRKAGLKTELTQLLRASQRTPPANAPFATEQKDEQTPVWRLAGQRTATNG

SEQ ID NO: 141480 - protein, 176 aa, Heterodera glycines
VLESFLDSEFSSENLRFWCCIQDLKFSPNCQVKTKGQHILDEFLAPVSEEHVFTLMSKDSYPRFLRSGIYKAVLDAAKAKGGRKRIIDLIRELSGSAVNTKKVPAKYHKTSRGSADVDNTQQLSLNANNFPKQCSSDSLPVKVGSLGGTSPSLQLPSSGTSSASSPALQTKESNKR

SEQ ID NO: 141481 - protein, 70 aa, Heterodera glycines
MFKSLPLVEKDEIDFHLDDDDEEEDDDDDEEEDDADDDDDEEEEEEEEDKRRPKKKAFGFLKKMFKKKRH

SEQ ID NO: 141482 - protein, 130 aa, Heterodera glycines
MLLSQNLAWSSIHSLFGFIAFLLTIFQPISALFRCHPDSSSRVLFNVLHAFTGYIGWLCALIAICIACVHFGLFANTSAATVLIIVFLVLLGIVALIMQIVAFRKGHQQQQEQHGTSRLNCNKGKQYWHH

SEQ ID NO: 141483 - protein, 56 aa, Heterodera glycines
MLISIPKMLKLIMDNLNLTFDHFIPNVATFPLECGHNFSMQIQMGITLQQIEIKNI

SEQ ID NO: 141484 - protein, 48 aa, Heterodera glycines; identical to SEQ ID NO: 130859

SEQ ID NO: 141485 - protein, 37 aa, Heterodera glycines
ALQFPEGLTMFACVIVDILEKHTGAEFIILARRHLWK

SEQ ID NO: 141486 - protein, 132 aa, Heterodera glycines
MASNGKATEASSEEVRCSSGAAAASTASFVPSSDSPHNQPGSHAIDWKTYAALLSSPSGADLMAAMFSSAAALGPTKAHGEEEEEESERGEGQENVGEEETTRKGRTTKRTVKDEETEEAEGEEREGKRMEL

SEQ ID NO: 141487 - protein, 39 aa, Heterodera glycines
FHFILFYFTFHIVVFFDIIYFDFFFMRHIRALMCLWFAQ

SEQ ID NO: 141488 - protein, 53 aa, Heterodera glycines
FRKAGLGPKEAEGSKKEWTSEQLRAGDAIIGLQMGSNKGANQSGMIMGNTRHM

SEQ ID NO: 141489 - protein, 284 aa, Heterodera glycines
DRLHIDGLSVLFPYEYVYPEQLLYMEQLKKVLDAPGHCLLEMPSGTGKTVSLLALVVAYMRKYPERLHKLIYCSRTIPEIEKCVEERKYPERLHKLIYCSRTIPEIEKCVEELKRLFRYYTNVTGVPPDFLALTLSARPDFLALTLSARKNLCINKSVVSFRYGSAVDGACQRLTASYVRAKRRLNPNLPCCSFFEKFDEKRVLMPNLMPNQSDLRGWGKEHCMCPYFVARHLVNRADIIVYSYHYLLDPKIAELVSRELRPQSCVVFDEAHNIDNVCIESMSV

SEQ ID NO: 141490 - protein, 169 aa, Heterodera glycines
MEYVKHRMRVKNVQIESPAAFLRDIKSRVFVDRNDQVEITSRFESREDPSVVRNYGTLVLELASIVPDGIVVFFTSYVYMENVVAAWYEQRMIDELVKLKLLFIETTDALETSVALEKYVEACESGRGAILFSVARGKVSEGIDFSHHLGRGTIRLFTPFALLTQEEQS

SEQ ID NO: 141491 - protein, 77 aa, Heterodera glycines
MEGQQTDSGKNAIAEQQQKDEWKRRPNPSRRAQMHYEDNDMKKQSLPLDKFRTFLEKLKVINHGLIYYEKEGQQKNV

SEQ ID NO: 141492 - protein, 75 aa, Heterodera glycines
MRFPAYTIANGEEDEGQQKQANGSGNKTRKSNGRRRKNGRGNAPRSDQTNENDHNFFRNFLKILNHNSSTKNDLD

SEQ ID NO: 141493 - protein, 365 aa, Heterodera glycines
EKAQIEGKNEVEVTRTQLGQNKAKNDTLRKESDAQQKLASELNEGSSFCPAKQQVSWIEVNGSEIGQIDGERVPIWKPMEEFEEEEKWEERRTQCKENDEMDQLEKKATDVVEEWNARVGGKVGEEETEVELHFVGGERTEREAATEVCFGRDWANRRTTVRETEDGVGRKAESSVHFEKRKNEMPGRASYFQIHQRMKMGRKLEDDECDKSMPKDTIILEHMNITELEYSGGTIGRRGQCVQTSISTQINRWAADEWFKQIPTREELEEEKDERVKTKEEVRRRRNSRMDESSERVTKVRSIRRKSGTEEDDEEGGGTKGNGEGQPPQLYSEFETIHHGKTEGSITRTRHRQKRQQPKSPSRVT

SEQ ID NO: 141494 - protein, 46 aa, Heterodera glycines
MLAGLYLYLEGLQKLATFQYQLFPVQSPLNNSLGFDLSAGWPADLL

SEQ ID NO: 141495 - protein, 138 aa, Heterodera glycines
MSKCALTLYQVTFYRKLSKLGPVAVRGIDYYDSGQFGDANCKYCGAVLLESEANALNKQGRVSPCCSNGQCHTEQMKAEFDELQNPPQLLKDLVAAPDERIRFEFLDNTMPLNNTFAFASVHSEKAPAEQMAGPNGYR

SEQ ID NO: 141496 - protein, 562 aa, Heterodera glycines
MNYGPPPRKRARLGFTIDELLELQDQQQSGSGPSHPSASPTALGNGLDAYVMKLDEEVEHAPRFTMTKVKSKFMIKDLPADPEALLSQIFQKCLDEAVDESKQHGHTPDRLGCMISSELLNPDIWTPIREITDNTTDVILNRLLSTAQSKKKNGVSPQKITKGCHHKHVCASAGAHHRIDYYDSGQFGDANCKYCGAVLLESEANAINKQGRVSPCCSNGQCHTEQMKAEFDELQNPPQLLKDLVAAPDERIRFEFLDNTMPLNNTFAFASVHSEKAPAEQMAGRMDTVKYNGFWICDKAGKMRELKSGMPQLDPCCFPLLHPRGTFGWRWFMKKTGAQGRPPIFSTTDSVIELAYETFPRKRQLGIKKVGPQENISERQFYRYRLAIRENSRGAFHWLWFSRRLAEYFLIAVLNRIERNEMDHVKAIQQKKNYRQTLARDYIKAIEQGLQQQGRNAKLGSVFMMPHTFAGSRQYYQQKYADLMTVVRHLGNPTWFVTFTGNPSWPELKEALQGRQQYTHRADIVCRIFMDKASEFVRDLIEKNVLGKVAGWCYSVEHQKRG

SEQ ID NO: 141497 - protein, 150 aa, Heterodera glycines
SKNIAILPRRDSDLEAFSHNPSDGSFAPLVYRPSTTKCLNLRFLSYAGLLLATGLGKTNLSHDGLNPAHVPYWWVNNPTLGEFCFAMIGRADIEGSKSDVAMDAWPPQASYPCGNFSDTSCWKLYTLKDRATLSRSVFVLIRIKAFLFAL

SEQ ID NO: 141498 - protein, 76 aa, Heterodera glycines
GPPLTNIKRAHKGRFSESSQIEENDEQIGRSTKQLNMTNEDGERQPIRRSKLAGIGILHTARANRLECWASINQFN

SEQ ID NO: 141499 - protein, 57 aa, Heterodera glycines
LNDDIAQLFPNTFLVNESDKQQTVIAEERLNSLKEWLSNDCRVSRQQGQAPIDETNF

SEQ ID NO: 141500 - protein, 124 aa, Heterodera glycines
YQLDLMDSYIDALMLYDEGSQVEQLKKRQVHDPRLQYECQLLRNRAMHPDKKGMELSAEDRQRLLETLSAPKQRMDEAQVVLDEIREEFPRELNENTRMAAFRTTKAKTDTLGQVDDRLQPIVP

SEQ ID NO: 141501 - protein, 66 aa, Heterodera glycines
MASRLNRLLLVVYIQIFLIENYIHKCRIYLSINFTQFVACGQSKLGRAGGWQFLQLAMNDDQRCTN

SEQ ID NO: 141502 - protein, 60 aa, Heterodera glycines
IKLMKIFKQIFFTYFKELIILDYDRILFEFRFTFHINFLRRVYSKKLLGKKGVRRCREAP

SEQ ID NO: 141503 - protein, 65 aa, Heterodera glycines
MNVVRTLPLIVLATALTACAGKPARSDAPAASTVVPANAAAEAPAAVADGGTIDPAVAVPAAQAP

SEQ ID NO: 141504 - protein, 36 aa, Heterodera glycines; identical to SEQ ID NO: 140971

SEQ ID NO: 141505 - protein, 522 aa, Heterodera glycines
FLQKFFLKTLLIIILFLILPSPTNEVKFNIFGKVLKTYLRNTSPDGITFRLKNCSSFTPFVTEIRLSLDTGKLPTIWKQSIIIPLHKQGEKSNPMNYRPIALTCSLCKIMEKFIVWAISDFLLKNNLFSDHQFGFIKGRSTTTHLISTLKNWYDGIYNNKNIDCVYIDFRKAFDVIPHNLLLYKVHRIGIRGKILNWISDFLSNRTFRVRVDNTLSSEYKMSSGVPQGSVLGPLLFLIYINDLPELIPKQISIKLYADDVKLYSVHKTKNDRIAMHHALNILSDWSKKWYIKISINKTFIIYFGKNNPREQYKINDNAICEVETIRDLGILIDNKFTFSEHISKITRNAYYRMRLLFRVIKSKKISVWKNIYVSYIRPLLEYSPESWNPQLKSHIIKIEKCQKYFTRIAFRKCCLPYIPYDQRLQFFKLATLEKRRKIFDLLTTYKILHGFTHLDPNSLFKRTNLNTRNKYVKLQSKKSSKSFVNRSVKAWNALDKTYKELLTFEAFLTLTSILFSYKFFVI

SEQ ID NO: 141506 - protein, 277 aa, Heterodera glycines
FQSLGLNPPAFQSLGLNPPAFQSLGLNPTAFQSLGLNPPALQSLGLNPPAFQSLGLNSPAFQSLGLNPPTFQSLGLNPPAFQSLGLNPPAFQSLGLNPPTFQSLGLNPPAFQSLGLNPPAFQSLGLNPPAFQSLGLNPPAFQSLGLNPPAFQSLGLNPTTFQSLGLNPPAFQSLGQPTNISITGTQATSISITWAQPNSISITGTQPTSISITWAQPPNISINGTQPYGGLRPHSPNFCVKGTHSAASRPRNWGLRLHSSHQNSISPILRNPITGNE

SEQ ID NO: 141507 - protein, 276 aa, Heterodera glycines
NHWGLNPPTFQSLSTQPTSISITGTQPTIIPITGTQPTNISITGTLPTSISITGTQPTSISITGTQPTSISITGTQPNSISITGTQPTSIAITGTQPTSISITGTQFSCISITGTQPTNISITGTQPTSISITGTQPTSISITGTQPTNISITWTQPTSISITGTQPTSISITGTQPTSISITGTQPTSISITGTQPTSISITWTQPNNISITGTQPTSIPITGTTPNISITGTQATSISITWAQPNSISITGTQPTSISITWAQPPNISINGTQP

SEQ ID NO: 141508 - protein, 30 aa, Heterodera glycines
QKLQVKRLKLVGFVQNIHVSNPEPEFGQIS

SEQ ID NO: 141509 - protein, 92 aa, Heterodera glycines
MSRNRSSRSTFSSRGGGSDEEVHNHLDRNRSIKQELTVVKNNQKMQNEAHKGSLEMLRESYDRMCNSKGTRAAKQTPMIDFYDYYKDMKARV

SEQ ID NO: 141510 - protein, 129 aa, Heterodera glycines
MDARWLNERVNLGCVLPSQEEATVYVQAQQVFDFIDKNASKFELLSPEQYSDFRLKKIHGKSINALENAIIELRHSVIQLNVGGIMPDYERTNNPRRCILNEITTANEDVREALFEMILMIELDALKLV

SEQ ID NO: 141511 - protein, 103 aa, Heterodera glycines
MPNGFGFAPSPANFIEPGKRPMSSMSPMVIFDQENGKLKFVIGASGGSKIISAMAKPVIRVLCFNETIKEAIDAPTLHNQFTPDITQFEETVPKAEKKGKRKN

SEQ ID NO: 141512 - protein, 32 aa, Heterodera glycines
MSAIICIKAHEIEKADFPIHLIRFGFQNQNLY

SEQ ID NO: 141513 - protein, 239 aa, Heterodera glycines
NYYTRKARRRHNEEQQQQQQQVSFNNGNNNNSCIATGAAAVAVAGGGLLSATNANGGHNIGGGAGNNLSAFLVPTPSAAAAAAIAAGIQQQQQLQQKHNKQANNLLADIQVLMMVVVVNGFFLCIINKIYSLSPLCKDISMVPSCSSTAVAASIVAATQQQQHPMGVGGVQQQQQFMHDVQQQQHGTNMEAAAATQHLHNHGNSHHNRRTIAYPKNSATAKHKSAAVRAKAQQILAAQA

SEQ ID NO: 141514 - protein, 431 aa, Heterodera glycines
QAQAAQQQLGLVDDDQECDDENNDYIIRNGEVFNYRYRIESSIGKGSFGQVTKAYDMVEEEMVAIKIIKNKKAFYDQAQIEIRLLELMNSHNSEGRYYVVQLRNHFVWRRHLCLVFELLSYNLYDLLRNTNFHGVSLNLTRKFGQQLAATLLFLSQPDLNIIHCDLKPENVLLCNPKRSTIKIIDFGSSCQYDSRIYHYIQSRFYRSPEVLLGISYDTQIDMWSLGCILVEMHTGEPLFPGHSEFDQMMKIVEVLGMPSSQILNSASKANKFFELDENGQWRCKKARDTKSYMAPGSLRLSDVLGVYTGGPFGRRQGEQGHTVEDYMKFKRMLELDPAKRLHPYYAVRHPFLRKTNPGDDQQHQQLQQNVVGTASGGVAAQQQQQPNRSHSSVAISAACQQPQQQQHPSSSSAFHNHHAQQQQHQTMPPTF

SEQ ID NO: 141515 - protein, 89 aa, Heterodera glycines
MGAVVAGVVGTRRKWPPTSASGSAVVVVAPQLRRSLFQQHFVVAAGVVDHRQGSSCAGMGAAPRSTDATAWPGPTPTCAGSDPVQKCGI

SEQ ID NO: 141516 - protein, 179 aa, Heterodera glycines
GTRVALDMTTLTIMRQLPREVDPLVYKMSHEDPGNVSYAEIGGLSEQIRELREVVSSAIVDKYIGESARMIREMFNYARDNQPCILDPALLRPGRLDRKIEIGLPNGQSRLEVLKIHATKVLKKEEIDYEAVVKLSEGFSGADLRNVCTEAGLNAIRKERDGVVQEDFMKAVRKVADAK

SEQ ID NO: 141517 - protein, 22 aa, Heterodera glycines
MALQDAYANAMDAFCGTTGPFW

SEQ ID NO: 141518 - protein, 78 aa, Heterodera glycines
YWWFRVRSQQELDNLRDQLGRPIGVLDSLVLPQPMHELFVDAFLTEIRKNPRVTDVDLDELEPCFSCSQTIAQVKLVK

SEQ ID NO: 141519 - protein, 113 aa, Heterodera glycines
YFWPNCWEPEPSSTAVYLCKRTMQNKAHLELEDFEAENLAKLQKMFSRKWEFVFMQAEAQYKVDKKRDRMERQILDSQERAFWDLHRPVPGCVNTTELNFDKTPKLVLNLFFS

SEQ ID NO: 141520 - protein, 336 aa, Heterodera glycines
VDFRKLSRSGRPKYSASTSLLAQAAAASSSSSSTTTCSNGPAAAAQPTPTKTTAKTVPTRTADECSSTACTSSGAGGGDSAGTSSGGAETATAPNRTTSNAASSSSVREVKYHQRPGFRRQTRLQDSIKTEITDLHNRLAKNVLRTSKVVENYLQYYDHRILFDAFLVQLGSATDPFHGQPNPWISDTVDFWDHDKMYADVSARRLKLWEESLEELLTDPLGRETLQKFLDKEYSGENLRFWMEVQVQRLRKCSCRFVPVLVTKIYNEFIDANATSPVNIDCKVMEITEENLRNNPNRWSFDDAADHIFCLMKNDSYQRFLRSEMYREMVSVCVIS

SEQ ID NO: 141521 - protein, 18 aa, Heterodera glycines
ILFDRARQEKATVGTKFA

SEQ ID NO: 141522 - protein, 68 aa, Heterodera glycines
NGVSKNRNYAQKASQTILALPIPSTIAFIHPIMNAKIIRVPKIACDLSLEKNGVSKIVITLKKLFKQF

SEQ ID NO: 141523 - protein, 63 aa, Heterodera glycines
NRNYAQKAFQTILALPIPSTIAFIHPIMSAKIIRVPKIACDLSLEKNGVSKIVITLKKLFKQF

SEQ ID NO: 141524 - protein, 43 aa, Heterodera glycines
MDNRDERGHSYCYVRGEILGPYQDGLLRKHLARMSSLIKNESQ

SEQ ID NO: 141525 - protein, 41 aa, Heterodera glycines
ADLKLSIACRFSAQQSTNTVFDSLQKIIPYPKVFYNHILPI

SEQ ID NO: 141526 - protein, 42 aa, Heterodera glycines
FSALLLGRRDVQIVASLHCLNSDGPYKYIILLNTPDNIFLAI

SEQ ID NO: 141527 - protein, 264 aa, Heterodera glycines
QNVRPSPFRRDGFPCDPESVCISGGASESIRNVLKLFVRPNIGTGGQKAGILVPIPQYPLYSASIEEYNLGQVGYYLDEENNWALDMDELERALKEVYQENVYAEGAEFHSFRKVMFEMGAPFDKLELASFYSCSKGYMGECGLRGGYVQFDNIDPTKMISAKLCSTVLGQVAMDCVVDHPKPGDPSYDQWLKEKTAVLDSLHKRAQLVTKAYNQVEGVHCQQVQGAMYAFPRFLLPDKAIAEAKASGVQPDFFYVKQLLEETG

SEQ ID NO: 141528 - protein, 138 aa, Heterodera glycines
NGVSKNRNYAQKASQTILAHPIPSTIAFIHPIMNAKIIRVPKIACDLSLAKNGVSKNRNYAQKAPQTILALPIPSTIAFIHPIMSAKIIRVPKIACDLSLAKNGVSKNRNYAQKASQPILAHPINSFYNRLYTSHYER

SEQ ID NO: 141529 - protein, 88 aa, Heterodera glycines
MDIKYGLKKPEIWTKKDKNGQIWTKIWIKNAKIYVVNPQKSQKSIEQDQIVPSFCGRLEPDNVVQRQTAAAKGAHRGHDQPQRYHHGQ

SEQ ID NO: 141530 - protein, 16 aa, Heterodera glycines
MIHIGQMTKTTSGRKT

SEQ ID NO: 141531 - protein, 201 aa, Heterodera glycines
YIDHSVIAFLRSNHQIFDKRGTNLHLWLPYSNTTNGQPIWDVFAREIWPIFSANIHHLRFPHGDHLDHLLRRTSPTILTDLDQLNSIYSGALLPAAFGDGFDGPISTISAGQALSKWLHSPRKDGQPKRLRCDNYNAQWNTDWINNFKEHFLRANAISSVSYQIHFSVHVPSMEMVPFELVNECTKEKLTLAKANENELDK

SEQ ID NO: 141532 - protein, 84 aa, Heterodera glycines
MATETATFAALKAFANWLCPSSPLPYNSDLLPLKKLKFLCTKKVALAFIAQLKKHKFILKTFIHLCELFLAKQPFLLLLLLTYN

SEQ ID NO: 141533 - protein, 100 aa, Heterodera glycines
MNRRWICNDVWMDIFPCFDHAQLGLKLALLSSRFNALVDKHFDGKSELTIWRPIAIRRKDKGPEPKLSVQMDRKFDKFVEFPLPDRPLPSKIRFKWLRIE

SEQ ID NO: 141534 - protein, 82 aa, Heterodera glycines
MTTQQRIFGNQLLFLCIFLIGVVFFLFSAAVANGAHLVDSSVDQIGRVQHNHNGDINIRRGIERFNDNRMAQNGKEKWRKYE

SEQ ID NO: 141535 - protein, 108 aa, Heterodera glycines
ARHNISPLHVAAKWGRVKLVELLLDRGAIIDCRTRDLLTPLHCAARSGHDTVVELLLERGAPISAKTKNGLAPLHMAAQGDHVDCARWAQKLKLFGTLTIYYSFPMHL

SEQ ID NO: 141536 - protein, 155 aa, Heterodera glycines
LLYVARALGYICIVTILVEHGANVNAQSVNGFTPLYMAAQENHEVVVRYLLAHGANQALATEDGFTPLAVALQQGHDRIVALLLENDNTSKVKLPALHIAAKKDDVRSATLLLESEQNPNVTSKSGFTPLHIAAHYGNENIGQLLIEKGANVNFQ

SEQ ID NO: 141537 - protein, 150 aa, Heterodera glycines
MVKQEQKQLVMNRPDIAFCEGSISAFFVSANVSVRGANASATILESSEQQCAKYCADNRDNRGRTLLCGSALYESDTRQCKLYRKSRQIFSKIILSQFLNNLNLSAPDGELKRFAENGRRYYEKFCLPDDVPMDCAFTHFARVDDHILKG

SEQ ID NO: 141538 - protein, 162 aa, Heterodera glycines
MSEIGIPTPKRSKSEFRLPKRSVIAIPTPKMSEIGIPKSKIFSEIAITTPKMSEIGIPTPKMSEIGIPTPKRSEIAIPTPKMSEIGIPTPKKVGNRNSEVQNFFGNSNYDPKNVGNRNSDSQKGRKSEFRSPKFFRKSQLRPQKCRKSQFRPQKYRKSEFRP

SEQ ID NO: 141539 - protein, 108 aa, Heterodera glycines
MICHQLWCPRYDSYGHPITSEAVGEIKQIVIKMILFAKVAIYRQELKVKVILYRQELEAKDANNINAIGIQNEDIIGTSNILRHRFKEIQYLSKVYNGNEVHLYWMFL

SEQ ID NO: 141540 - protein, 80 aa, Heterodera glycines
LFEFPKRTLEKIDFFVFGAVPPNRCAQIYGETESFGNSFPIACTLILRWIFAPHNCLSTPNGHLKKSIFLFHKYFFQKVL

SEQ ID NO: 141541 - protein, 77 aa, Heterodera glycines
SQTRPERNPRKIRVVASYPENVVGIHSQTRPERKSRKIRVVATIPKMWLEFIAKLAQKENPEKLGSSLLFRKCGWNS

SEQ ID NO: 141542 - protein, 48 aa, Heterodera glycines
IAQLTSNEQQPSRDRQKSKKCADAPVRNAAAKLERQQRIPCLVRQQRR

SEQ ID NO: 141543 - protein, 139 aa, Heterodera glycines
MLMDAWGILPGGDRLAVPLKWLPTDPTAPLTGSPLPFKRPSGWEEFIGVINAMIGGMCANFTFSGDEHLIKREIEKISEFVKDITGNATQWIRAELENSWPLEIIRHVKIGIKNPVIDPYSYNYTANLIDDIVFARGPF

SEQ ID NO: 141544 - protein, 209 aa, Heterodera glycines
MIQHDHYEKETIRKRLDRLHELWDRLFAMLENKGIKLQQTLKLLQFVRKCDEMLYWIKDKIQFVSTDDLGADLEHVEVMQRKFDEFLKELKSHESRVLDINHEANALIDEGHPEQQQIHGKRDEVNEAWHKLGTLTSTRGEALFGAQQIQRFYRDIDETLAWMGEKELTLATDDFGRDLNNVQALQRKHEGTERDLAALESKVARHGEI

SEQ ID NO: 141545 - protein, 165 aa, Heterodera glycines
GEALFGAQQIQRFYRDIDETLAWMGEKELTLATDDFGRDLNNVQALQRKHEGTERDLAALESKMDKLGTETNHLCQLYPEKSEDIAAKVDEARGRWEALKLSAEQRKRGLDRSYNRHRFMADYRELVEWTKGIQVIGHSPFVASVILSVLSCFEHTQKFKKINKR

SEQ ID NO: 141546 - protein, 108 aa, Heterodera glycines
MCGRGTTVIRRGSTVIRRGTTAIRRVIKRGTTAIRRVIKRGTTAIRRVIKRGTTAIRRVIKRGTTVNRRGTTAIRRVIKRGTTVNRRGTTVIKKGTTMIRRGTTVIRR

SEQ ID NO: 141547 - protein, 312 aa, Heterodera glycines
MDTLLNELRLQHRMEQQQKDSQTQQIEQQQQQMIVQQQQQQLIAAVQAQLATTHQNVAAQQSQPFQQQHQALVAALANNQLDLMINEIQTQYSRQLSAQQLLAQLSRMNFLGIPPQDISTLQNIASGSALSEIVRQMSPVTAAAAALHSPLSSAGVQNPPPGPSPVQHQMSTTVSNCSGPIGVQNFLNNLESFNNGPSACSATTRISTPTTISANLSAVAVEVGHTTSNLGVFWLLFGFKLLSPLRITRQPAPPAVVIVARLVSLLRFPCGKSVRTSPARPLPESLPPLFQLRPHLPTAFLRLNSRENQPLR

SEQ ID NO: 141548 - protein, 79 aa, Heterodera glycines
MCHEAKNNVETSKEEPQYELKQIEFNAGQIGGTSVSSRLYQIHRHTVKKAGLSVPDDNLPAGAGDTGIAEVLEKHGEEN

SEQ ID NO: 141549 - protein, 86 aa, Heterodera glycines
MEKIKNNIGDSFVWISVDETTDKMGRAVANLLIGKLDGQKWHTPHLISVKCLEKVDSAAIARFVNEGLGGSCFCNFKSKISQGFRQ

SEQ ID NO: 141550 - protein, 113 aa, Heterodera glycines
MPLFVFPPLSSSSINGTANSPVSSALADQFHRQFVSGQQIASITAIPANACLFVSIIDTVADDGGQMARADENGTKTTAKGEKHRIEGTLFRQHFAISGGKNHLVNTNGGTGH

SEQ ID NO: 141551 - protein, 180 aa, Heterodera glycines
MLQQNRGHCRLVKRLLFGRRPFVRLALTLFCLLLLTVLALLVEFPSKWALIFNGHGSDGKFSSYANSDGLGDDGNGLAVPPKCCQCADGWRGHFVPAETEARVFQSVRREHIELLAKLNEAQAKMDAIEAKMGEKEAELAKLELRVEELKLLQREYSDSRAVRVQLPHSPPKRGEHFRED

SEQ ID NO: 141552 - protein, 97 aa, Heterodera glycines
IPCTQFAHLKQHNETVKHKAKLERNNGGQQQQFLTTPNNVPNQFNLDLKYIGDSFFGFRWTKRQTKWEERWPIADWKIGWTKIAQPTFDFRQMLGES

SEQ ID NO: 141553 - protein, 287 aa, Heterodera glycines
MNTFNNQQNASADNNNNNNNNNNNNNNNNNNNNNNNNNNNNNNNNNNNNNNNNNNNNNNNNNNNNNNNNNNNNNNNNNNNNNNNNNNEDENDIDFIINNLGGEGDEDEDDVENGDDINDDDDDERDELLPLRLCFFDAETSQERPLQLNNQVAHKHVPLLIVAEFICEPCIRAGININDGQGQRAPGCVCLCGRVRGQQMRQWMSPPFVNAPGDNTPQPEGAPVFNNRRLFFHSFDNEASDPVDQFLDFLIHHGSRKAHTICIAHKRGKYDFHLVLEALHRRSYPPK

SEQ ID NO: 141554 - protein, 45 aa, Heterodera glycines
MHHHPPNHEKAINLSILTVSGPALQPYFPPEPEDGRFREAPHQGE

SEQ ID NO: 141555 - protein, 39 aa, Heterodera glycines
MVMTGTEDKSSTPEKGLEKWPLRLRMAAGAQITHSQREE

SEQ ID NO: 141556 - protein, 113 aa, Heterodera glycines
MRFPSTILEKSTVKLFQAQKPKSKNKKSQNERLFGPNLLQQRIASRSEKGNPLELDFVHRLLLGIQNDNLWAIEARRIQNFVIFVKAPYYPVAKKLLPDMHKKATLENFYGQV

SEQ ID NO: 141557 - protein, 60 aa, Heterodera glycines
MGQNMKLILKQKSIESMENWQQNRTHYTEIIDESSEQQNNNYGQGRSKRQLANCKICGRQ

SEQ ID NO: 141558 - protein, 125 aa, Heterodera glycines
MGQNMKLILKQKSIESRENGQQNRTHYTEIMDESSEQQNNNYGQGRSKRQLANCKICGRQCQYIFYGVKSCESMVKCRGCRLDKCLVAGMDPTLINVPPSDKFKQFLTELEKRKLSAMLTHSEKN

SEQ ID NO: 141559 - protein, 95 aa, Heterodera glycines
MHIEKIFPEILMILILFISFSDSAPPKNKSAETVDASRKYTVTDYTVDIGKQLSRFQTEKLIKQAKQWIKNVQNGLKEDFDQRPLHRCWDRGMTK

SEQ ID NO: 141560 - protein, 90 aa, Heterodera glycines; identical to SEQ ID NO: 136033

SEQ ID NO: 141561 - protein, 122 aa, Heterodera glycines
SKNIAILPRRDSDLEAFSHNPSDGSFAPLVYRPSTTKCLNLRFLSYAGLLLATGLGKTNLSHDGLNPAHVPYWWVNNPTLGEFCFAMIGRADIEGSKSDVAMDAWPPQASYPCGNFSDTSCW

SEQ ID NO: 141562 - protein, 73 aa, Heterodera glycines
MNASVWKIGLFEKLKDGKMAECRECKANGRAKYEFGLPDFSTKSLKNHLFSTIHANSELIFLNKAIPMLDYKY

SEQ ID NO: 141563 - protein, 30 aa, Heterodera glycines
FMENFMNFLSSNKIKSVFVVQHWDGLVQKY

SEQ ID NO: 141564 - protein, 137 aa, Heterodera glycines
MMRPVQNKAIVIDRKKIRRPPKNQCNLKIARALTKGNNKKKQLDEGPYVDAAIYSPEMLEKLEKQAGKKVYVTKKYDLAAHARTVEEAKQNLILYDKKIDQLRKMEAKFAALTYQNNSEEQTEQQRHHILKLIKLIP

SEQ ID NO: 141565 - protein, 258 aa, Heterodera glycines
MRNSRKFRLIVKKEKSRELIDYKIENQARISDEDLGKLKKLANIRIRGDEAHHSFYDEEIYREIGAARGKNLSEPSGQNRMKQIFNSADHHDPLEPSSSNYDQDDFSFDFGRAWQSPSPNNPRVFKSEARTAPSSPITHFMPSTSNSSPISPRRSSWQGPPVYNDGRGSNSAASSAPSSPTMPKSSATSPSSSPNTKMRKTKKSLSFNKLFGRKSSGDSEKQLTEEDYGGWRRYKECELGIQNAITTIRSRLDQWDAE

SEQ ID NO: 141566 - protein, 80 aa, Heterodera glycines
MIANVKFFPLIIFVYQTLINLIAESGEINSCRTSNVSSPSKSPRRTLAQLFREENESSQRENEDKKMKGKMCKSDSSTQS

SEQ ID NO: 141567 - protein, 284 aa, Heterodera glycines
MDPTLVEAEQSEELSQFIQSLYKAEFKADGFSEIGSVIQLLRTMPHFEMLEPTDQVILLSFVTIPLIAMNARFNPLKTNSEIITNNNKFNPLFHAATVKTFEFVPISDTIKNPEKAVEYLDWQIARYRTNSSEKWVIGCSNVLKRMAYFPHNGGQLKKVDFKENVRTILENNVQVLQRSAAFDPRDLYEQVPTVAQIAASTRRTTAKKLTTKTMPKTTRITMKTTSTTTETPAEHEQDYDNLAGAGIEWDANVEAKPPSDSSQKLEGGAVLSVADNELNIAKQK

SEQ ID NO: 141568 - protein, 64 aa, Heterodera glycines
MSYSENLFDFCKANRACEVSNDTKNVRFERERKKPREILCFIWLGIGKFFYKLLEVWTEYGVYV

SEQ ID NO: 141569 - protein, 237 aa, Heterodera glycines
VHLTDGGGGFKEVQIQTLAQCHANNGSKETANKPYGIEFRMPREGGNCDDGLLVCYPALLQRGNNHLEKSRNFKVTRKFIVEAKMDNSLGKECVQNMAKNGRENGTIIWRGIKLRTMPKQNNQNNGRIIILETSISLNKQYNLSAGQHKFSVLFALNQTADNEPFTRFSSVENDFGGRAMQNDFLRSNGPSFLSDYADLWLLGLDMLPMAHQTEEQTEQLKMELFISRSSKCLIEAW

SEQ ID NO: 141570 - protein, 59 aa, Heterodera glycines
MPLRRKINAAMAYTMKLNESCAILGKKFDCSFAWLLERYKLSDKYAIKANTEVKYTIKF

SEQ ID NO: 141571 - protein, 56 aa, Heterodera glycines
MEKKLEWNGIPAFSPLKSRQISLLPDRYLYLNLFLFTNSKMSHNPKEANKEMEKAM

SEQ ID NO: 141572 - protein, 125 aa, Heterodera glycines
IRRDTTVIRSSTTVIRRGSTVIRSSTTVIRRGTTVIRRDTTMIRRGTAVIRRGSTVIRSSTTVIRRGSTVIRSSTTVIRRGTTVIRRDTTVIRSSTNLIRRGTTVMRRGTTVIRRGTAVIREAQQ

SEQ ID NO: 141573 - protein, 52 aa, Heterodera glycines
NASHYFFVQSVKCAVALSNLALSVGPSDNSSSNWPPSLPPPNIVGIRRIRME

SEQ ID NO: 141574 - protein, 16 aa, Heterodera glycines
EAIPEGFGLPINLGAS

SEQ ID NO: 141575 - protein, 16 aa, Heterodera glycines
EATPEGFGLPINLGAS

SEQ ID NO: 141576 - protein, 216 aa, Heterodera glycines
MCPEERDLVIEKGLKTCNSALDELSKKVIEVFGKLCTDKHQMELNQSPHTCARILAATYKLLAAAENDVAYDIVCLFRDAMLQQSQREDAHGQETLAEVYSKWYLEVLLRKASTGQLLYSDHLQAFVTSEQPQQQQTSAATGAGALFAESYTDPRELRALAQLIGPYGIKAMEERLVWQIASQITELFKLVRENRETLHAARVNFDKPAKLRERFD

SEQ ID NO: 141577 - protein, 25 aa, Heterodera glycines
MTGKGFGRLYMYSDKLEERRMGIWD

SEQ ID NO: 141578 - protein, 86 aa, Heterodera glycines
MSDNPKEAEKEMEKAIFIAADCWLEVFGLLPRFQLGLGIAMISHRFDRRVDEHFKTRKWTLGRIVIQRKIGENGAKEMEIVNSNGK

SEQ ID NO: 141579 - protein, 139 aa, Heterodera glycines
MQRAIKYFIDYYAINDITQLYALLKSEIDSHPSNYFPNPLLSVSCVHIVNTEFENQPVIVEGTLDLIDELLFSTCYPKTRQGVGWSEPLYVELTDLMVCPGDLPICLSHFGQRKERRPSLMVDELDWHDSDDDAADEAW

SEQ ID NO: 141580 - protein, 95 aa, Heterodera glycines; identical to SEQ ID NO: 124528

SEQ ID NO: 141581 - protein, 101 aa, Heterodera glycines
MGRTNEMNGQKTAKKKEKKEKGNETSKRAQKKANGRQEEKRQKAQKEEKEGEEEEEQRENMEEERGETSQMDVNECTTATFEASGKKRKIEDLTVFDFEII

SEQ ID NO: 141582 - protein, 85 aa, Heterodera glycines
MRFIALDAYEKSGLLVVLLALLLSSLRMHETLKMLCVHSTERRVLALLAVPEAALLRFASAADLRATAVVLALVKGKKCSMMLSE

SEQ ID NO: 141583 - protein, 151 aa, Heterodera glycines
EITYVPSSARTASSASRASSNSTKAKKGNLLISFCYFKLEKLKAAPTAKREGALVKSAALGDHRHRMTEKEEDEQLLQQSVRSDDSLIFENSPPFIKNGEMRDYQVRGLNWLIQLEHNRINGILADEMGLGKTLLGKTLQTIAVLGFLKFY

SEQ ID NO: 141584 - protein, 83 aa, Heterodera glycines
MSKRENHPEKEREENRAKFLRSLIDDAHLILAHGNPKIIDHRLFDWDDPGRLEAPAFPPFFDVADALIMSPMVYNILTYSEPL

SEQ ID NO: 141585 - protein, 93 aa, Heterodera glycines
MLYQIELPFASVIMDSSISRNDDVFAYKRFSKFFFKIESFVSPFTIFYADFAKYEKGEHVQLEVFRQGKVPEMMDSKEFTVEQVSYTSKDGTP

SEQ ID NO: 141586 - protein, 92 aa, Heterodera glycines; identical to SEQ ID NO: 124679

SEQ ID NO: 141587 - protein, 92 aa, Heterodera glycines; identical to SEQ ID NO: 127421

SEQ ID NO: 141588 - protein, 73 aa, Heterodera glycines
MIGRAVRNRPFIFEGIFKFILYPRKMSISFFEKFYTSQKRLRMRRRAVHNRHFISQRIFIFILYPRKWLSLFL

SEQ ID NO: 141589 - protein, 37 aa, Heterodera glycines
LEIGSSVFTRENLGKIFKLVGFFGVLSLGNFCQNDDI

SEQ ID NO: 141590 - protein, 178 aa, Heterodera glycines
MKKIGEKIKKGGDHTIKYSEEQKLQLEIEEDDDNLVKDDDSMGDDDDNIDDNDGNMDDNDEDDLGIDMDAIIRELEMEEGKDGEDEGLGLDYDEGDFEHSGDDDVEEEDAPKAKAFVIAAKKGKKKVLESEDDDEIDLEGSDDDPVEKEDEPKPKAFVIAAKKGKKMVSESEDDFRED

SEQ ID NO: 141591 - protein, 225 aa, Heterodera glycines
MLEPPIVFIDGNVDATKRIEFGSYFKLDISPKLDENSEIVYRVNVYCADNNHFEFKTYTKSLANVVINSNYKVFTPIGSEKMKPDIKGQLCKKYKINVWPIYEKWVDYPKEMSKEKSKWENLVSKKWGNLLRQTEFVVDNGVAIKKDTTYKQVKFPSYFNLTIDPLLDHEADPIYYVKVKCSREDSSTFKTFTHGNTQIVLNEKTCTKFDISVSKLDKEVEFLEV

SEQ ID NO: 141592 - protein, 200 aa, Heterodera glycines
ETIRRVRLLSTADCLRADKSTMANSLEVRVPFLDKQFLALAMGIAPQHKCPKIEPGKTVRPMEKWILRKAFEDKEDPFLPDEILWRQKEQFSDGVGYGWIDELIGHCSAQISDEEMANASSIFPHNTPTTKEAFFMRKIFHQHFPSKSAAQTVLKWVPKWQNNEDPSGRANAMHEQTKTEEQLDNTEEGEKKKKGQKNMN

SEQ ID NO: 141593 - protein, 137 aa, Heterodera glycines
MPFWVWYLVDHPSRDDLLTIIDEKSLSELFIKKAHHLNMGVIFITQNLFEKKMKVARINSQYIVLMSAPNAALQIRNLGVQLFPKNLTFFLSAYKDATASPYGYLFLDLHPASSPLLRIRTKIFKEDEEKALYIQND

SEQ ID NO: 141594 - protein, 189 aa, Heterodera glycines
MENKFILVPSDLYKNLLKPDAGEINVDNAKNKLSSLLKQRKLDATSKNLLYNQELRRFLKLRKEVEDKPVKVELSDGSLMVFKPKQRERDSKIPTQIVNDEGLDETGSIPTLEDPYTTAEESDAESTTSTPKTRPLIRPMRVGTTKFRQKQKSFVVKKKGKIMSIINNDPEKIGVGSRGHILRADGRHI

SEQ ID NO: 141595 - protein, 219 aa, Heterodera glycines
IDPPRASVPSAVAIARSAGINVVMVTGDHPITAQAIARAVDHPITAQAIARAVGILTDETETVEDIAIRKQCDISQVDPKEASAIVVHGSELREMSEEASAIVVHGSELREMSEQQLIDVIRNHREIVFARTSPQQKLAIVQAFQQLGHIVAVTGVTGDGVNDSPALKKADIGIAMGISGSDVSKQVTDMVLLDDNFAFVTDMVLLDDNFAFPSKLFLA

SEQ ID NO: 141596 - protein, 155 aa, Heterodera glycines
MSAVDGHTKCQTPTVFGGTQLDSATRRLDQMIDQARYRHSQHRNKFKEAIDYLDHIFEDFQREAADSAARPTTNGGGGKKEKAAAAATTTTSAQQKHQQQLQQHAQAVQDHSPAGGAVVIEPVQATFRQGSVKSAKEAFEKVAAAIASDKQNSRV

SEQ ID NO: 141597 - protein, 41 aa, Heterodera glycines
MPVTRMIRDAEVGGDKMIREAGQRVGENALGMWKMTSKTFF

SEQ ID NO: 141598 - protein, 86 aa, Heterodera glycines
MSTAPNDSIEEEEEDGSDSAAATTATPASVGSSSLSSPTAGGAAAGVSSNLFASSSITTAAAAVANSESNDGGGVASSEEHNNNNN

SEQ ID NO: 141599 - protein, 43 aa, Heterodera glycines
MALFFTGYPADVAGAVSSSGNRRNVKYIDYGPLIRQSRKNQNR

SEQ ID NO: 141600 - protein, 58 aa, Heterodera glycines
GREAALIAQQIYKRARSARLRSRSCVNSPTNLETGAKRPYKPNKIKKTGAKRPFEAAK

SEQ ID NO: 141601 - protein, 77 aa, Heterodera glycines
MKTLFLFSLLFFSSYENPIRKQRAVRNERAIAGLAQLAASLAAVKAFIAANAALTASTAVALAALGTDIYLAIELVR

SEQ ID NO: 141602 - protein, 91 aa, Heterodera glycines
NTFYNIYKWVGKKYSNKIVKILHKNGVFLFISRYFPLFASRPPLLLLPAVRLSCYCQPSASLVIASRPPLLLLPAAHFSCYCRPPISLVIA

SEQ ID NO: 141603 - protein, 180 aa, Heterodera glycines
FERSAAICGSGETSPIFKQVTFREQQVTFREQANIITSYLDGSQIYGSTEVDALDLRDLFSDHGLLRFDDHGLLRFDIVSSAQKPYLPFERDSAMDCRRNDSAMDCRRNFSVENPIRCFLSGDFRANEQGLTAMHTIWLREHNRIATKLLELNPDWDGERIYQEARKIVGARKIVGAMLQ

SEQ ID NO: 141604 - protein, 64 aa, Heterodera glycines
MLLTKKTEKPEKVWDQQCNLEKSSALSIGIDDHNSRRAERVLYIVSVLTLLFVLTELVGGYLAH

SEQ ID NO: 141605 - protein, 23 aa, Heterodera glycines
TLLFCFCAIPIIVGEMCTQRTHH

SEQ ID NO: 141606 - protein, 21 aa, Heterodera glycines
MAISFFSWGFDRKLGTNICLL

SEQ ID NO: 141607 - protein, 19 aa, Heterodera glycines
TFAFSSLALPNTHTIFEML

SEQ ID NO: 141608 - protein, 19 aa, Heterodera glycines
TFAFSSLALPNTHTIFEML

SEQ ID NO: 141609 - protein, 19 aa, Heterodera glycines
TFAFSSLALPNTHTIFEML

SEQ ID NO: 141610 - protein, 19 aa, Heterodera glycines
TFSFSSLALPNTHTIFEML

SEQ ID NO: 141611 - protein, 19 aa, Heterodera glycines
TFSFSSLALPNTHTIFEML

SEQ ID NO: 141612 - protein, 188 aa, Heterodera glycines
MNFRGATEAYAIVHSLPFAKLSHQVVKLNIHMPNQQPIVYRAFQLVSKAQQIQQGELPETQCSAYWKQWQNEWKHDPKLKDMLFEKVPEHFIWAKDKWNKRKYNLTKRPPIGRIVPVPPSDPERFALYSLMRHFPGDPDHLKMVNGLLCTSFTEAAIMHGLLEDDKIWDKTLAEAALSRWPDQMRWLF

SEQ ID NO: 141613 - protein, 50 aa, Heterodera glycines
LQIYWLKLHMRYISKFFDSVRRFDKDGFRLAISRSTFGNWSRIFSAITCN

SEQ ID NO: 141614 - protein, 82 aa, Heterodera glycines
MKEMLPWSVADGINPLEKFIDWILEFKFSNTVAFGHYAGCKLNHLPCIDDYGPNNMKEDEYDHFMKWYEHNRDTKFELGKRN

SEQ ID NO: 141615 - protein, 52 aa, Heterodera glycines
MKVLAYMIFALNFAISLQMIPSTRRSKPGSLLHSEQSAFVKYKQSSINKVSC

SEQ ID NO: 141616 - protein, 132 aa, Heterodera glycines
RLDDPTYSFHKYIEIKKKKIVENIKQKKETFALHKRRPIPLEGRIVIVVDDGIATGLSAEAALVQLRDKKAAVVMLASPVCPLSTVGKNLVTILRYSKFKYRISLHRAHTYLEQSQEKEYISFLQGWRDTKK

SEQ ID NO: 141617 - protein, 84 aa, Heterodera glycines
MSSSELKEVIRFAFLLRYQQVVQTQISVLQQSSSVANEGSENEAEKIQIKLSHNDIIRAFHDLKNVSMAPFSESVVTEEVVDVD

SEQ ID NO: 141618 - protein, 139 aa, Heterodera glycines
LFEYPKRTLEKIDFFVFGAVPPNRCAQIYGETESFGSSFPIACTLILRWIFAPHKCLSTPNGHLKKSIFLFHKYFSESALKRTKFYLHVSLGTLMLFLSKREMEKNFFKNFSLYFGYIVLLLVGCLEQWNHAHPSDLAS

SEQ ID NO: 141619 - protein, 43 aa, Heterodera glycines
MTNSNTEYTPMAQLNDDRFEHRIIFQSKSSKWLGLFMKCILMM

SEQ ID NO: 141620 - protein, 39 aa, Heterodera glycines
MDSVTIEKWAKKIGSKENTSKRRNHYTIAEKMETLKKII

SEQ ID NO: 141621 - protein, 16 aa, Heterodera glycines
EAIPEGFGLPINLGAS

SEQ ID NO: 141622 - protein, 95 aa, Heterodera glycines; identical to SEQ ID NO: 125597

SEQ ID NO: 141623 - protein, 68 aa, Heterodera glycines
MARNSEFRHFWGRNSDFRLPKNFWVSEFRFPKFLIKSRKFGVGIPISKRPRNATPDTYLGITVLSKGD

SEQ ID NO: 141624 - protein, 104 aa, Heterodera glycines
MNDEQIAQLFEVDDWSFKNWKKISGITETPTVGEKAVSEEISNIIEPLSLVNLEDRSSPIDTFEQFDFGAVHGKASAAVNHQINLSSIIPKNEFENEYKYIQYF

SEQ ID NO: 141625 - protein, 15 aa, Heterodera glycines
MKINELVNCRYPWYS

SEQ ID NO: 141626 - protein, 34 aa, Heterodera glycines
MMPQNPQSHRDSEVLTMSKNFWNNIFHIDVRKPK

SEQ ID NO: 141627 - protein, 92 aa, Heterodera glycines
MRTLMDNYYLLLILLFLLIIFNDGQPSKKRPPKDDAHRWSNRSENTKIIRAMFPNVPNEAKKLDMEGDFIRIDGKVYPAKGILLICRDNANE

SEQ ID NO: 141628 - protein, 114 aa, Heterodera glycines
MDELNFHYADSDCYRSELAELYTYSEMDEFSLNYECFIRYMREKKGAYGDFADVEVKDFDRWSTEATTEEENGGKGLDAASKWFGDHGTGGFEQDCLVRGALNAYHVYEHGLFQ

SEQ ID NO: 141629 - protein, 95 aa, Heterodera glycines
LKHLEKSFRELMKFTNSVNESAAKFEKGNNSKAKNSAGLYDDEKELIKITKALVNQNWQLGRSRSTSIIGRFATGNCRTNAHLCIINWTKSGHRQ

SEQ ID NO: 141630 - protein, 97 aa, Heterodera glycines
MRNKKDVNRLIEPIRSIKFSEKYENFIVIICTGTQFNAETFCQFVGTRLRYELLEFVENPLSNWVDFCHVYPKLITSAQCLAETGPKKWADKGIKIN

SEQ ID NO: 141631 - protein, 52 aa, Heterodera glycines
MFSLIFFFIFATISHLNGNDDELWDINLSCKPFIKSLAAKYSDLVRCAVENN

SEQ ID NO: 141632 - protein, 23 aa, Heterodera glycines
MKSDLLIKLLYGFLILISYDKCH

SEQ ID NO: 141633 - protein, 296 aa, Heterodera glycines
NWEHHKSEKAPQQEVEDQQQEPVEQKHKIDDKKVETHGGIERKEGLSYFAVLVNFLKSIIGAGVLSLPMAFKDAGIWGALVLLNVAAILNCYCMMQLVETTQFHYKRLNVTYLSYGNLAKEACKYSFPWMRKFKLMAKRLVNGSVLLLEFGFCSTYYLLISTNLREVFNFLTVSDTSIKVWLVLIYVPMVFMTLIRSMRILSFFSLAGNVLMFMSLFYILYALAYRLLSEEEKPEIHAIGSFSGMLLASSTMIFSYEAQTLNECRGQIGSLCVHLLFLPSANVRHRRWYGIPIGRN

SEQ ID NO: 141634 - protein, 18 aa, Heterodera glycines
YTEAIPEGFGLPINLGAS

SEQ ID NO: 141635 - protein, 73 aa, Heterodera glycines
MGRRIRLGHFVIMFLTKNQIIGDSLISFRLRKIIFEIVLEKRICAFAFFAHCHFGRVSAFIRRYTKKPTIKKL

SEQ ID NO: 141636 - protein, 122 aa, Heterodera glycines
MPTLCSNRRNFYKLTKKHFPFGVLSKDEVIAVYQFKSLPNCHGISDGFFPMPFPTNGRISDRKKGTLLIDIEKVSEFALEKVGSSRYSKKVYINGLPWRIMAKIKTKIGSTDNNEKWLGIFI

SEQ ID NO: 141637 - protein, 208 aa, Heterodera glycines
DEGAEEVEAKTLPMAEEAGETIEENESEESSEECDFSFSAPKSNGEQMAAIDTNLYSRQIYALGHSAMEHLRKASVLVYALGHSAMEHLRKASVLVSGLGSVGVEVAKNLILGGVRSVGVRSVTLHALAFLSAPFAVRAVCFLALPVCALSVLSFVFLVVLASFSVGWRLVVLASFSVGWRRFSAARLFSAFVLGFVVSGCVAVPFCS

SEQ ID NO: 141638 - protein, 28 aa, Heterodera glycines
IPNKGDLCAYWVQFRDLGPQIIKNVRSS

SEQ ID NO: 141639 - protein, 115 aa, Heterodera glycines
MYLLYLFNHFCTSFIKFVPLLITVVPLLIIVVPLLIIVAPLLITVVPLLITVVPLHITVVPLLITVVPLLITVLFLLIIVVPLLITVVPLLIIVVPLLITFVPLLITVVPLLISV

SEQ ID NO: 141640 - protein, 163 aa, Heterodera glycines
PVPVGKFIPFPSLCLWDAVTSPPPSAYFQVVFLPTRVYFLLCLFGRQFRIWEQRDSMAYFEYYFPLMTFLQLMCYMGWLKMAESLLNPLGEDDEDFESGYIIDRNLAVGMTMGYIIDRNLAVGMTMVDEFYGQLPTQKPDKFGKEGEVPSAYTEEAAQIEINR

SEQ ID NO: 141641 - protein, 91 aa, Heterodera glycines
MCKAVRPLKKQCQILSKQHRTRKMPLMTIQCQMSPKLRTLKMPLMSIQYQMSSKLWTLKMPIISIQCKMSAKTMDNENAIIYNKNENVIQK

SEQ ID NO: 141642 - protein, 138 aa, Heterodera glycines
MEWAAAFLQLEGPFMEHFNRTLNHTVQRHSDSKSRWTDMVTTSDQGSCISHTQRKFVRPNLRMVLTDFMLNNCGRAAAVQQRWDELADVAHRVRSGVDYCTSTEKPKKEPPVAGYDFVPATKAEEMYKRHGLAQALLC

SEQ ID NO: 141643 - protein, 71 aa, Heterodera glycines
MHSSVDDGQGTVRLVWGLRTHIVPYIKRLQIVEEEEKRLLEDRTDFVEVWISSFGAKFVFSCPINFTTKII

SEQ ID NO: 141644 - protein, 100 aa, Heterodera glycines
LFLSATIAVSFIIWLHSFEHDADSNGDQFELVNSCTRERLTGRIIGEDDQFLIERCPIVGKSADHPDEWGREEAWKTKGEGRSKMLTFGTPFFEWNNTFS

SEQ ID NO: 141645 - protein, 65 aa, Heterodera glycines
MGGQTIGGNSGNLKDKKAKISNKINLQKKYVEFEQERERAKAEGEAAHEEAVRKFSEAAKKADKK

SEQ ID NO: 141646 - protein, 33 aa, Heterodera glycines
MHEKFRSVFTSCAANRAEAPKGATRVNDGNENV

SEQ ID NO: 141647 - protein, 217 aa, Heterodera glycines
MCAFHVKQAINRRIQSMGFMQLYSSKEPNGLEFQRLVRKIGALQFCPPNYLARSLQLMRHLITHSPLETLQQGALSELLDYCELSHAEEETAVAVDEGRQLPARPLELTLELDRGIASAKADILAFLNTDYCNDEFVEAMSNYYGRIGHLVGFNPPSNRNEAEEMIIEEDARLLLEQSLDENGLHVDQYFEEMGLNEVQDENSPDVNSEDGEVDIMN

SEQ ID NO: 141648 - protein, 147 aa, Heterodera glycines
MFLLKLSILFAHYFINVQLAEEQKCGEYSIGELVKRTKYRSYKNRKQPKEVKTSGNDDFSGSFGELFPFSLFTLFDFGFPKISVGFIVYENQKQCVAVKFFKNEKDEKETDESGNLKLHTKAIEVAKRITKCLEEKERRHLIEMIDA

SEQ ID NO: 141649 - protein, 199 aa, Heterodera glycines
MIIHEAFVDKLRQENGKETLELEDRERFMTEMRNLYDYESFSKSYIMKMLNKSSNITSIDQFDAKTWERNNNLVEIVLEFWQRYPKTALLVTNMLHPTWQQRLTAKGILDFVAGKCYLREFKWARKAKNLRLFNYFKFGELKQMIVRKQRMVRVQFWKKNRKQMQEKFGNLKRKVAEIMEQQQKEMAEISKMSTNCENE

SEQ ID NO: 141650 - protein, 66 aa, Heterodera glycines
GHPGQPGGQGPPGPLGAPGQPGQPGTSGQPGQPGAPGHPGKDSGYCPCPPRSSVLAVKKKMAAAKK

SEQ ID NO: 141651 - protein, 143 aa, Heterodera glycines
VIQDSQEAKDRPDLLARPVSPASLEPLASLDSPEHRDIPARTAATVRARPALPCWQSKRRWRQPRKHKRQAQGEENRKTKDRRESEAEDDHNWVEVVVGICVHQRISHTNKGHSLIAVFCIFENAEIALVNFLFNSALFILTH

SEQ ID NO: 141652 - protein, 556 aa, Heterodera glycines
LRATEILLILPLLLLVQTSDFPARVSEGIINFCVVPPRPTSHPSLKQTQSSRSGQKRFRFSPRPPTAFPSLLRQTKIQLRQIDRKARQALTRRVKQMVSPPSMPGSPAWLKPLPVPVNHRGQIASHPFECMTLRCLCPFFKVIGLNGLCYLPSGKPLGLCYLPSGKPLSMAYRKEYRMLSDEERRRFHVAMNELKRQGIYRFFGTQHRRVATGGAHSGPAFLPWHREFVKRLEIALRLLDPSLAVPYWDSVMDNYLPDPRDSIFFSMDNYLPDPRDSIFFSPMFAGDTDPNGYVVNGPFAFWRTLEGRAAILRDDLGKDAQLFTERQLLAVANERNIWNVLSYTVPFRGCPIPTNFDALEYSHTNVHFWVGGDLATPEHFWVGGDLATPELSANDPIFYMHHSFVDLIFEIWRQMHHSFVDLIFEIWRQMQQSRFLKISLRKTDLKSCANEFHFSHSLMAPFNTLTNIDGLSNAYTDQLYRYALRPVCTRKRPTCDSRYLFCDLDHGVPYLFCDLDHGVPHCVSKVKLGGNCRGFEGKDACFNGLCLFGLCQPGPT

SEQ ID NO: 141653 - protein, 33 aa, Heterodera glycines
MAECEERVTKMLEDKLKQIKALDRKRNQTVFEQ

SEQ ID NO: 141654 - protein, 65 aa, Heterodera glycines
MVAHSDNRWTAKAILVAIFIMSPTKSNESTIAKSKNKLFAILSNPRNDQIQHSGILLLLLADRQL

SEQ ID NO: 141655 - protein, 863 aa, Heterodera glycines
MRTETEIIKKVEIEMEGTNKTQKEVKNVSEPKLTGNIKIEKEIVENLPKSLENEIVADQGESLEIEDENLEENNGMSYENEEEFEIYDVDRRKRTTVTTPDARWIKKVEGSKLRKKGGQENKNMNTRVNYALYRLNEERKRQYDHIFTQACENSNFQLQLAKAILQISPNEGVRRIFDRDDLVARWKGQTLEVGFCVPIIPEKIIWDKKIGADCYEQTPIFAENTTFFVQAGTRELSILGRRIECGKIEDLENVQNATQKEIIHKLNKNLEKIRPKYRNMQNPLILKSGALFESETIRIEETMLEYRRKANNLPSSALRLIQRPNLTDVIKLIKDEATEKLDVVLGKTGSWLEMMRDIPKKAKEAVNYLKGISYALIIIPLFILIAIVIYIVVKYWTVISAGFRAGTFLARIIRSIIGLKRKRTQIVAVPTAPDLDSIDEDAYVLDYLPPRRVAVITNDPRRLPSIRVHFNGLLTSALVDSCASVSYCRESTARKAGLKISELSERNSNLTAANDSQIQILGKTNAKIRIEDQTTGKTGEWELTLLVSPDKHCPGPLLLGLPLLSDLKGIIAFGERKVRLGEIWTNIVSVIDAHVPKTIKVTMEKTEIFEPRTENVTTLDIRKEDRLSVIGKVGLGFNGRRMAENCIRSAEKSILQSEIIQPEGMRKQIPVRNELEAKETEEELERRKRFAAKTPATQGQFANCVWEETAQNTKEEKMKKIENSICQKINQIQQQMTKAFGGLKELAKEMDELTKIAKKEMEKAEEFHPNSNRFANTNTSTWRQHDEFRYRNRGTVGRWVNNSRGRGRQRPYHHNWRGNEGWARNDHSQSEPSTSGAFNRLPKINLKMIRINTDHRIVMMVNI

SEQ ID NO: 141656 - protein, 68 aa, Heterodera glycines
MHAFCARAIYHRACQSKAKQQRWCFEQIKGIESVHRLLEKYICNLSTILRSELEMINFTIQTNFCCSN

SEQ ID NO: 141657 - protein, 80 aa, Heterodera glycines
VIVKFEKFVRDETRNFDAKLVALRIENALKTGENLDDSSLGAGANSSTDDVVTTNCDSSPKAVTGNADNEAETLFEEQFQ

SEQ ID NO: 141658 - protein, 113 aa, Heterodera glycines
STGYREAIPEGFGLPINLGASVRGDCPENKKIDFFKCPFGVLKQLWGAKIQRRIKVQAIGKLFPKDSFPHKSGRIGSGGLPRKQKKSIFSSVRLGYSNNYGEQKSNAELKYRL

SEQ ID NO: 141659 - protein, 92 aa, Heterodera glycines
MFEYPKRTLEKIDFFVFGAVPPNRCAQIYGETESFGSSFPIACTLILRWIFAPHNCLSTPNGHLKKSIYFCFRGSPPEPMRPDLWGDRILRE

SEQ ID NO: 141660 - protein, 103 aa, Heterodera glycines
MDFATGPTKKFCEICRSWIDLFEDKIQVEKLMMHKRCFVCAICDCPLEPGNCSRDDGIIYCQFMCNDRVPVWFCSAHMMLGSGEKCQLLKEKWMKENEEKQEI

SEQ ID NO: 141661 - protein, 329 aa, Heterodera glycines
RREFEDPLLLGKIIYDMYFFMHLCHVPIRVIQQKIRRLLGKAHIGLIYSKRINLLLDELSNLFGAKIPLKPLGFGAKIPLKPLGSRLIQKEVFTVHTGSSPDGPMCFLEVCDDALILRDANGVVQERWWYERLVNMTYSPKTRVLCLWRRHDDQVYMHKFHTKKCRHLYNSMKTAMECRHLYNSMKTAMERAASRGKVQVAGRELGGEFPIHDVERNEGGLLKVRIDGIALQFVNSQEFIELSEFIELSNIKKCNTIGGNIFILEEFNGNIFILEEFNRANNQLIQRRANNQLIQRRYISSVADQICYSVLCVFSFAAAHRHSILTHQK

SEQ ID NO: 141662 - protein, 124 aa, Heterodera glycines
MPPPQPPPLSFTMDAPPPVPKRPSLPTTDKKPSLTAASEAPKIQVPQHLNLNSLEAMLPSTSFVDEQIPPRNFLFYDLIGPYLFRAFLSAKSFVKCVMATDAVVGNRLSGHGCTGEGQNWSNLK

SEQ ID NO: 141663 - protein, 111 aa, Heterodera glycines
MADSERKSEAELAKAKEELRQLKLQAAKEAEEQKRELEEAQRMERELKERVNRKNMHKYPFGNAKGVTRSSARSNANPPSAATEWFHRKFGAAIQLSERKKNECERKQKKQ

SEQ ID NO: 141664 - protein, 150 aa, Heterodera glycines
LLATHSDFFRALFFGPNADENPKIVIDDEGENAVANFERTISMLSSPDAELDDDYVENVLLLANRFLFDSIENRCVNFLMNDSQKPKIFKFRLANQCAIIGMKVKNWTNKIKSRKERQLIKHASPLISAIFYIGENSITSKIAKIPANLS

SEQ ID NO: 141665 - protein, 133 aa, Heterodera glycines
MAKDGGGSSGNWSSTARSSSEEAEKGEKEDEEEKEEAMGEEERQREKGKREGQKEMGKAMGNGSQTEQIGTTEMGTAAEGQTEQNCESSDAQRHANVAVFVLVIVFIVVGVLLTAFLCCRQLVTPLPPDNRCS

SEQ ID NO: 141666 - protein, 41 aa, Heterodera glycines
SVPSNSNPFSVIVFIVVGVLLTAFLCCRQLVTPLPPDNRCS

SEQ ID NO: 141667 - protein, 93 aa, Heterodera glycines
INADDCSHDGSLSVENVLWANTVLASGTAIGLVVYTGRETRSVMNTTLPDSKVGLLDREVVRSSTIPEELGRISFLLSDKTGTLTRNEMRFKK

SEQ ID NO: 141668 - protein, 29 aa, Heterodera glycines
MAKKHNKDGNKQNSGSDDDESKGSDSSSE

SEQ ID NO: 141669 - protein, 33 aa, Heterodera glycines
MNKKERLRFLKNFLEQASSAIISVTLCEKIFMN

SEQ ID NO: 141670 - protein, 237 aa, Heterodera glycines
MLRAQQHQQHGLETVGVVTETVTVSPQPTVETVMVDQRRPAAMPTHIVDPFSSTIVDAGGPPPMTPGTRHRLQEHGVHKAHDLKETLPSPVEGRGSATTTDHEAESETPRQFKAFFKSNNAAAELEIPGQRQNGRREQRVAEPTAAQPQAVEIVHRLRKTGSKTWEISFKPTEVGTHKVLVFVNNMPHPQTPFPIRVYDAGQIVVEDIVTEATVNDTVEFTVDAGRAGFGNLEMAIK

SEQ ID NO: 141671 - protein, 76 aa, Heterodera glycines
MGLISPKTSYVSASVLAPLLYSANAPLSRALCARRAPASGVACRVSSAVARRHQQWWTKKGPQCVLALPLDAVGLP

SEQ ID NO: 141672 - protein, 188 aa, Heterodera glycines
AVYGSPPTPRGASVPLERGPSSAYHSSVSPHADTASSYAPSPSSPAYIARAHSQHASPVEQRRHDLSAEPVTTAGDLRSTSLLQSAMRQREKSEPPRGLLGYTQFGGRIPSPSPKAAVSPPHKYFGTETDVKKPPPPPGADSEAAQFEMTRSAELTLLKEHPSTSEQKENCSIALCFYYFLQNFKYAK

SEQ ID NO: 141673 - protein, 91 aa, Heterodera glycines
MDLLIISAKASFARPPNRKNCFCFLNSLKMSSGDGLGPPLSSPRYVSQLYVIPAVDATEAGKGQLEISVNQGQVPNNVQMQGEFGQYFNLF

SEQ ID NO: 141674 - protein, 37 aa, Heterodera glycines
MSITDGRPADPSSTAALGVVTSAGSGGKRVVQAKHNQ

SEQ ID NO: 141675 - protein, 85 aa, Heterodera glycines
MQNTFLDLLFTRGSHNWNVSVIFVTQSLYGRDIKTARANAHYLVLMRNPSGQLQLRSEGEYSIPKEACLHQIRTKEERINRKRYS

SEQ ID NO: 141676 - protein, 29 aa, Heterodera glycines
LISQRLFIFCKNLPLYLKLNYIEVHEIRH

SEQ ID NO: 141677 - protein, 129 aa, Heterodera glycines
MNYYYFICIFFLILLNHRNFNAFASVNAAVNEDDALVALAKGPEHFDRFCAINGLTIDEKKQLLSEKYEAHLGTLYYLRMDWHEIQQITKQNQFYAPEWERSRKFAFILYEYLFREYVAEYVKGSNNFQ

SEQ ID NO: 141678 - protein, 316 aa, Heterodera glycines
MSGDDEDFVVMNTCQSVFDQVNQPQQMVVHHHHYEKKKKKGSKKKRSSSTSSSSSSSSEESSVSRRRKKEKKKSKKEKKRERKRKHSDELAESSADEGRSTSKKQPIVYSEFDHKRNPWKLLRKNEWVHKPMHMVVDTFGDPENAKYDNSHRFTFVPLLSGDVPDYRAPNSEDSPFWRVFSELYKGLLSNPESGAVGKEQRAFSARVMKQWGKCAPERVFRNRANDKFENYVKISHAPCPPDEEGAVSLGVIKHEMDPQMLNTINIEDFEHIMRSQNASYEEALESDVQTRYSILQAMVLREPDNVDAWLKFVDIQ

SEQ ID NO: 141679 - protein, 617 aa, Heterodera glycines
MRQNDRAVFDLRKMALAEFHFFRPEVYKNFRPDTKPHVMQQELKKGFKTFWTSGLPRIGEPSANGWLRFERSDVDSQHPKHDEAEVLEQKWSCMHEEEKALMAKYKGLGLSSVEIRRRLEKFRAKWFWFPVHFKHDDEKLYEHKARIVSFEELEPLLFSFNDTNCVKDLIFKLLHIFGVPIPDIFIETQENILRQFSRSYFHSNSPISLDLNGFSKFIDCFVTQIAESPMMDSPRIYTALITSISNSPLSTQKKYNTLRQLVRGKIQTLKRHGKETKLSREVQLSLYLTAFEEMIKIKQEHNDECTDATDESNPPITESEECKMCLAVLRMNLDAKDRSLWEIGETGDVDKRKEKLVAENAETKQKAYKNFVERLSHPAALILDDPLRWIGDENELVFELCAYYNYEFPISPLVRISSFVRVDSPFYTTKLAELLKERPSHCGHKCILYTGRIARTAQPIGAAFSAQHPNFASTSACWQRFSQAPLFGTTSWYSGSALPDDYIWVFLMQHITSERTMLPRRVIDEVFTIGQGRCPWSKQFLMESLRGCCDRTDPSVTMVNATMKTHGISVYCTDPEVQLLLEKYSNNNTFRLPSNDFHFSVLACDFGLRTNDAFIAW

SEQ ID NO: 141680 - protein, 205 aa, Heterodera glycines
RALQITCAFRCSGIWPRSASHWPSQHVQWPSIEMAKEIRQEGFDLLSKDLCASSPSTSMMEGDAWLMSTVQAEDKLLQAHTNREKVFSILKTLRDRHLDFSGSATTKQLVKVLVLYECEKHYANYEWNDFCLGDRIIGIFCLGDRIIGILLQMVNCLQCRRCPHFFLPQMDLLKNRSPKSLDESARAVWALVRQLMLNGKALEQL

SEQ ID NO: 141681 - protein, 38 aa, Heterodera glycines
ENSHPRFETIVLDETEDDGHHNNLVGTDSDKENDELEL

SEQ ID NO: 141682 - protein, 100 aa, Heterodera glycines
MPPNLIFTSLHFKRAKDGTGAVLETSKDWAQKMEVELVPMNSIPFQRRIKQFGTLAITYIDRTVIAFLHSIKHVFSLDNSRRNSLMGRAGILCAKWPRKM

SEQ ID NO: 141683 - protein, 76 aa, Heterodera glycines
MTSLATQNRAENEKADEWPPIELCAPKLGILSQFSSVSADSVAHVLVRELAERVDRPSAAEVNSFKNDTEVEWVMQ

SEQ ID NO: 141684 - protein, 143 aa, Heterodera glycines
MEVDHQSLDSICENILSISRHLGLPLTDNLDNAHLSLFKTKLTEFAKESKKQKAIPSLLLPSNLSLNDNEWAKFGQYVDLMNADYAERALLLKRRAEVTIDSFLWSDRVKQIEDKIRQVLEVGGFTNVHFDPVHADDVLAANL

SEQ ID NO: 141685 - protein, 45 aa, Heterodera glycines
MICEKMVICEREKHLCKLNKKSKHRRLPRTNKIIIFFKLLQIFKN

SEQ ID NO: 141686 - protein, 126 aa, Heterodera glycines
MANDKNSILLINLKIQVNSLQIKGSRQRVFTNPKDFRYNWTRIEVDCYKADAGTVSFWGYSNPETKEIIRVDELHCLTYETAGVPKRFKSLQVEEQPPMKKLSPSPFLANNASSLIHVFVPFVGHP

SEQ ID NO: 141687 - protein, 19 aa, Heterodera glycines
TIENFLESNMENLKMLVHI

SEQ ID NO: 141688 - protein, 52 aa, Heterodera glycines
CSSICLLLAFAFCRSHCGCTPFRLLTGRKLVLSSPSANIQIKINKKICQKNW

SEQ ID NO: 141689 - protein, 92 aa, Heterodera glycines
MKEKQQRTLTLDELGIDMEQFMEFVEAISTTAIHKPILPNPKNVLILLKLADYFQVDWLKSRCEAHLINCPEIPLIDRFLMIDHYRLDNFKA

SEQ ID NO: 141690 - protein, 110 aa, Heterodera glycines
AFANASSPANFIAIISFPLPFADSVVPFALTNELTREQLALKVIDNSHRFLFVRCPIARDESKWTKWEKEAIGWRISYLWNRIDIQINYERQIGDGLLDEIPGPSDQQQK

SEQ ID NO: 141691 - protein, 16 aa, Heterodera glycines
EAIPEGFGLPINLGAS

SEQ ID NO: 141692 - protein, 58 aa, Heterodera glycines
SLSLNVILLLLLACQIHWAIEATDAAPLGKWWGKQILSSTSRGMCSRRMAFSASNRIT

SEQ ID NO: 141693 - protein, 37 aa, Heterodera glycines
CFFQDLNVSYINIPTEVQNFSFSVFWGFRFVASSTPK

SEQ ID NO: 141694 - protein, 379 aa, Heterodera glycines
NFFSKITKRYKNRQCKTDPTKKALYDSISLHIKIQTNKFHSQIEKKAISKGRNSIFKYLQKYDVNPFEIPNLVFENKCYHDGDEKCELFANLFANSFNNSDVDPGYLNLGKCFISDIDFNIIETQKLLKKLPNKNGTSPDNISYKILKNCHSSLATVITDLFRISLDSGSLPDIWKESIVFPLFKKGDKFNPENYRPISITCSLCRVMERILSQNIYNFLLKNNKISEYQFGFVRNRSTTSQLNSCGRLEAIINGKNVDCIYIDFQKAFDSVPHNLLLYKLEKIGIKGKLLMWIKGFLSNRTFRVKIGDSLSSSKVTSGVPQGSVLGPLLFLIYINDLPDALPSGVKIKLYADDIKLYADDVNIFVKEQEPTQKLCIKH

SEQ ID NO: 141695 - protein, 49 aa, Heterodera glycines
MEQQEPISAEMLRFHAAIELVKQRVAVANLSGVRLVRLFHQFFILVKLF

SEQ ID NO: 141696 - protein, 71 aa, Heterodera glycines
MDLFCGTELAFSNSYFGPTRHSRIIKISSDTPVRSLTTAEIPPSAGSFSSSDGGLQSRFILWHAFSHWPTD

SEQ ID NO: 141697 - protein, 288 aa, Heterodera glycines
MQSEHQPTFTAQAMPFEYQTQAMAPEHQPTFTAQAMPFEYQTQAMAPEHQPTFTAQAMPFEHQPTFTAEAIPFKQLTQTMQSEHQPTFTAQAMPFEHQPTFTAEAIPFKQLTQTIQSEHQPTTFTAQAMPFEHQPTFTAQAMPFEHQPTFTAEAIPFKQLTQTIQSEHQPTTFTAQAMPFERQTQVMPSEHQPIFTAESIPFEHQPTFAAEAVPFEHQTQGGQTEYQNQPTSTAQTMPFEHRTQTTFIKQANLIRYQSQPAENCNSSSPPPVFWHYETDNDLNGIFAP

SEQ ID NO: 141698 - protein, 96 aa, Heterodera glycines
KKARLQGTIEDFHAYVTLKLQNVKSTTIAVKGNQPQWEQEFVFETDQLDQGLVLELWNKGVLWDKLLGVHFLPLRQIGYAQEAGPGRWLQGKKKMP

SEQ ID NO: 141699 - protein, 18 aa, Heterodera glycines
MARHEILDHLEQINYYKN

SEQ ID NO: 141700 - protein, 76 aa, Heterodera glycines
MSDELSIETLVNGMKYGPKTDPNFCENFKRAYAEYSKTMKDNQIAAQIYKVCQSKISYWKKICGIEFKLKKKMTNN

SEQ ID NO: 141701 - protein, 86 aa, Heterodera glycines
MFFFIFDFDFLGFCLTFLFTAQKLLFIPLLFYGWGGYGYVYPYGFYGKRQAGFGPSENAGTFGGGGEGNSNGGGRRGGGPSSPNNF

SEQ ID NO: 141702 - protein, 78 aa, Heterodera glycines
MEDIYGGNWGVLIIKEPDLISTIIHWTFPDHRHRDGSAAFCLQVENGWQYNVFKTGDIDTEDRLTVEKVMEQINRQIN

SEQ ID NO: 141703 - protein, 40 aa, Heterodera glycines
MFANCCTLLLINTSALTAHCARANVWWWWTTETRIGSTAE

SEQ ID NO: 141704 - protein, 64 aa, Heterodera glycines
GKKLVKIVENGGPAVPIGAAGKHFWKFECYLLRNLPIKLFNFRLGGGGGNSKKISIICWKIFKN

SEQ ID NO: 141705 - protein, 144 aa, Heterodera glycines
NGNCIFFCKYSFQFSKKVALTSPSSPQILRFGMAFGEMNHEWVGNEWLPSLGLGKYRTEFMECLVDARMLEHLSKRDLKMKMIDSFHRTSLHYGIVCLKKLNYDRAMEERRNASENRISEFHLFSCVRDTKIVRQNERKRNANL

SEQ ID NO: 141706 - protein, 79 aa, Heterodera glycines
MSHELSREFIKDIDEWIAQLYECKQLSETQVRLLCDKVGHFKFGQWKIAVMSRNVTKIALPKCHFLLGGFSVTNLTSVS

SEQ ID NO: 141707 - protein, 128 aa, Heterodera glycines
MQTRYFCSVRFHLIGFTSSLTLSSKCFATFPHGTCSLSDSWPYLVLDEVYHLIWAAIPNNPTPRHVKMGRHRQLDRSCTFSGAPVKGNLNKRANPSSRSIRYTSQPQRSCDSALDSSQFTRRYYGNPR

SEQ ID NO: 141708 - protein, 210 aa, Heterodera glycines
MGKADCDVLDEEVSKKTMAQHGIKAEANIYVLVDGFEILVEYEEEEIDKYGVVKWKSKPYYIYFVNATATVATLKRKIAEEIDSFHSIRTIYAHQLTIRHGSHYDIALDDNKTMKDYGIGRLGIVYASTFEFEIFVLHGGKPYTIKMNNGNTVQTLKQRIKSRIGIPPERQTLRLNNPYAKVLEDNKETMENCHIEKETIIFLALDEFES

SEQ ID NO: 141709 - protein, 92 aa, Heterodera glycines
MHFSLIQMMMTIFTKCALIMGMLENSELIAVGNKLVTTVAHESQMIPTLSTTLVPVKIRVKYRESGEPGHVYVTVGDYEFDMTRSSARRRKL

SEQ ID NO: 141710 - protein, 84 aa, Heterodera glycines
MFTYKHPCDFLSPVWMVPMFLGPPKLYSIAYPCFHFAIAFERIRSTFLAKRYERMGTQSTVIIIWIIGAKHVKLNQKIHFWSFK

SEQ ID NO: 141711 - protein, 97 aa, Heterodera glycines
MIGRAVRNRPFIFEGIFKFILYPRKMAISFFEKFYTSQKRLRMRRRAVHNRHFISQRIFIFRGYPRKMAISFFDKFYTHTNALEHDREGGAQYTFYF

SEQ ID NO: 141712 - protein, 97 aa, Heterodera glycines
MIGRAVRNRPFIFEGIFKFILYPRKMAISFFEKFYTSQKRLRMRRRAVHNRHFISQRIFIFRRYPRKMAISFFDKFYTHTNALEHDREGGAQFTFYF

SEQ ID NO: 141713 - protein, 508 aa, Heterodera glycines
MVAKSRGWASWKFRRYVHSQHGQQGCLQRDALQLMQQIGARPGLNAYDAEIVVPRVVDHWNNSQQRHRFAVFIFGSTGQYKPLYKYINNYYDTPISLYLNNGHFDESKQCKECGVIWNVRDNNRNGRKGHQCHETYCQLCNTYHNPERGCFIQSIEPKEQDPYSIVAFDLETMQHQALDPQQPEKKEHQPNFIAARVACPDCIQNGKWKRATAGCQICGPRRTVVFCQHRFMDTQVDKQVIAENPLEPFVNWLVFELPKKCDTYAYSHFGGRFDMVLVFLELFRIGFNPEMLRRGNKMYEMKVRKQKRRNPNIVFRDSFNLIPCSLAALIPSYGLDVEDKPFFPHLANRPENYGREIHPMPDDYLANGMMPGKRRQFDEWYSEHRHEPFRLDEALASYCTNDFEILIAALVAFRRARLRQRSKSKPSRLTVLPLVLGGVGVEVQTAHSAGGEKRIGPYSVDGWIEAEGRAIEGCTWHGCKKCYPIDNMLLPNGKTAGQVLGTISAQTA

SEQ ID NO: 141714 - protein, 122 aa, Heterodera glycines
MFSSENAKRGSFAKKSLNGNELESEANEGDAEDIGKSLEEQSHQLALPRLFKALLSFEFANYSRLNESEVDPLLLSWDVLMRFFGDLDVLSRVRFCDAIDVKTLSNALAHLFNSLSDPPAHK

SEQ ID NO: 141715 - protein, 96 aa, Heterodera glycines
MHAFCARAIYHRACQSKAKQQRCCFERIKGIESVHRLLEKYICNLSTILRESVNRLLEKYICNLSTILRSELEMIIFTIQANFRNVINRDKNIRIN

SEQ ID NO: 141716 - protein, 161 aa, Heterodera glycines
SKKDPHLYLDVSEVQWGNVYIFDLNKTEVIAVRPRRVADELRKLEERDQPPVKREQPKRTHFWNLVKKILKVGAQPQPQPQPQPVTFQKILSGLVWPTTEKYTLLVSSRDFDLDGRGSPIKQRATNPDPTRAETNYKGTFDVKMALTERPETFYVWVSSAK

SEQ ID NO: 141717 - protein, 32 aa, Heterodera glycines
LLGPDPGSRSRVLKSSGPGPGRANGNQENQAL

SEQ ID NO: 141718 - protein, 91 aa, Heterodera glycines
MISFVLLALLVYWTRLLFLMCVAKLKRQKNFNKQKQRHVLVLYPLEFSDENILRSIKQFCFPLKRSMSGFLWVNFFYKLLNTISFVFNNGN

SEQ ID NO: 141719 - protein, 186 aa, Heterodera glycines
MLSQEETGDRLERTSVCGIEGSDGLSGRFAEMSVTLRTSEGSAQLGRRRAGLARRRRRRRRHNRRSLVKELCLFNKCRPEYLAMMLRRRKKENIKFIGDRKIETVHLRQNLQIYPESFTLFGANRMYAYRGMLGVTVEQHLYAKHRVRLKFPNLPCVVQDGGNGHQSYFPLELLKISSLAMQDETA

SEQ ID NO: 141720 - protein, 915 aa, Heterodera glycines
MPEEEQTYRIIVWDTETRLEKLEDEGQCIHVVNFLSARITCTDCCDASELETDCEICCQTNGTFERTKEWLSKLSKFIFHYQNSNRSEADGDEQPVAAFVEWILRAWNNQYKTYIWAHNASRFDGHFALNYICKTVRRPDVVMNGLKIYEFRVRHSPKHSMLIWRDSCLIMPIPLADLKTTFNLDCEDKPFFPYAFNRRENYCIRLEKLPDQKMYEPGSMKADKYEKFKKWYSENEDTPFFLPEQLRTYCHNDTEILLKALVKFRHILINKITQGFDVLPISCTIASACMNIFKAQFMQEDQLAMVPELGYERNDRASVIAIKYLDWRAKSEGIDIQHAGNGREKQWKKFKLDGWIESQQRCIEVIGCYWHGCDRCFKPDEQLVDEKTCQELNEMTQDRLRQLREPDTDGRSLQVEEIWECEINDQLKKNHEMKVFFDDLANERGPLDPRLAYCGGRTGPLRLFAEASADEKISVFDIVSLYPWVNYDTAYPIGVPTIIRPSAEEMIVNWTKPEHLSYQGLYRVRVIPPRGLRIPVLPMKIDERLLFSCCHRCAALFRKSVTRCAHKCEHSEQQRAFTGNFTHIELEKALEMGYVIDRFWRAWHYDEWSDQVFKGYVRQFIRLKVESSGFPDGVETLEEKHQYIREYRRIYGVDLEFGSIKKNPGLRFIAKLMLNSLWGKFSMRNQLGSNKVITRPQEFYDLVLNHRMEISSIIPISDAAIRVLYKPKKNFIVEHTSSNIVLSLWTTSRARLKLLDYMLQCYNTPGTELLYTDTDSVIVRHKRDLVPVHTGEYLGQMSEEYADYDILTFACGGAKQYAMKMVHKQTKAVKFVQKIRGITFDVNNSQELQFEHFVRKVINYGKEDEQENAVVFNYNKIQPTKDNRIITRKQNKKYLPVCQKGIINQTLEVLPFGYE

SEQ ID NO: 141721 - protein, 46 aa, Heterodera glycines
MFDALGGQGSRRKRKASTPHPNLFDHAPYNPLDNLMFNKHGNGVGD

SEQ ID NO: 141722 - protein, 113 aa, Heterodera glycines
MCNTLFYLFFAVAFLLFLPTIGAEDKWEVVTNARRANCTAAGSKCWKPIGYVRPLICLKADYDLNLTDQWPDIAEDHHWSDKKIFQKNGRPETRASDNHGTVRALPCFFEPVK

SEQ ID NO: 141723 - protein, 437 aa, Heterodera glycines
MSNFWRETALVKKPKHQLKLIKPIFRKLIKDKGKQIADPINIDDDEDKDKEETVEKFMNLKDRYTKRKQFLCQESDDDEPDECEECKKVAKIDATISQMRETLHGTQQIVDQMIASANKTDASSSTGPKSKTKARMMKISSESAKKYLNMAGDTIYMAILGVYLSFIAIYNGDDKLNVLSEISPQMVEGIGDALNRHKGLVNDKLKKYVDEIKYRQLKENGQFLPKNELIKNMEGFLQAVEQKVPNKKELFKNINFYINLYADMKVNLTHQQTQIRSLAIGNNANASPANLVDVLKSVAAIIDKLLAKFHVLLQKATDAEEEERRNPVIVEISSDSSADEKESAEKKHGEQEKDSDETLSDCPTDELGKITILCCRYTGNIIFLNFWLIFIEKSAIDCDFLYRTKEIFLEYTQNVLALQKTSLFYFYTLFWKNVKIF

SEQ ID NO: 141724 - protein, 91 aa, Heterodera glycines
MQHILLDIHFLDYFLAKTEINQRENEQKIQIYTIIYLLRVKAEQNKAKLERMERQQSEEEKRAGRKQQKKKKGRSERSDECLRKIGRRIGK

SEQ ID NO: 141725 - protein, 32 aa, Heterodera glycines
FLFFIPQFFISFLLCNFEIAHFLLELITFPCQ

SEQ ID NO: 141726 - protein, 139 aa, Heterodera glycines
MDESAKKTLKQIPLLKTNAGPRDGPLWLERLKEEYNSLIAFIEHNKQGDADWFRLESSADGTRWFGKCWTYHNKIKYEFDVEFDVPITYPKTAPEIALPELDGKTAKMYRGGKICLSDDHFKPLWARTISLFLNLEKFK

SEQ ID NO: 141727 - protein, 89 aa, Heterodera glycines
MTMILMYTTIAAVAPSLCPRRRHQIVAIAKATGAPIKILILEFLTTTTMTNCCSYQGQQQQMEINVKAIAFCFRPPPPVSRPPCPSPPR

SEQ ID NO: 141728 - protein, 54 aa, Heterodera glycines
MRFFLPLRLLIVIILALCINFCDGMFQDPSTDLSLSQPGRKISKGSMYDKFEFI

SEQ ID NO: 141729 - protein, 121 aa, Heterodera glycines
MKRSAATLSTAAAAAPNQHENKIEPIPTHVEAEPDHETKGPPTKKRAVEDRDLWKLAKGKYLLTTYLCPDDWNRLYHNQQKVKRLDDDRFSINFELCQECVRVNCRATDLIAPMKKKPNNE

SEQ ID NO: 141730 - protein, 340 aa, Heterodera glycines
MSKVIKRGTTVIRTGSTVIRRGATTEGKGTTVIRRDCTWHGCKKCYPIDNMLLPNGKTSGQVRERDAKRMEYIRARVNRVDVYWECKITSIVERSKAMRKSFANYVDDGPLVIRDAFTGGRTGPLKLLRKAGPGEKISYYDFTSLYPYINFTTRYPVGHPKVHVLNQQVQWTSASDNPFPLALIKVWVVPPRKIDVAVLTVKVDDRLCFPLCITCAKEYPTGGVDYDYHCQHTDQQRGWVSTCTSIELNVALDEGYRVTRVFRVLEYEQSDDKLFRPYIAEFMAQKIQASGFDSSIRGDAEKEEQFVRECAEQFGINIDPAKMVVNKGKRSLAKLCLNNL

SEQ ID NO: 141731 - protein, 63 aa, Heterodera glycines
MATINTSSDDQIYLAYRFAGPSADLIVPAVALNLVALVGIVLNGTVLVVTVKSRQMPWHFKIF

SEQ ID NO: 141732 - protein, 53 aa, Heterodera glycines; identical to SEQ ID NO: 126996

SEQ ID NO: 141733 - protein, 46 aa, Heterodera glycines
MGSSASESPPPPKLVAIQDLPIYKAESVPAARAARPVDTIGRPATF

SEQ ID NO: 141734 - protein, 29 aa, Heterodera glycines
MTIQEVYKVIGKPPLCLQTADEDSDEQRW

SEQ ID NO: 141735 - protein, 546 aa, Heterodera glycines
FKKEAAIMGGRTGPMKLFAKSNEKKKISVYDIVSLYPSVNYGTAYPIGFPKIIIPKSDEINKFNGLYKVRVHPPRGLRIPVLQLKCKSDEINKFNGLYKVRVHPPRGLRIPVLQLKCDERLLFPLCWRCASTFKKETTRCDYNCPHDEAQRRYVATYTSVELAKALECGYTVDRFYRAWHAKALECGYTVDRFYRAWHEEEADNLFKGYVRLFLKLKEEASGFPKGVETGEQKDMWREEYKEKYGIDIELAKVKKNPALRYISKLMLNSLWGKFSMRNYLNKNAGKFSMRNYLNKNAVIDRASEFYKIACDHKIELCDIVEYSEEAIRLIYRDKEEFVMEHKSSNIVISYGEFKKFFLAESNGGEILYTDTDSIFVAESNGGEILYTDTDSIFVLHDRDVEPITTGKYLGEMSEEGGYEIEEYCCGGAKQYGKQTGETEYVMKIRGITFDWNRKTLHYDTFREMVLNYGKGEVRFKKILTHPNIKANAGFENYGKGEVRFKKILTHPNIKANAGFEGGDEEKHKMYKPVCQKGIIDEELNVMPFGF

SEQ ID NO: 141736 - protein, 225 aa, Heterodera glycines
LKEEASGFPKGVETGEQKDMWREEYKEKYGIDIELAKVKKNPGLRDKEDFVMEHKSSNIVISLWTTSMARLKLLEFMREAESNGGEILYTDTDSIFVLHDRDVEPITTGKYLGEMSEEYGGYEIEEYCCGEAKQYALKMRNKQTGEIEYVMKIRGITFDVDNKKTLHYDTFREMVLNYGKGEVDPAFFVYKNDFGPTRDSKVVTREKHKMYKPVCQKGIIDEELM

SEQ ID NO: 141737 - protein, 43 aa, Heterodera glycines
MPTAQPAATIHLQNVHAAVVRAVAAVSHVAVVVVGVAAAVVVV

SEQ ID NO: 141738 - protein, 62 aa, Heterodera glycines; identical to SEQ ID NO: 131736

SEQ ID NO: 141739 - protein, 68 aa, Heterodera glycines; identical to SEQ ID NO: 131735

SEQ ID NO: 141740 - protein, 385 aa, Heterodera glycines
MGVYEDYVKSLIAIGLGPKRELEPQAARPHAFGNPFKLDKKSNLYIADEVGEMNAGASTSALPSSDVPSSSSSNGGGASSGGSGRRRRAVSEVGTMATTAGSVRPPRRRPGPIDANRLAMWRRRRRSSSIASCPDEAVAVTAETTEGTSTANESNEMPTTTALLRTSTIDGTVATNTLGTPPPAETASGFLDEELAPLRMADEEDEEESDGGIQWRDEAVAAPTAADEGPIAVPEEAELRFGIAQITPAAASPPPPSSSSLPPPSNGAAPFALAECQLLEKQRQIRHIVRQKGPSNSLLAERVAAVAASTSPSSRKRARELLELGIEEARRFKRAKLCEMIGQHLQRQQRPVDASVTSNNSPSLNNNGGSAFASARQNGYSNNSR

SEQ ID NO: 141741 - protein, 17 aa, Heterodera glycines
MGTIGPSAVEERHFYNL

SEQ ID NO: 141742 - protein, 40 aa, Heterodera glycines
VLGQCKHPFHMHCIVKWTNTQSGQKPACPLCRQEWKFATS

SEQ ID NO: 141743 - protein, 16 aa, Heterodera glycines
EAIPEGFGLPINLGAS

SEQ ID NO: 141744 - protein, 49 aa, Heterodera glycines
KLLMNEMTDSSSVGRRFLRHKIGVIITKIKCWQFMFFWKRNNCGVISGR

SEQ ID NO: 141745 - protein, 51 aa, Heterodera glycines
MINIFYGQRLLVSNIFTDKHGQFEKFIPVDDVILIENCKKIYIGFYSGKSE

SEQ ID NO: 141746 - protein, 78 aa, Heterodera glycines
LCGSDEMEQRYRGRIEKFVAPTNDVLLLKVNKEGPLKKDIWRAPGNQAQVRKLSHIMQHGRLVNISNISVYTAASVIK

SEQ ID NO: 141747 - protein, 90 aa, Heterodera glycines
VGFEHHWLQILDNYVAPMQEKVFIGFYQRPIHANMMFVVRYRPDEQASLRPHHDASTYSIDVALNKKDVDYEGGGVRYVRYNCTVPADQI

SEQ ID NO: 141748 - protein, 130 aa, Heterodera glycines
MREQGGAQKIRLLREYLEPFKDRKDLILLFIDAYDVILNADSDIILRKFLSLFPDNRIVFGAEPFCWPDRTLAPQYPPVVFGERYLNSGMFIGFAREIYALLAIAGDLNLQDGDDDQLFYTRVFLDTDNR

SEQ ID NO: 141749 - protein, 139 aa, Heterodera glycines
MAAENAMFYKGIKMARDTGDSTPALVAGHEAAHSVAVIMQTHMPHDFISATNIATPENEGLMLASAVQPRNCLIKQIQALQSGGIVVAALKKGMEAATWKNAKKALDRAIKKVIDESTEAAKEFLEANWSAIERVFSYF

SEQ ID NO: 141750 - protein, 72 aa, Heterodera glycines
MDKKKSSNFCMTEKKWHFSPYLSGWSEQQRPGQGHQQREHGPSKSIVEMPRKRVPQLDEPDLHAMQMRGRNA

SEQ ID NO: 141751 - protein, 19 aa, Heterodera glycines
TFSFSSLALPNTHTIFEML

SEQ ID NO: 141752 - protein, 19 aa, Heterodera glycines
TFAFSSLALPNTHTIFEML

SEQ ID NO: 141753 - protein, 19 aa, Heterodera glycines
TFSFSSLALPNTHTIFEML

SEQ ID NO: 141754 - protein, 19 aa, Heterodera glycines
TFAFSSLALPNTHTIFEML

SEQ ID NO: 141755 - protein, 19 aa, Heterodera glycines
PFSFSSLALPNTHTIFEML

SEQ ID NO: 141756 - protein, 159 aa, Heterodera glycines
DLVVNHNVPRCSKTYVHRVGRSARAGRFGAAVTFVTQYDVLLLKTIEGVIGKQMGVIGKQMEELKVSHKEVSLYAGKVLATKREAEIRMQRRGFGERREIWKRKELATEGLSEEEIEKAIEQWKNGGRKIVKAHNQHEAEESQKGRTKEKPTQENDLEE

SEQ ID NO: 141757 - protein, 60 aa, Heterodera glycines
RAGAQTPLFLALSRQINGVPGKYYSDCKEAKVHQFAEDEIACEILYNNSLEQCGLDHSAI

SEQ ID NO: 141758 - protein, 97 aa, Heterodera glycines
MYISEQNLPLQTPISCFTKFKSKLLRRSPAGRRRPELPQLGLVPEELSSKCGGRVYSMCTTAFLLCSLSQGNASLQNDFKNWKRFLRLDDTNGNSKI

SEQ ID NO: 141759 - protein, 180 aa, Heterodera glycines
MRMFIFCFDNFNSFHKAKSWGYCPSYHRASAQAKSTWMYDDCEHERRATEARAVAAAADVSTEASTTAEDAPTYRPDADSLEQEDDETQDSVASDSLMGVCWWTTRTVMMMIRTSRRRKPDGRLPPQHTCIIRRAQSCPLPPSPQLTVFFNLFVFYHTIANFGTLFDSQFWHLFNFIVSK

SEQ ID NO: 141760 - protein, 51 aa, Heterodera glycines
MVIGTIDGPEQRLSLKKVLVFYEKSMGANLEAKLFTSKDFRGNMGTNRKER

SEQ ID NO: 141761 - protein, 40 aa, Heterodera glycines
MIDKMIFHHIFGGTSTAPIRALTSKTTHNVAEQVQLQFEP

SEQ ID NO: 141762 - protein, 92 aa, Heterodera glycines
MCSCGTNKKEQLTHRLMIFRYPFFEPIIMILESAFTVAHVMKIIKIPLFTMTLPNFGILIFLGEYGTTRDVGIFIRCRITAPFRLVMLAKFH

SEQ ID NO: 141763 - protein, 199 aa, Heterodera glycines
MWREMLHVQAITGGLPTSSDNGTAPLAVTAARVKRQTVGTTAYDAQMLAGAVAGGGSPPGSSGNPQGGSCCSCQVGPPGPPGPPGRDGRPGSVRQSKLCPGAPGRPGNPGPPGRDGVLLPGPPPKPPCQKCPPGPPAGSSGRDGAPGLPGPPGPQGPQGPPGLPGDKGPPGEPGKVINGAPPGPPGPPGAPGPQGWFGV

SEQ ID NO: 141764 - protein, 31 aa, Heterodera glycines
LCVLCPLSSAAVSALAATVAAVAIVVVTVVA

SEQ ID NO: 141765 - protein, 24 aa, Heterodera glycines
RTLSTAVRQRSSKIYSMPQILWAG

SEQ ID NO: 141766 - protein, 270 aa, Heterodera glycines
MEENYAKMEICMDSANTFTNLEILEEIRLEFLQRMNKIWRINFLGKKTFFFGDYGGSSTDGQKSILKSVFAMHEQSLKPLLLVNQFRQKLKEIYIDTERIGGELHENSAVFSIIKELCLGVLYSDEEKNMYKLLKKYFLLLIRTSDEPISEEEKQKFNIETYKANNEIVVANLLKFVSNLNAENERQLIWIVSEAATELANLGLIHTKRDKSEEELGEESIGEKLRKICYFESFSFWLANNGTILKSEKWRKFILQQNYVSKVTFLYLKN

SEQ ID NO: 141767 - protein, 292 aa, Heterodera glycines
MRIENNEKAILEFKSAVEQLIGPILLSQIENRHPFLMAFDLVTNAKWADEYLLILSKETIVAGIGEFRISSRIYFSRIFEIFQKFYLLQRKYLHKTDAKISNIFKEIEEKWEENINMFSVLFKENKVKDISDIVEIFDFWQKLALLYNKMPMLEAHEKIQRVEENAKVWHNESHLKILFARMELVDEHAQNVLRFYAEFLAQHLQNSLFESTGALYRLKKFLCPKQMEKFVSFGQLTQKYPQLKEILRRRLNTVEIMQLQMVNYISLFDFDTAAPHWKQSQFLLDNLAYYIW

SEQ ID NO: 141768 - protein, 85 aa, Heterodera glycines
MALNGTYLFNLSLYCSNSMHEVRAVQMFCIFCHFSSNFSDLPLGKNLIILKLNINLNGCASGSTLISFTDENVEKFLICNCKNNR

SEQ ID NO: 141769 - protein, 234 aa, Heterodera glycines
MPFCHLTSAIFAFFVLFSFDRANCISFVLTIKEIDALYSQLLNLPNEQKALENELPKKEMKLKLELALFYDVSHQIFVSMKNKKLTNVQQKLIEEKRVEFSELAERIEKTDEWTAEIGKCKLWKFWHHLKIFLAEILGEEFGRMILESENTAQKMIDCEQIEQMLSKNDENGIGSDEQIEIIKKYLEDTKSATHFKALMALMEGQKKGENWQNEGKWHWQGLLKRRNYYYIIFN

SEQ ID NO: 141770 - protein, 19 aa, Heterodera glycines
TFAFSSLALPNTHTIFEML

SEQ ID NO: 141771 - protein, 19 aa, Heterodera glycines
TFAFSSLALPNTHTIFEML

SEQ ID NO: 141772 - protein, 19 aa, Heterodera glycines
TFSFSSLALPNTHTIFEML

SEQ ID NO: 141773 - protein, 19 aa, Heterodera glycines
TFAFSSLALPNTHTIFEML

SEQ ID NO: 141774 - protein, 19 aa, Heterodera glycines
TFSFSSLALPNTHTIFEML

SEQ ID NO: 141775 - protein, 19 aa, Heterodera glycines
TFAFSSLALPNTHTIFEML

SEQ ID NO: 141776 - protein, 68 aa, Heterodera glycines
MFDEDENDRYFCEPRTRIRTITELDNVINSCEMSANANNGTNDEGVAAAVNNGGTNSANANNRTNCEG

SEQ ID NO: 141777 - protein, 125 aa, Heterodera glycines
IALLKCRICLRPMLSHLKHKDGVVRVDNGHDRWEVGLDAAFFRPDEIEISLAGDHLFVYCHHEEISLAGDHLFVYCHHEERSDEHGSISREIKRSYKLPDDVDTATIRSHLTLQGILRVTAQKKK

SEQ ID NO: 141778 - protein, 27 aa, Heterodera glycines
MHRIIAAVKKLVVGSVLAVRCTLCVLL

SEQ ID NO: 141779 - protein, 65 aa, Heterodera glycines
SEFFSNSPPQTKIKKLYIGEDFSNKCSNSKFPKIFSGGAYRHRRTYIFHYFYKFFALKRPKFGHF

SEQ ID NO: 141780 - protein, 104 aa, Heterodera glycines
MPSSSPPSPVTIVYIIVYEKHFLSHWQVIISDGGVPTVAQTYNTFAEFKWQFPPSALRRKSANPKHDKDHDDDDGDDQHHGSNDQETEIQRLCPATRPSNQQQQ

SEQ ID NO: 141781 - protein, 42 aa, Heterodera glycines
MRQQMHTGAVRPWPIWEKIKDNVLNFLANLGSILKQIYKDKS

SEQ ID NO: 141782 - protein, 115 aa, Heterodera glycines
MVAGAVKQMLEENNRQREEAAIEELEQNAGNSGTTKPTAHIRFSIPALFGIPTRHFVASKRAAGGDWQIVPPAAAAASDQQQMIKRGKQQQQKMRVEAGGEQQQKKVAKSSGSMG

SEQ ID NO: 141783 - protein, 234 aa, Heterodera glycines
RRSRNSQPFFAKINKIKCIFLPFLGQFSKIKLGSWARSPLLDGPGYPIFCQYDPPDEPREYIHRVGRTARGDTGTGHALLILRPEELGFLRFLKAAKVTLNEYEFSWNKLAAAKVTLNEYEFSWNKLANIQPQLEEVISRNYYLNKSAREAYKCYIRAYDSHSLKKIYNVNTLDLVQVSKSFGFETPPFVDLPVSNKPKLVSKSFGFETPPFVDLPVSNKPKLKQDKARLMGAG

SEQ ID NO: 141784 - protein, 241 aa, Heterodera glycines
LSSKKYVPPTYQTPIIDQNAFFFLELFEETQSIGKKWLKSESKKEGAEEAISKYNGWQIGSPTDEILANDYGLIVRTKARHHAISARLRKPFKFDGSALVVQYEVKYEQGQECGGGYLKYEVKYEQGQECGGGYLKLLRDDASKDLKQFNDKTPYVIMFGPDKCGMTSKPDKCGMTSKVHLILKHKNPKNGTISEHHAIQPNEHHAIQPNKSLRNYFEDKNNHLYPLETRPTTHSLSGDHT

SEQ ID NO: 141785 - protein, 250 aa, Heterodera glycines
MIKNPNYKGVWSARLIDNPAYFEADPYRQLEPIGAVGIELWTMSEQIVFDNIALANDVDSVRELATQTFDLKHEQEKLFLSSTGDAKSALRSAMDTLEEKPWLWVVVIFAVLVPIILICIFCFNRKARPMHRKKTDEPTEDDEKFEGLDQGEEEEGEEERPTDLRPDEAKNDVHASASQSSSSKKSESPSRSRSPSRRVRKASQPATDDVQQQEADAVEVDDDHEEGPSSSMPKASPQQPVRRSRPRRQD

SEQ ID NO: 141786 - protein, 292 aa, Heterodera glycines
CGKKNVPFVQLFPASSFFLTTVARLTKCDSMLKAMFSGRMEVRRDTDGYVLIDRCGKHFGLILNFLREGTLPLPDCRTEVLEILIEAKYYLLQELVDLCYSSLKALHHDQLVSTLGICRVPVVVSKKQVEQIVQSCAGPVIELLMPVIELLMNRQNNKYSYNASSDENFLRNQELFDKLILRFNNRVLFIKIGIGSSEICQWTFYGKTNRKIEICCTSIVYATDKKQTKVEFPEARIVEFPEARIYEEALNVLLTFDQGGMDEDGPSSWSSSTSTASASCCCTSSEAETPYE

SEQ ID NO: 141787 - protein, 95 aa, Heterodera glycines; identical to SEQ ID NO: 124813

SEQ ID NO: 141788 - protein, 83 aa, Heterodera glycines
MTITIYTVRLTKEIISSICSSAENLQSQSYNQIDLINDSSDILYDHVKNKCRRSLTHSTISASSCRRRTRRDDARKGPGPAQL

SEQ ID NO: 141789 - protein, 247 aa, Heterodera glycines
KTIYYKMIFSINLKKYFFSFVPILNWLPAYQWRQCLLADAIGGLTVGIMHVPQGIAYALLARLHPVIAYALLARLHPVVGLYTSFFPPLFYMLFGTSRHNSIGSFAVVSSFAVVSLMAGMAVEQFSSNDTFFSGGDEDKVKNKLSDASSPVRVASTLAFTVGLLQLLMGLLRLELITTYFSDQVVAGFTTGASMHVFVAQLSDLFGLRSVGLPHRNGAGYLFMKLYDTASNIKLYDTASNIHRANAI

SEQ ID NO: 141790 - protein, 430 aa, Heterodera glycines
SDFHLSLPTPILPNLSLVPSLLPDALGISAVVIAVHISLAKMFAKKMAYRVDAGQELYALGFCASLSSFFPVYPVSCSLGRTLVNVEAGTKTQFSTLFSSLLLGAIILYIGQWLRTLPMCVLSAVIIVALKGMFKKITDLKTLWPLSKIDFAIWLVSFCATVCWDVTEGLAVAIWLVSFCATVCWDVTEGLAVSIIFALMTTVFFRTQWPRWHFLANLSGTNDFRDSERYQTLIHFLIHFGICIFRFDSPLLFTNVDNFKESIHKAFHRWNNGRRIHCPLRHRRQLLCTARATTPKGKNGRTTTTAQFRFSEKASSIFFRHFIIDCSGFTFVDCMGVNALKEIFTEMREQRVLVYFAAAKAPVRDLFEKCPVRDLFEKCGFFRYVQKHNFYPTIRDAVAIARKRQINKLKCEIMVKEGEGSLKIMKHSTN

SEQ ID NO: 141791 - protein, 65 aa, Heterodera glycines
MPRGSPRPPVRAASQQQQQQTPYAKAPDGTESSATVTLLTRPERLLQQEMNRLKRQNSDPSPALK

SEQ ID NO: 141792 - protein, 105 aa, Heterodera glycines
MYADPAGSRTKIKFADPVAGLELIFCRTGSGRINPAFSKKCRIADLGSCLQNPAQDPVLLRALVLMLYIFFLNNTKCSNSKILTQKETFYDDFFFQHFFPFYRKL

SEQ ID NO: 141793 - protein, 147 aa, Heterodera glycines
MSAAASGSLFNSSASWVASCMSDGRYLLNDPICMNKCVKIEYNGKRLIGRIERYRIILLIYFRNFKKFIDIYRILWPLPDLVTFFSFLSLTVPINNQCPECEVNHVDLSTEAFLWLEPAGGTVPPLHIWNVPKEIGLEEEMHRRWNR

SEQ ID NO: 141794 - protein, 118 aa, Heterodera glycines
AISDLINDKSTEKSPNYHAENEHLTKDKEAISQEIRRIDSQIMVYKRASLSLNEACELQVDSDKLELSNPLYSGAFIHFISEGAAFCTKIKMGKSVNYPDLNANKGYNFFEELIEVPR

SEQ ID NO: 141795 - protein, 40 aa, Heterodera glycines
MCCAPPIGLLEKRHTLYHEQSSKFGGMNPSVKKKLVLNIN

SEQ ID NO: 141796 - protein, 85 aa, Heterodera glycines
MPPKRKNIYLESYEKEFRHIKKSRKGEEFALCVVCNDDINLLSIGKAAISHHQKTGKHQKAAKAANRSIPLQEFLPNTSAPSTED

SEQ ID NO: 141797 - protein, 99 aa, Heterodera glycines
MKYNRNCPHGILFLMVFCAFFTVISATIAKEHGDKVGTVNYIRLQTHHYVTHPNNGNSLSPSYTGWGYETPKDKEARLKNYRKLMGSLTTNLKPILTIA

SEQ ID NO: 141798 - protein, 262 aa, Heterodera glycines
MKFNKTFNIFGIISMAFSTIFTRTNAGNIISDIMKKADSGNEEENANASTVPPKLTSSNPSASSSYVTGWEYETKKDKAARQKYYKKLLEGKPIMEMPKLTKPYKMLSLPSPCKMPPIPKLSKIPSMPDLCNSMAHKMLCKQTHSNLNEEYDTDNDSTKVELSHKSDESESDSENDLSIKTWMENEGGNGGKSKGMWTENANGDGTSGEIEVDDGSIFGGIPSASSSHIDLINRSAQIEQRRLMRRLSKKEHNFSFKIEEID

SEQ ID NO: 141799 - protein, 61 aa, Heterodera glycines
MTNIWRNLGRNHKTVNASILAQFYSSGWVDVLATDIRLVFSMGMLHSGEHPSCACSAAQRT

SEQ ID NO: 141800 - protein, 80 aa, Heterodera glycines; identical to SEQ ID NO: 130323

SEQ ID NO: 141801 - protein, 51 aa, Heterodera glycines
MKRHIKQSTKIEQLADLSFGFFHKRTNWIQLQQKIRDHTDAFIKKLVKRGA

SEQ ID NO: 141802 - protein, 95 aa, Heterodera glycines; identical to SEQ ID NO: 124528

SEQ ID NO: 141803 - protein, 209 aa, Heterodera glycines
MSYFAATISSIIISYSLLLPISSGNPLPQNEDKAFIEFVKGETFFDEIYETYKKEKELVNFYPKPLTNFHNFDLKKHLIQKYQAHLGFLFALRNHWKCEKIGKEFDQNEQKECHRFRQYVDILYEYLFQTAQKKTVVKPEFLVNEKAESLIGVLKALNQISTFYFDDEFNAKFGKNLAKFFKMDPCEPKLQNEKELDDLKKAIEDKRHE

SEQ ID NO: 141804 - protein, 193 aa, Heterodera glycines
MQCISSTVLNLEDDSSGPIDSSSPTNVADCATLSNTAGDQSDQQQQQQIQPNDVENDATALAAEQLQIHAQQFEAVQALKREANERVQQLELELTTVRQSVHKFVASIIGRPIPAPFNQILLSSTTKADDGIACADVDDLDSVERLIEELLHNYGTLTEVRAELERQVEQLNEQIERAEADHAVKEHKVGAKN

SEQ ID NO: 141805 - protein, 38 aa, Heterodera glycines
AVAMFQQTVCTAPSTRANSGAYSLAFLFAQFRENALGL

SEQ ID NO: 141806 - protein, 116 aa, Heterodera glycines; identical to SEQ ID NO: 127487

SEQ ID NO: 141807 - protein, 130 aa, Heterodera glycines
MGCNDMKVDNYEDPTCGTILTLSDGKDYCKQFSCGSCSYTLPISKKLTSRIYSKKKEDEKIIGGTEMWENAQVTNGLLGSKLRKCAFVCSERCPSCSHDKAYFQQIQTRSADEPMTIFYRCANCGHRWKE

SEQ ID NO: 141808 - protein, 148 aa, Heterodera glycines
MSLSSIHHMSRLKLWMTPVRDNHFGLDDLKIFNSDGYSENAPFSRESSRNSSADGSIACNADAADAPQKTCGFCYIQYKRHCQRLGVAFPRVTDKGFWVGHTTKDEHGDVICPELRKLKCPLCYASGKKAHTLKFCPLNSIKGRRDEA

SEQ ID NO: 141809 - protein, 181 aa, Heterodera glycines
MTHQIMTYSKRHRIKFSDPEPLFRILYTEILMGRIEITDLLTVDYWIKQTIFDFVQRNCANPTVEKKICNDLNGVLHDYAFPTKPVILMWTSVFGQNSLKLGPDCPFFDQCFFTYQRRALAHADAVLYHVPDIKWTSDERPDFPEQMLLPANVRNVFLTQENPSALRDYHHAEKLRKAGIM

SEQ ID NO: 141810 - protein, 41 aa, Heterodera glycines; identical to SEQ ID NO: 133620

SEQ ID NO: 141811 - protein, 38 aa, Heterodera glycines; identical to SEQ ID NO: 131546

SEQ ID NO: 141812 - protein, 167 aa, Heterodera glycines
MGKVEKLLKGRDGLVRTARVHTKGKTLVRAINLLYPLEINTSAEDEVSQIQVTAIMDSPSAVMEGGDPQTVTTESSLPPGTVMQDSQIVTTESSLSPIRGRNERQAVKERRIRKRQPTEEVRGKGKPKKNGPYDPLRPGNYRIPRRNPFFPSQVAYNEQTRTYRRRR

SEQ ID NO: 141813 - protein, 152 aa, Heterodera glycines
MASAMTFTETKTAASPASASKGSNNKPKQQKNSASASMTSVMKRTQLASKYFGNYLVVFQDHNRSISSAGIWTKTAASPASASKGSNNKPKQQKNSASASMTSVMKRTQTKTAASPASASKGSNNKPKQQKNSASASASMTSVMTLTQLAIK

SEQ ID NO: 141814 - protein, 250 aa, Heterodera glycines
VADALSRVAIKWEQIEGKSREDIPFVLTVDEEIGLHRKTIEKETFEDSILSRVLSQIKASWVEPIDDDELMPYFRERDKLYLDGKIIRMGRQIIIPQKMRKRVLKMIHRAHFGIVRCKARTRDLVWWPNWSEEVENYVKECHICQRNASNEPRVDPEYKWPEAKYPFERVHADLAGPIWGTNFLIIVDAYSKYPFVCQMNSTHSPAIVNYLREVFAFFGSPQCLVTDNGPQFVSSETEQFENEGVRHLKP

SEQ ID NO: 141815 - protein, 134 aa, Heterodera glycines
MFEQSARSIGARLITELTQRGRGFALSHGSNSAKMEDEEQLDINMDNEDDDDDVEEEEEAQNGVQYDGQQQSDDEEDGGSTGPEKFFGLSYRGQTDRSKQRKKQKSGKKGTFGCSLQAGHFRAMRRHAQQQTTN

SEQ ID NO: 141816 - protein, 101 aa, Heterodera glycines
NLLSDFPTTTAGANQWSSPQSVPPQQQQTHSPTTRTTHPQATTSSLSSSSSSSSSELSQENDFTEAMTDEEFQLMLAFKESLTNVEDGDLHLLSGLSSEKR

SEQ ID NO: 141817 - protein, 165 aa, Heterodera glycines
MAFVSRRFDALVDEHFKTRKWTLGFLKIECRKIGDNGTTEMEIVNLQQQKKMPMPQKPLPNKIIAFRMIILDCFDQNVIDFLQNFRQIFASGTNLCIGYYDIKDDIVEFVVRNIWPMLKDNIRGIHYHIENKQSHQLQQFVTSILNECQTLRFLFLSALSLFFDR

SEQ ID NO: 141818 - protein, 95 aa, Heterodera glycines; identical to SEQ ID NO: 124528

SEQ ID NO: 141819 - protein, 528 aa, Heterodera glycines
CFSEAAVCQSHSLAIVGRLLQKKGLLTPMDWSVLDVLNEQIAAVETVDNVTENSTVDTFPNHANFGIRFKELTQNLMRFKELTQNLMLAKRYEAIGPICRLIIPLFERNADFKSLIAIHSQIQQAYQCVSLIAIHSQIQQAYQCVDQITTNGRQQLASYFRVSFHGRAQFGDDHGSEWIYRERPLTSLAEACDRLRESVQSSLANCRVQLSVSSLLPLSVSSLLPLPVDDPSVAYIGVAHVEPCKTVRTTHSSEKANNYWLHTNVRTFVLNERQADSTVSDNAPELARMTLRRTTLTGVPQVVGGSFAVENPFPGTRRRQRVVHMEQTVLSPLELACESILQKADQIRHILSSAGLRRRVDVKQLQLFLQGAVMRVDVKQLQLFLQGAVMPTVNAGLLAYAETFTAPAQQKRVNAGLLAYAETFTAPAQQKRYGNKGLLRLWNALKTLLDELDEATLLDELDEAMRVNEATMGNERREYQQMLRNAYENTVEKLNGIRTRQRVAGDGQTAEYEHRQGEAEQQAGHADQ

SEQ ID NO: 141820 - protein, 43 aa, Heterodera glycines
MNYRIPQLGTPGYHLLKNIEVRNSEGNETEPIIPFNRFFDCSN

SEQ ID NO: 141821 - protein, 155 aa, Heterodera glycines
MSENYLKMVAIGQIRIQKPWAKFESKSHGPNSNPKAMGQIRIQKPWAKFESKSHGPNSNPKAMGQIRIQKPWAKFESKSHGPNSNPKAMGQIRIQKPWAKFESKSHGPNSNQKAMGQIRIQKPWAKFESKSHGPNSNPKAMGQIRIQKLCKSIAI

SEQ ID NO: 141822 - protein, 172 aa, Heterodera glycines
MNSNGRFKMFVGGERPIRAMLGSHGGMGEFDTPISGNPENLYIWSGKIQRFVIKNPNFFKNYALDFRDGEVIEYDRVNAVLEKLQQKSLYFNVKDMLEKQIETNFKKLKNNLFDEMDEIIDEKFSKFSNGLRKSEQNLRKLKSYVIDEIREKLAHEISIFKRKKWTFRLADG

SEQ ID NO: 141823 - protein, 75 aa, Heterodera glycines
SSEPSLADYDDSHKKEILQIEVLETGVVQGKRLFGSFVSTLMGQVNKAVFAEPSKKAADEYQASTSSSNKKNLTN

SEQ ID NO: 141824 - protein, 51 aa, Heterodera glycines
MEVDEAEYEAKKREHRSFVENDGSHYYDEEDDSEDEFEEEERSTKLKKSKK

SEQ ID NO: 141825 - protein, 41 aa, Heterodera glycines
MELQREYGQNAFDIAKVDAESLPEVSMAQKVCAVPSVIIFK

SEQ ID NO: 141826 - protein, 169 aa, Heterodera glycines
MTDQMVEFGHLKPTKEMANGQQNECPATLNLTDFTRSAPLCKIWLIGLQLNDAIKNINEENEEKINEKLSKELDAKIYKEYESEVLKGLFQHVRLKSTFVTSEQLAQCLYYRPYLLDNITSIDPLIFLSGKLHLLCPKAKMLTLKSLPDLSSFKINKQMYKDKIESYKT

SEQ ID NO: 141827 - protein, 461 aa, Heterodera glycines
MLNIGAFINEIQHRIETIEKISKSNGMENSQRKIGGEKENLKKLMEKHKNENGGIGTLEIKQKLCGILKRIATEKDTNCGDESTVGDGGRSTVEKEIKLVQMQLHKNKMAKTIIGEGENGTDIWPKMTKSDILNDLFETKQTKANSMDRFNEHIENWRNLLRQQNLDKKLSERFSGRSETERENLENLCEMHENLQQIYFQGREYKTKDEMLHQILEENGYGRKETPKDLMEGIKRTISKWSNGDARLIVTGSHLLDTQTPGSDIDTICIMPQKLSYLEEKNKFFGNYIFNCHHLNDGNLEERKCGDDSLFCQFCKNPKLDEITKISSAYIQMLQLKMSGVKFDISLVLIPGMEYLPDEPLDGDDIEWMMEVLANQQRPQRAMLRTLSSRTRDFEKRLDLDMDSMVDLDLDFMDKNPGKIQAPRDLDPGLDLEFLKLILKIKNKCLKKSINCLGTSKNINL

SEQ ID NO: 141828 - protein, 107 aa, Heterodera glycines
MALFGKKKPLLAIYETQQHGNNMCQFRPKFLIIIYALLALLSNFGIVWPFEVIVEDGTEPETADMEKTLALSKTHFLRHMVEDWHCESGQMKTPKELGYEKMPERFG

SEQ ID NO: 141829 - protein, 33 aa, Heterodera glycines
SVWGTQTIMGAKIQRRIKVQAIGKLFPKDSVSP

SEQ ID NO: 141830 - protein, 95 aa, Heterodera glycines
LFEYPKRTLEKIDFFVFGAVPPNRCAQIYGETESFGNSFPIACTLILRWIFAPHNCLSTPNGHLKKSIFLFSGQSPRSDAPRFMGRPNPSGIASL

SEQ ID NO: 141831 - protein, 68 aa, Heterodera glycines
MHTFCARAIYHRACQSKAKQQRCCFERIKGIESVHRLLEKYICNLSTILRSELEMINFTIQTNFRCSN

SEQ ID NO: 141832 - protein, 49 aa, Heterodera glycines
NFKENKKRKLMATTSGEGACQECPCSAYREDGIADENDRCWYCWCGHLL

SEQ ID NO: 141833 - protein, 138 aa, Heterodera glycines
MNANLKQQNHLVVDGRRKKVRKRQRAKEEANCEVTVHFSPENAKKEQNRLVTAFGIEGTSRIEEHLKELTIENFAYEKVCKRQKEERESGNDENEEQIAMKETKMAKKESEEKGKKELKQKGKKTPKEEEDEDKTKKE

SEQ ID NO: 141834 - protein, 54 aa, Heterodera glycines
MRQKLQATIMRINHLNDMIQHDRMKEKRKTGLSFLGLVVGVEGIGQNMQMKRIK

SEQ ID NO: 141835 - protein, 1153 aa, Heterodera glycines
LKKEQFYALMLLTALKSPSDAALRQRILAKLERMDKTCRMMELWKTSSTSNQRLRRLERSKRRSALEMLMLSTKRASKTSCRRTNSPKVDKPQRRTKVVGDAENVTISHSTRFKLTKCHKCGTTGHLGKKCESVPWRKEKSAKMLGNKKIGHLRIGMTSCSINALSLMQIKILLNQQIVKFYLDTGSDIDVIDELTYADIGEPPIEPCNEIGKTFDGKEVPFIGKGIGIFKFGEIKVKRPFFLLDEMKQLLDEMKQKISNVAVNLCKAGRPKGEKIIPSGTKQMAGTEAKIEALKRAFPEVVKDGLGLCTKEKAHLSLKKDATPIFRKARPVPYNSLEVVEKELGRLEKMDVISKVDHLNWAAPILIVKKADGSARLCIDYSTGLNDALLDCQHPLPVPEDIFATLKGKIFSQIDLRDAYLQIELDEESKDLCGLATHKGNYRMERLPFGVKSAPSIFQSIMDKMLAGLNFAATAYLDDIIVVSGTTEQHVRHLEEVFSRIQTYGFRVKLEKSTFFRDQIKYLGQIIDRNGRRPDRKIHAIVQMPSPKDISSLRSFLGMVNHYQQFVKDMRFTRKPLDDMLKDEIEWKWTEKRQKAFQKLKEVLTSKLLLTHYDPKLDIIVAADASELGIGAVISHKFLNGQSKAIAHASRSLTPAEKNYSQIEKEGLVHGFVQKFHKMIYGRHFTLQTDHKPLISIFGSKKGIRQCSANRLLRWSLTLLAYDFDIEYVNTNEFGQADALSRLIAKEFECDDERVIAACNIDEDLGTVLDMAKQILPIKFENLVSESKKDKTMQIVMKFVRDGWPDERKLTPQSEEIELFGRRKADLTILKDCLMYGERIVIPKKFRTKILTLLHKGHPGIKRMKQLARQYVFWPKLDQQIEEFVKNCDCQLAAKAPTKTDLHSWPKSTRPWQRIHADYAGPFFGKEFLIVVDSYSKYPEVFEMATKSAAATIERLRYLFTRHGIPETLVTDNGTQFAASEFAKFTEANGIAHLFSAPYNPMSNGQAERFVDTFKRAFRKIKGEGVPNKEIINTFLVTYRTTPNDSLPDAKTPAEMLLGRKPRTTIDLLMPPLPQPTERDTKMEHHFNRRFGARPQKFVSNKPVWARHRLSQNWRAGTIECSGVIYTVKFPDGSTNRFHANQLRNRENTSSLP

SEQ ID NO: 141836 - protein, 102 aa, Heterodera glycines
FRQQTAAPAPGSTQNGTTSAGPPRVRRAEVESVVQLHNANAVVAHAADLQHTQMDHPLSSTFDVFVHNSVRRRWTGGGRRSGRGSFGVLKRQSVFVVRHLLV

SEQ ID NO: 141837 - protein, 25 aa, Heterodera glycines
ILKSVPPLSCCLPVFVDSLDIFKSD

SEQ ID NO: 141838 - protein, 151 aa, Heterodera glycines
DSRISPIHATARLTRPLEPILFPKLRIFADFPYLHYSRLEAVHLGDLLRISVRSGRRFKLPSHFQGPCGAHETPQEPRCFTGATSLSQAEPLPGTHTLNEKRTLARTPHDVCEFICVTAQNSSCEPSFLAWRGNEPTSLSATGWTNCASTE

SEQ ID NO: 141839 - protein, 200 aa, Heterodera glycines
  unsure (1)..(200): unsure at all Xaa locations
MQTRYASSVRFHLIGFTSSLTLSSKCFATFPHGTCSLSDSWPYXVLDEXYHLIWAAIPNNPTPRHVKMDRHRQLDRSCTFSGAPVKGNLNKRANPSSRSIRYTSQPRGAAIQRWTIPSSLAVTTGILVSCFPPLTDMLKFSGCSRLSSGRKIKAGMPVIQALRHSMQSIGAPELRSVKRELEPQVRASTPKHHSRAEQVT

SEQ ID NO: 141840 - protein, 92 aa, Heterodera glycines; identical to SEQ ID NO: 125147

SEQ ID NO: 141841 - protein, 97 aa, Heterodera glycines
MIGRAVRNRHFIFEGIFKFILYPRKMSISFFEKFYTSQKRLRMRRRAVHNRHFISQRIFIFRGYPRKMAISFFDKFYTHTNALEHDREGGAQLTFYF

SEQ ID NO: 141842 - protein, 104 aa, Heterodera glycines
MFVTACLTNVVRSVLRVVGFHMICWGPFWVFVLIPIIEYFQLSQLPRALDSEFSRNIRMVSRREFFKMNFQKPFNTFLIYSFLPYLNSAGNWIFYAAMNREMRI

SEQ ID NO: 141843 - protein, 31 aa, Heterodera glycines
MKTISVQLYQKRIESKRYIDKGMWSQTTHHS

SEQ ID NO: 141844 - protein, 63 aa, Heterodera glycines
MFNFWRFGKIKRNFWKMWVMEIYSIDAQERVDDGKMHLMEVNREGNLIKLKVDDGKCKNNKSI

SEQ ID NO: 141845 - protein, 156 aa, Heterodera glycines
MKLCILFFSIALFLIALIEIGAEKKKFEQKTFDEIFGEKWEEKENEQKKKEIIHKFYKIKEKIKQKGRKYSTKEWNKIEQKIAKKLGTNRTKIYKWIKELNLPEIKSYKSKTDEQKIEIVQKFMAMKNEYKQNGRKYSRKEWKRNYAEICHKLGVG

SEQ ID NO: 141846 - protein, 24 aa, Heterodera glycines
MPKFWFPSTILEINTVKISKHKSQ

SEQ ID NO: 141847 - protein, 76 aa, Heterodera glycines
MRRGLQKFVLFALASYMLIQLWGCYINIADKRFFSAGASFFAFDQSHIYSMLHWHCSSNGCTNGQCRFKIHWAICN

SEQ ID NO: 141848 - protein, 231 aa, Heterodera glycines
MGSSGGGSGRRRSTAGSGGVHRSIASLLFKPLIGAKSSPRGNDHHESEVAAGVASGGITMAWCFHPHHGTGVVHLCALSSAFVPEFQLGLAPGQLSTRPIEFVNESPSSASAGRVTAQRNLQHNTKFIKRADYPENQARQRHRTESAATAAMQSANRRTHLNPVNNGPKYLTTEQGRQRRVSSSLMDTVIEMHKCAPPSNAFGGGPINIHCGKRSISILIAWFIDRVDQCA

SEQ ID NO: 141849 - protein, 462 aa, Heterodera glycines
MPLFYLPCHSAPDLEAVIRWACFIKVGRPLPLPDDVPDALRQIFDGCWQWKKDERPSIVEKLATETQQKEAPAEVVLEQMQQQQQQQKMFSISEQKVQLYLERVYKKSYKKPTKMERILAAWFQPPDPKRQKRTAKLEKRSIGTPSGFRHIVSAQVERADNSGDQPTVKLYANAELAPLQRQQSHRSHDSLLECGRERGGDRGGKNGAPAVGYATLPRTFRVQQPQQKSPLSHNLLPPALPPKSSCCRAHPCCAKKLGGLVKTKTAKSNPELNILGTKSGGGKVFPMGMSGAQNAGGKQQKIRHRSPQPISRPHDYLSLLPSSCPSGHQQQMNACQKLKRPTPPITTYSSVGPERDCPLRKDRAEPNWTETDEAICDDSDLIGIMQRQYVNLPHSTQKAARRTNAVRQRMVADATESSDCSSDVTTPNGAIMEELASLATEGDGAAMARENGSEKSTSSSRT

SEQ ID NO: 141850 - protein, 142 aa, Heterodera glycines
SSCPSGHQQQMNACQKLKRPTPPITTYSSVGPERDCPLRKDRAEPNWTETDEAICDDSDLIGIMQRQYVNLPHSTQKAARRTNAVRQRMVADATESSDCSSDVTTPNGAIMEELASLATEGDGAAMARENGSEKSTSSSRTG

SEQ ID NO: 141851 - protein, 81 aa, Heterodera glycines
MKLSGIRLEYICYNKSLEIDILKNAWTWIPCWTWTWISWTKIQENPGPGKIQAPRDLDPGLDLDFLKFILKIKKMLKKLFI

SEQ ID NO: 141852 - protein, 121 aa, Heterodera glycines
IVRSPAKTPPPPPVAAASTFTTFTPPTPPPFPTPFHKHFSFLTPSPPPPATVDLDQIPLPPTPPATFSLDFWLPPAPPPPPAATVHLDMNPTSSSKAAAADEIEREKKRKKRLGNRWSSTQ

SEQ ID NO: 141853 - protein, 49 aa, Heterodera glycines
MHIGMHQIARCLALAAEEARKEQQRQAQEGLIGRKTTLGGAVREKSCHH

SEQ ID NO: 141854 - protein, 28 aa, Heterodera glycines
VCSAGDGLVSGTLWDYVRMVGIDSNKCL

SEQ ID NO: 141855 - protein, 64 aa, Heterodera glycines
MLESDTLAQNQSASVSPGWNDPPPLANPATTTAAAHAGLTNGVANGAGRLHLQRQRRPVDPSVQ

SEQ ID NO: 141856 - protein, 57 aa, Heterodera glycines
MPWPPSPFWCAIVAAAYAPVDVYLLAAAATFGIKDLSQLAWISWTKAQENPRKMALT

SEQ ID NO: 141857 - protein, 27 aa, Heterodera glycines
MHRIIAAVKKLVVGSVLAVRCTLCVLL

SEQ ID NO: 141858 - protein, 127 aa, Heterodera glycines
MTGLIRDRSRYFSSLPPRVESPFSGVEPLSSVTRHHHGSQIHYHRKLIRQTLERHVAGTRPCDQLSCSESTLDARRALGFVAKKCAPLWGDWSFGACISSRITTVIQQKQLRSAQECAWAAKATEQV

SEQ ID NO: 141859 - protein, 38 aa, Heterodera glycines
CTSSNHSCTSSNHFVPLLITVVPLLITVVPLLITVVPL

SEQ ID NO: 141860 - protein, 256 aa, Heterodera glycines
EEDKVEDKVEEEQKVEEEQKVEEEQKVEEEQKVEEEQKVEEEQKVEEKVEEAQKVEEKQKVEEKQKVEEEQKVEEKVEGEQKVEDKVEEEQKVEEEQQVEEKQKVEEEQKVEEEQKVEEEQQVEDKVEQKEEQKEEDKVEDKVEEEQKVEEEQKVEEEQKVEEEQKVEEEQKVEEEQKVEEEQKVEEEQKVEEEQKVEDKVEGEQKVEDKVEQKEEQKEEDKVEEEQKVEEEQKVEEKVEKAQKVEEKTEVEEKQK

SEQ ID NO: 141861 - protein, 167 aa, Heterodera glycines
SPMCALSEETDLKALLREAENFRRVAFFGVTTAVVATLMAVMSVPMMYNYVQQMHSQMRDEADFCKLRSTSIWKEVARAQVSKQNGKILKIFFTFQFVATNDPVKSSPIGAAVTDGAYVTAAAAAAQQSTCCGCGQSPQGVPGLPGMPGSDGAPGQQGPPGKDGPDA

SEQ ID NO: 141862 - protein, 86 aa, Heterodera glycines
HGRESDATLRLPFTYNVTTVAIYGYAAALKRFAPNIKIIHFLGKQKPWALLYGDGAAGMAFVSDYHKQWYQLYANIVQQLLPPSSS

SEQ ID NO: 141863 - protein, 136 aa, Heterodera glycines
MTNSNLDSIMASSTPIEFAVNGRGEGAAKVPFGKGTTDGMAKIITDGKGHFCGGGRMDDGGRRGKAGDDGQKEQKQIGVGQNVTTLLSAHVRWEGNGKRNNLRSFFSYNSIVIIEYSDSPSGDQQKCQRPSVRLSS

SEQ ID NO: 141864 - protein, 183 aa, Heterodera glycines
MAEASSNGTEIHGTIIFAAYAMAFLELGTFIPTIPIVAFCASILYKTSILHRNLKGILLAQLFSIMMNLWPRAFMLIAQIFVTKNIFLLPPNFISGAATAALTFNNMAGHVLIVERICATVYVGTYESYRSWTFTALWLSITIILCLALTIYQLLVLDSSFAFTNIFVGLYIGAMIASLIEIF

SEQ ID NO: 141865 - protein, 113 aa, Heterodera glycines
MEPIEQQQIQQQQIHTQQQQQPPHQTVPKIVGATVFQPDEAAPPPVVVSPTAPPEEEEEEGTTEPMGGGSRKGSQNALKTVNCPKSEEDLEELGLSRRGMPIVQSFSVGGKTK

SEQ ID NO: 141866 - protein, 247 aa, Heterodera glycines
MPQALLITPQQQHQAYHQQQHQQLLAAQQIAVAQQQQQQQSHPQGSMPMPAHHGTAGMPMPSVTSVAQMPPVSVMSGAGTVSVAAAAQQSAAVSVAHGIVPQGTTHLQTELDLSTGITNDSKRKTKPTTDGKDREAEETDKSNHAKEFQKKIAERLKYGADSDDFKAEGNGTVPTITPPPAVPIAREGNDDQTKQNDGPTAERWTQKVPPPSQRQYGQGELGMFIVNLVKRNGETETGKTHGNSVNR

SEQ ID NO: 141867 - protein, 183 aa, Heterodera glycines
MVLVSEFCAQFLSCPTKSLRDRLNHPEDRVRVLQQLIGKKVQTTYKDRNGMRKSFLVGGMTERGAAFEPAYGRLRKPFNINVAAHFYTRHRVKLHYPYVPCIIEGFTRGEDRYYPMELLEIVDDKKGGRLFGRLFTEIEEQEEEDTKSEASHSSNSSYLQFNGKGCKWYESIDEITNTGREIK

SEQ ID NO: 141868 - protein, 46 aa, Heterodera glycines
MVRTHYVMYDNDRLLRSTDCHELFGRVADESCENEKETDGKGRTDH

SEQ ID NO: 141869 - protein, 148 aa, Heterodera glycines
SLAFDSLSIDSSEIDIDNGIRLPNCDTLIKPAIRQNPTLLGKKLPKIKEGITTDFYRIIKRALYLKKVSAENQQIPSLLVSRLLLTDSMLSSLEGDLFRNMDLMKLDYPRMPMWFLETLDHWFDDNELTFVNGGVFLYSKARFTSNFS

SEQ ID NO: 141870 - protein, 92 aa, Heterodera glycines
PYFYSALDFAPHICLSTSNGHLKNRFFFFGAVPPNRCAQIYGETESFGNSFPIACTLILRWIFAPHKCLSTPNGHLKKSIFLFHKYFFQKVL

SEQ ID NO: 141871 - protein, 246 aa, Heterodera glycines
MEGASFVRRLGRSLMGGPPMVQVSAVIHRCRGVTRRDQFLMQLRQFLQIEHNYLRLSSSSLHCATTTTLQKRPHRRFSSFVRPSVLHINSLAVFAMALRRIKQELAELKQEPITGCTAAPMDDGKDMFHWKATIKGPPESPYEGGTFNMDIVFHRDYPFTPPVVKFETPVYHPNVNKQGGICLDVLKMSHWAPSLTISKVLLSISSLLCDPNPDSALEMDIAIIYRNDREQYNRNAREWTQKHAMK

SEQ ID NO: 141872 - protein, 49 aa, Heterodera glycines
EQNYLRLSSSSLHCAITTTLQKRPHRRFSSFIRPSVLHINSLAVFAMAR

SEQ ID NO: 141873 - protein, 146 aa, Heterodera glycines
MATYLFIAAAAFGAGIYCWKAYLGPMLDQTKSDDEEKPKPEGGEEATTAGDKEEKKAGSKGDKHKKKDKKGEGAAAAAPAADKKEEKRKDKHRSKEAGKSDDSKAGKKDKHGKKDKKGKKKDTADASTVDEALGEQSTAETSQAEE

SEQ ID NO: 141874 - protein, 142 aa, Heterodera glycines
MAELHQELVTTGYTAAPMDDGRDLYHWKASIKGPPESPYEGGTFHLDIVFRRDYPFTPPNVKFDTIIYHPNVGERGDICLDILKQMWAPSLTISKVLLSISSLLCDPNPNSALRQDIATMYRDNREEYNRIAREWTKNHAMR

SEQ ID NO: 141875 - protein, 49 aa, Heterodera glycines; identical to SEQ ID NO: 141872

SEQ ID NO: 141876 - protein, 151 aa, Heterodera glycines
MALRRIKQELAELKQEPITGCTAAPMDDGKDMFHWKATIKGPPESPYEGGTFNMDIVFRRDYPFTPPIVKFETPVYHPNVNKQGGICLDVLKTTHWAPSLTISKVLLSISSLLCDPNPDSALEMDIAIIYRNDREQYNRNAREWTQKHAMK

SEQ ID NO: 141877 - protein, 143 aa, Heterodera glycines
MRKGPNDWSPNRKGKWQNLRGQKVKNGYKIRKIGTKGGERFHLAKVEEMSDLIEPDKVQAANRRPICLICLKKMTQVRQVRTICDHVFHYVCFHRWLKYRLFCPVCLLNFRTELYHSGNAVFEGAYNDGHVVLIPDGEQSNSG

SEQ ID NO: 141878 - protein, 170 aa, Heterodera glycines
MQKTTAEEGGGGGYIQLTLFPHMIPTVKIVLLYLTFYCPNNLFMYNTKLDIAFVRSQLEMSADHLSTVALFTIRYEHNVSIVVRALKHGVSRMIQFRAKVEQTDGAKQTIFEPTVEADVVEHVVTDAVPAAAFLLLPMRRLSLALRALNGSLPLPLGLAIQWRRESHKTK

SEQ ID NO: 141879 - protein, 151 aa, Heterodera glycines; identical to SEQ ID NO: 141876

SEQ ID NO: 141880 - protein, 306 aa, Heterodera glycines
MMSRSAQICSQNRSAHPSNLLYGRIAQTLVVGFSAGLSDHNVRTMHLPNYTTAGIQQACWNFMRPFNREKDGHSWYPHVSCIYMSASRFELVDRRLPTRRITEFFHKKALGVECDGQQQCSGNGDDEDDDVIFLAEMNLPKECDGGGNAQRREDDNVEQQQEAAACSNSEAQQPANDGTDGDDEIVFLGKQKDERHNGRRRRRRQSLTRLITEFYRPRQQRMRTMMMMAKPILCATGNNAVDELMFFMHYENDYSIIQKINPKRGREAEVEQKQREKEHEGDRRGKEEGEEKGGEEQEEKTEDEEE

SEQ ID NO: 141881 - protein, 133 aa, Heterodera glycines
MRHLCPIIHLCRVPAIEGVEKGDISKYRDASGEIFKVLVDFSDQIVVEKASVDEAFLDLTAHCEMELNSQPMEELVQKLNDDIAQLFPNTFLVNESDKQQTVIAEERLNSLKEWLSNDCRVSRQQILAKLVCA

SEQ ID NO: 141882 - protein, 45 aa, Heterodera glycines
MGESIRVIALIDMGPLPSTIQPEPSESNGEWTATRFEFQQSPNSI

SEQ ID NO: 141883 - protein, 23 aa, Heterodera glycines
MRAYDFITEARHKVVVQALRQAI

SEQ ID NO: 141884 - protein, 175 aa, Heterodera glycines
QLSCEIAELEKLRQQSQLPNVQKAIDELIGRWKVKKEEQKMKTDKGTAETLSAPTEAPKLISGSVHVRPTKKLTTYAFDESDKFVKLYYSLPGISDSVPGTISTDFRENSFSIVCSDVKGIDYEIRVQGLCQAVEPEKCVVKQKSGDQLLIMLKKAKERQNWGSLLKLEKEVGKS

SEQ ID NO: 141885 - protein, 65 aa, Heterodera glycines
MTILNGFSQIGTAVEAAVERFVAVGETIADENPDIQPELYDACNEARMAEYSHFLISIKNNRIFF

SEQ ID NO: 141886 - protein, 268 aa, Heterodera glycines
IFNNIAGGDEQRLQNGSNEITVERLNRRLKDLRKQLQVVALEQIATVFRQNEDQAILSSLKTCSISGDIDGVERFLEQFRLHAEHLQEVCRLLHHISVCRLLHHISLTDALHVFTGHAERNLRALAPLTLLAGRVLCVHPSSRIARENLEVFCDTWAINVNDLARMSKELDAAVNDLARMSKELDAACSGRLAAEKQAYMSLPRPGVSENESKRSRNWKDSGGRKRNGPFQSDLREGGRTGHSSTAKTEEEGGLAGEEEAQRGRRRAW

SEQ ID NO: 141887 - protein, 300 aa, Heterodera glycines
MVEVKPSESITQMVTEAKIIFESAGIRIREFFGSHIDELKELDSSELAKDLENTKVLGIEWKPRHDQLIFKMPVFSSPTTKRKILSHIAKVYDPLGLISPALLPAKHFLQIVQNLNFKWDDPLPEKMAIDWIKLMHAWDGFGFNFRVEFPRHIATSSSEEFHCFCDASKSGLGVALYQLADTSYGKKESNLIFGKSHIKPLKVADHDSTIPKLELQALTLEVKVTKFVQTQLNFTDEQVILWTDSQCSIERLKEERKYDRFVNNRLKKIREACFKVRHIRTDENPADIASRGTDPQSLQS

SEQ ID NO: 141888 - protein, 105 aa, Heterodera glycines
DTLTTISISPIFICHPFTPKIMPFCSLSLAYILMSGIMPFDDDCRSRLYTHIITANYVYYPQFWSGSEQAKHFVDTLLDTSPDHRPSASDALHHHWVTGDRPHSK

SEQ ID NO: 141889 - protein, 137 aa, Heterodera glycines
MKRLILTQGQLKRLQLLDIEQYRQAVIGFYVRVNYPGLPSKFSTTIFEEESPTLGFVHQKQNDLAQAIKTLELDDSIKKEERVSPPIKKDNLIQIALSPSMLRLLAKLEFERFRDTVTGCFVFMPCISKEKVVGGGV

SEQ ID NO: 141890 - protein, 23 aa, Heterodera glycines
MQLFRTVLIFALFATLPTAGDVE

SEQ ID NO: 141891 - protein, 280 aa, Heterodera glycines
MKLSQEILSNIYVDNLLLCCDDPLVGKNKISNVISLFETVSLPIREFASNSSEAISDLPNDRMLSGTIHKFLGVSWNTLNDNLLLTVSPPPENLCTKRSILSFIASNFDPLGLISPVILPLKIFMQTLCVESVEWDQPITLNSQNKWNHLFKNWVPAEKIEIPRNPLTLPLQNRSYELHCFSDASNLAMCAAVFLCVSNPNSEFSDCFLIFSKKKLKPNKGTNLTIPKMELIAAEMGSKMLNLLIRFQISFTAQILFEKNVFLFSEVVKKYFRGFSGSLI

SEQ ID NO: 141892 - protein, 18 aa, Heterodera glycines
YREAIPEGFGSPHKSGRI

SEQ ID NO: 141893 - protein, 70 aa, Heterodera glycines
STGYREAIPEGFGLPINLGASVRGDCPENKKIDFFKCPFGVLKQLWGAKIQRRIKVQAIGKLLPKDSVSP

SEQ ID NO: 141894 - protein, 59 aa, Heterodera glycines
IHSFGGPCRVPRGKQCWFVSSRHRTFWLVSNRYVTCQIGRVRMIPRGEAPHQKQNDITK

SEQ ID NO: 141895 - protein, 86 aa, Heterodera glycines
MNFWYFTIALLTKIRKILICDQTKKSVFFPSIELIEFTINLLGFSPENVQSEWNPLIYEFLDKYIKGLIVQTMHLEKRQVCCVKSE

SEQ ID NO: 141896 - protein, 41 aa, Heterodera glycines
MDPVPFQFGRLQCNEQLIPNGLFTAPIFGAYILTLIKLIDF

SEQ ID NO: 141897 - protein, 170 aa, Heterodera glycines
MHGFGLFLSLLAAINLSRGQIGPKDESKKGLFLMANEFLETGKMLLDEFPGNKQAENKSDDGLNSQKANGKALEEKSDNFQQKAFEFLCGIEMKAKNDEKGNDKTKKDDNLLAFKELEEKRLNFCQNWKNGKSIWKGLKEAGISIVTSVNNLKLNQQIYGESEQWRKWKF

SEQ ID NO: 141898 - protein, 96 aa, Heterodera glycines
MEVLSDEEEGMALSDLKETAKKNNEEAKRREFDRRLPIIHSYLGDVNQGEFFCYKRSLSVSGPENANPIPPKVGHPICAQCTPSAKYPCPFHCGRP

SEQ ID NO: 141899 - protein, 19 aa, Heterodera glycines
IIGDWGINGDWGIIRANTV

SEQ ID NO: 141900 - protein, 159 aa, Heterodera glycines
MSLLKKNILHRVHFLEIFRDLNSQPYTYHEATDPTFIHSLINILIVTKFAQMKNNHFGFSLLSAVGIASAWLIMAMLLMMPSSSIADDDDEVFQIFARYGYKSYTVEVKGTDTVATLRQKIGQKIGIVPGQIRRVPYGVIKDGETLNRYGIEKDTTIFL

SEQ ID NO: 141901 - protein, 109 aa, Heterodera glycines
MKNNHFGFSLLSAVGIAAAAWLIMAMLLMMPSSSIADDDDEVFQIFARYGYKSYTVEVKGTDTVATLRQKIGQKIGIVPGQIRRFPYGVIKDGETLNRYGIEKETTIFL

SEQ ID NO: 141902 - protein, 38 aa, Heterodera glycines
IFKCLDFFFWLTKTSSNLVLSILFQIAPNFVYSLTRPY

SEQ ID NO: 141903 - protein, 41 aa, Heterodera glycines; identical to SEQ ID NO: 138623

SEQ ID NO: 141904 - protein, 81 aa, Heterodera glycines
  unsure (1)..(81): unsure at all Xaa locations
DALVSKRKMEKNFLKXFFLIFCYIVCFXVGCXDQWNHAHPSDLASKQRLLTSQKVRCRDETNQPLLTPRHPARSPEGMDLI

SEQ ID NO: 141905 - protein, 85 aa, Heterodera glycines
KIDFFVFGAVPPNRCAQIYGETESFGISFPIVCTLILRWIFALHNCLSTPNGHLNKSIFLFSGLSPRTDAPRFMGRPNPSGLASL

SEQ ID NO: 141906 - protein, 93 aa, Heterodera glycines
MAIFTEIFFNTLPALGALLFNWSTGLVMANYVGELSISACPVDAFICAVIYWRNLVKRGGVAQQQQNNINLMTVAKPMTTMANRNVDRRLTIR

SEQ ID NO: 141907 - protein, 29 aa, Heterodera glycines
MKKFSKFPEKNGFATKSEPKRDIFRKLLK

SEQ ID NO: 141908 - protein, 31 aa, Heterodera glycines
DYFSKHLVDWGIIEDCGINRDWAIIRAYTVI

SEQ ID NO: 141909 - protein, 510 aa, Heterodera glycines
PPAKCYFNFAAATGANRSRTMHQMHQSSVVHESSALGSDGESIEVSPCTSDQSAGGGDTEYIPKVKLRQKPTEYIPKVKLRQKPNRRWSEQDIQKRLSLPPDIRLPQNVIDKLNRTPTLDNPLTRKSKRASLNEIGFGKLETYKKIFDLGEGTYATVYLGKSLLTGKNVALKEIRLEHEEGAPCTAIREVSLLRNLRHANIVTLHDIVYTDRILTLVFEFVERDLREYMEELDGIISIANVKLFLVQLLRGLAYCHCRRILHRDLKPQNLLINRTGELKLADFGLARAQSVPTKTYSNEVVTLWYRPPDVLLGSTDYSTHIDLWGVGCISTDYSTHIDLWGVGCILYEMLLHKPMFPGSTTDEQPMFPGSTTDEQLNLIFQKLGTPSPAVHADICALQAFKNGQFRQHNAKPLLNPPRISPERADLLSKLLKYEGKYRISAIDAMRHPMLNCFPAQLFSLPDTESVLESVLSLPGVHYTRDSKDEAYIETRKSSERTEKPTGQRMRTTIQ

SEQ ID NO: 141910 - protein, 33 aa, Heterodera glycines
MGQLKLSSRGRIEEEEEEEEEMDEEEQQGEEEE

SEQ ID NO: 141911 - protein, 37 aa, Heterodera glycines; identical to SEQ ID NO: 127515

SEQ ID NO: 141912 - protein, 89 aa, Heterodera glycines
MGSHGVDCAVTVRGNSCGCVTICDTCCENGWWQRYVDAARDQAARQVEDSIDPWTGIVRGDEDSQRLWVEGHDVRPKCLGCQAVRVDYL

SEQ ID NO: 141913 - protein, 102 aa, Heterodera glycines
MTNEYKQKRKYSLKEWHQNYEEICKKIGVGYGTIKRWKKQFGISCKITEKEKMEKMKKYWKIKSENPKMSDKETAKILQIDRRTISKWKKQFGGEILEDLNG

SEQ ID NO: 141914 - protein, 150 aa, Heterodera glycines
HMTFNIHSTKIQIWNLSRRLSTAVSCQWALNELCLRHVSCRELWTLFRRNCAVDAQNQCKMANKNNDCWQSFEGISWTGLGSCTCAGNNSDCHWIRLQTNYNKCICVLALLKTDQKRIIDQSIQRNLKIEEKEKRHIEKQWRKRRRRRRG

SEQ ID NO: 141915 - protein, 238 aa, Heterodera glycines
MPFLNFFGAYYSAFFAIFGAFLVVLYSLPFLAHILEIFYNQGANKAPATIRAQVLQNTCTPVLASFPSKDATKKVIKRLRRDENAPRAEPLNLEQLEIPNTYRVYKRTEIDEEQFLLADTGVFKIHGQNGPQRFLDNYTGRMRFNVPMTHLCLTHTNGMFISAPWMVLIGRTTSPRHSIGNFIGNLAELIQQFGDSLTRSDTGAGQDPAQDFAGSQSAILHILENTGFAGLILPDPVL

SEQ ID NO: 141916 - protein, 70 aa, Heterodera glycines
LETGNFKFADPVAGLEFKIFYRTGSGRINPAILHLKSAGSCAGLRILGNFKKFCINKKVFQSIKKYSIYF

SEQ ID NO: 141917 - protein, 30 aa, Heterodera glycines
RGGGALTATGKDQQKGDEKGQEKGVGGGRH

SEQ ID NO: 141918 - protein, 98 aa, Heterodera glycines
DKIGREQTTTRCRVVYFVVLIPVSDGALLFSFFLFSVISTLFPSFFLDMVQNVDDCFRNKTSNCTNATFLIYSKLFCFGFGPVRANCLCFDDARCHFG

SEQ ID NO: 141919 - protein, 61 aa, Heterodera glycines
DNEARHVGQRRTSEAGHFEAALGPVDVQWSRTALLHRGQPTEPFGIEQPIGKQSQNRHRLR

SEQ ID NO: 141920 - protein, 43 aa, Heterodera glycines
RDVREVIFTGNRETIREPRNDPGKRYENRDPKNPRNFSTRESR

SEQ ID NO: 141921 - protein, 126 aa, Heterodera glycines
MARRRRKKEPRKQSYKLYVRRVLKEVHPGKEISMRALNIMNSFVIDALDRIATEATRMAHNDRRKTITLRDMEFSVRLCLPDVMAKDANQKAQKTVTKFYAAKVRDRMRRTEMRRGEFAMMQMAAL

SEQ ID NO: 141922 - protein, 268 aa, Heterodera glycines
VEKILSKIYFNLKSPASFAGIQKILNEAKKIDPKITTDDVNKFLEKQKTYTIHKPIRKRFPRLKTIPSGFHTDWQCDLCIFDQLKKHNDGYKYLLVCIDVLSRMIFSAPAKSKKSEDMIEAFDRVFEKSKIIPMKIYSDSGLEFQAGKIKNILRKNFIKNVMYSPDLHAGVVERANRTIKERLYRYFTKKDTLRWVDVIDKIITNINNSVNRTLGAKPSSINLKMPVRSGKKKFKIGDIVRITKEKKFKIGDIVRITKEKGKFSKGYL

SEQ ID NO: 141923 - protein, 29 aa, Heterodera glycines
EAIPEGFGLPINLGASRAFGVLKQLWGAK

SEQ ID NO: 141924 - protein, 56 aa, Heterodera glycines
MYLCMCLSMSEMATMLPTAGGGYSFARTAFGPFGGYLTGTAILIEYAIAPAAIACF

SEQ ID NO: 141925 - protein, 143 aa, Heterodera glycines
MKNTIKSELLAVEEGETIFHGPPEGMLTLEELISRLEEKVAGYEAEKHFCVGPLYRQTDHREAKELAQTIAQKQAVAVHLQPTAEQLEQMVFQLMSAAEETTLHLIEQREEDFKWPIWTTGEAQGDEEEDAEMEEVQDDDWED

SEQ ID NO: 141926 - protein, 110 aa, Heterodera glycines
MSFGRLNNATPIELFELENERTNEKLTLKGVSRHPGNWLLKRCPTNGETTTVQQQKDENSDVNLHNVHFVLDIDKQCIGPLSPPSEEEKAGQSNDEMFSTTPEPSNQRNE

SEQ ID NO: 141927 - protein, 221 aa, Heterodera glycines
MNRQLKKIYICTDVWMDILPFFERVELGLTLALLSPRFDVLVDAHFDGKRKLTIWRRIIVRKGKNAEKVLVGIYWCKEEHYTLMDCCPLPNKIRFDCLQIEYIDHSVLAFFRSNQQIFDKGTNLTIHIQSSKTESNVQPIWDVLVRQIWPIFTATNVHHLRFGNADHLDTLLRLTSPTIPSDLNINSIQSYRGLFPDALGGDDGPNISKRCDQTFVKPLTN

SEQ ID NO: 141928 - protein, 44 aa, Heterodera glycines
NKGNSQHSTPSVRRAHKKHSEAGKTSGEEGNGGEGAQESAFDKA

SEQ ID NO: 141929 - protein, 115 aa, Heterodera glycines
MSNRTNFAILFAEGSGQRGNEQSDEERGADFIGYSPIIPGQRIVDVKMAVDFQRQITKYALTYKMVMELFEFEYVSKNELENADECAVCLNEFDEEEKFVMIHKNERQQTKPVKN

SEQ ID NO: 141930 - protein, 29 aa, Heterodera glycines
PPSHFRPIKRAPFSLNAHFHISIHSFLLL

SEQ ID NO: 141931 - protein, 41 aa, Heterodera glycines
KRQALEEKDQLELYASALDEDLERLSTDSEDEQETRKARPN

SEQ ID NO: 141932 - protein, 211 aa, Heterodera glycines
MTAVIYHGKKSLRKLNTNLAFIRWRLASFIRAFLVILMAFLFQLWHPKFVCSFQMRLCHIYCTNFSRFTQNGNKILSEHQKNWQTLFNEVKIEEKFKNFAVIVGLTSQFDNFTENCAFQRSKIRNKLFEWAKRENVADKLDHYQLNAELEEKVRCKIFSKSAFCCYWLVGLRLNAQNFHRVADLVPIYGQNSSKKFFMRSFFSATKNLSKL

SEQ ID NO: 141933 - protein, 55 aa, Heterodera glycines
MFGQHFGALFGASDLSPSAAEDKQQAVPSSGAELAPAGAENGTAPEAPKTPSFCT

SEQ ID NO: 141934 - protein, 16 aa, Heterodera glycines
EATPEGFGLPINLGAS

SEQ ID NO: 141935 - protein, 246 aa, Heterodera glycines
MDNSSEKKLLPFSNHPNIDENTPLLSTRPFILSPFMPTIATQVSINNGQPDRHRATTNPSVTLSSSLPQPPIMTKAKVIVPRIIGGPSERGDVRVVGQAKYGAVPNSTTDKNVTVGSVVKHTIAESESESSDEDEEERFLNLLPGGNVFFFASLIIRCAEALGDACFVTSSFAISAKCFPGRIATIVGIMETFAGLGYTAGPVIGGVLYEYGGFQLPFFVLGSVLIMATLLSYYLIEEIEGFYFIY

SEQ ID NO: 141936 - protein, 85 aa, Heterodera glycines
MIVVVRGNPIDSTPQPPSVGPMNELNLVNMSNILMLSKEGTQMRRLTGKPPTHSPLATVEDKAPQRSSQTVETTTEQKNKANHSR

SEQ ID NO: 141937 - protein, 210 aa, Heterodera glycines
FQKIRSTVAAQVHSVAALSQALPGNPIFREYTIGAQIGSAGPGLCWKIFSGTKNTTKKEVTIWLEVTIWLFEKRQTENWAPAKREEFPEILKRGVSQLTRLRHPRILTVDRALEESRDCFAFCTEPLFACPLFACLANCFGDLTKKEFQLLDVERRHGLYQIIAEALAFLHNDTKTVHGNVSPSSVLINSKGAWKLGGLDFCILGNTSIP

SEQ ID NO: 141938 - protein, 577 aa, Heterodera glycines
FVHNSRSVAFHNDTKTVHGNVSPSSVLINSKGWKLGGLDFCILGNTSIPGKVNFAVPGWSQNEISALCPDLDFVSPELAEGLRCDTFVDIFSLGVLSFAAFNNGKPLFECNNSFRLHRENLKKLKQSLQTLLSIVPEPFDDDIKMNLKKLKQSLQTLLSIVPEPFDDDIKMCLNETPELRPDAIQFTKLSYFELSYFEHPLLKTLNCLEQRLAMDNTQKMQLFKGLPTILAQFPKRSLLLTVFRSLLLTVFPHLAAEFAAPPLIPFILPSVFLIVELTSPEEFVLSVMPSLLSVFPIQTPYQIGLLLMQRVNLLIGLLLMQRVNLLLEKMPPDAVKQHLLPLIYNSLTGDNVRVQELTLIEVPNELTLIEVPNIVKFVDREQMRTQLIPKLIRLMLESKDLSIRVQTMVCLAKLLPHMEPWMVTDQLLPALPKITSKDPSVLMAVLGIYKIVHENTKFGINKEQCARSVLPYLISTAVEPTLNLQQFGQYMELVHQLIRRVETEQRHCLEQLSASQEEQRWTERSHSHFQSNEMNKTNQSNEMNKTNQSEVDLGDLARALSGTSANDGICNRTTDKR

SEQ ID NO: 141939 - protein, 97 aa, Heterodera glycines
MPAGSNLIQQKYVTEGIETVAQNWANGCSMAHSDSSQRNGMGENLYMTSSSSISEADALKQACDMWWAELKQYGIQESLVLDREQFNKGIGHWSQAK

SEQ ID NO: 141940 - protein, 21 aa, Heterodera glycines
MRNCVVIITVRNIDQYKWTVQ

SEQ ID NO: 141941 - protein, 76 aa, Heterodera glycines
MFYFLLFSLIFYIGDSAYTKKQLKNCLGQCGLTFDPMPEVGTFRVKRALITTTSSYVENQDIVYVFFIKNMIFQKF

SEQ ID NO: 141942 - protein, 286 aa, Heterodera glycines
LNEKTWAKSEFVGTKEGSMSEVIRNFDEVVLSSKVKWLIVMAGKDSILAGESIDSIMEKVKRLRQLCSKFGHLKIFWLLPPFIFAKKNESEEFCARMRAFFRKKSEIELISVNEEGRSLLEVFRFGKSYNNEHVNQNGWMTEKGMKVMKAWLTSLVPGFPGDRELGIRTVKSKVVVPDVEQGSGPVDPPQIRYKGPVKNVGGGPGDPSPSPFDSFSDDGPTHSVRSVNVRNFGGEFSQFGRAGTAYRSAHRGGPSSSHYHPYQRARGGPVYHSTPSRRRSDFVPRR

SEQ ID NO: 141943 - protein, 31 aa, Heterodera glycines
MEKACKIWRDYIDFSALELLELASSRLFLAF

SEQ ID NO: 141944 - protein, 24 aa, Heterodera glycines
KFLDFLFISLFDSESIREPYLTFN

SEQ ID NO: 141945 - protein, 109 aa, Heterodera glycines
MIVLSVYPLLLLLLSLPVLHFSFSSSVSSISVSDQSPGLIRNSTDQQEIAPGLSSLTFVFDRTGSMNGFGSVSSRLIHLRFYGRPFQRLSLGGDRAQSDPGEAKLGVFK

SEQ ID NO: 141946 - protein, 191 aa, Heterodera glycines
FFLPFFLCFGILSSFVSAHTCGNNRIPYGIEIYHNGMPSLLCSRPNCFDKMYADCDERATRKACDSKTDCDERATRKACDSKTTWVGGFDKALPLSLYLQCCEFEMLPTLSKELYSNVIIRPGEYFEGEEIMDKYGEEVIAFDLITNLRKINGDGTKNSTYSVYSVDIRRFHCDQTRPKRFKPWKWPQQIA

SEQ ID NO: 141947 - protein, 22 aa, Heterodera glycines
ASVKVEAADNPNLRINEADPML

SEQ ID NO: 141948 - protein, 27 aa, Heterodera glycines
MSGSEPMSNEIINKFLSTIMIAFIFIN

SEQ ID NO: 141949 - protein, 95 aa, Heterodera glycines; identical to SEQ ID NO: 124528

SEQ ID NO: 141950 - protein, 28 aa, Heterodera glycines
MLYFKKRLAILAKSADKLALQLDEKMEF

SEQ ID NO: 141951 - protein, 346 aa, Heterodera glycines
MADDSNNNYFFVVLPSNVTDYVDNSTSKYRVHLPKPVQFRGSWVCGLYSIQYPHSWASTIGTVEDQWIDIHYIDGRLLRVHLPKSSQQNTEGLQRHLNGTLTTALSRKSTEDGQTPSIKRSKRSVDQGQQQSREETEKESKTGTMEINDEGERVPQDNRGVECIKIGKLTKCKRITPIAPEEEQNQESSSKDLPKDDDSSNDEGERVQQDNNAVECRKIGRLTKCKRIKPIVTENDNKNDGKDGEAVIDTKTSASDTTLKNSEITPPSNPSAQRQQQQHDEPRAQALTRGEQLGKRLRKTENEVQSQQKSPVNESLEAQTQFSDAKDQSETHADVFKDRLSTIHGD

SEQ ID NO: 141952 - protein, 305 aa, Heterodera glycines
MYANRFVLVPEEIYKGLTATATSGDPNLDFTRRALDEVKREHADPTTKNAHYNQELRRYLHLKKAYDERPVKVSIDNASAPVQQSEIPVVTPSQKKRAKRSIVDRRGRNKLSSSTPATSRRSSTSNGEVSFSTDIEENGGAETDSGSKIDTADSSWTSAKSAETTGTLRAESEVSSATKTATPEQRSKWINEFGVLFMANPGKYGVSADGGIRNQQGARIANSNIRRSLEWIFNVGTRATTKRPPGTSQIEQIFERERLLRAYLPQPQQQQGHQQKQKGSSSRPLIGKEEVAKFDPKLWKYTDKD

SEQ ID NO: 141953 - protein, 323 aa, Heterodera glycines
MDNKSLTSQLLPTVNFLVTTQGVTVHSDRLDTPRVVFFNDDGTICRQCRYNMDLDYLISKDGVYIHSSRLKGTEKFVPFDRVYDLPRFCAFRVRSRRIFKVPYIFSDSPLEKAMSSTVTSTTENPLIDNVERKKARFDSDSRDITTKNGEDEKPELTNRTDELNHRITNVQLHAGVPDAEMISSLTKPAMIILDDLLYSIDERYLAELFTKKAHHQNFGVVFISQDLFDRKLKVVRQNSMYIVLLRAPNSALAIRNLGVQLFPRQLDFFLDAYRQATRQKYSYLLIDLHPSSDPLLRLRTNIFKEDNSDTAIQQTIFLPKAGI

SEQ ID NO: 141954 - protein, 117 aa, Heterodera glycines
MEGPDEDEFTIVGWDPEKKVVMDLEAAIHSAQTMERSFTLRTKNGMVEHNGHTVDTEIGAMETVQTSSIDTSPLFNTQPVRQSLPPISLLLSNIPQPVKSVLNNINNNSKCEIPFYE

SEQ ID NO: 141955 - protein, 48 aa, Heterodera glycines
LCNVTGHLDSGHLDSGHYDSGHLDSEVIWTEPDNWTVDITTESEFFYY

SEQ ID NO: 141956 - protein, 81 aa, Heterodera glycines
MNVERQESETGLSIVAKLFLAYQEAKNYDFNLFTEMAKNTTTGLGTIMSILMARQGERTPPQNSWDELFVAKQPALNDLIG

SEQ ID NO: 141957 - protein, 27 aa, Heterodera glycines
MFKNQYRDVLPNFYWKENAIFRHSNHV

SEQ ID NO: 141958 - protein, 76 aa, Heterodera glycines
MIGRRVVEMKYYANDQQAKDYADHVTRFLRESKSRKCNAESTKKNSRSRVFGSFSLSKEKQIEYKLNTYVTQRMQN

SEQ ID NO: 141959 - protein, 128 aa, Heterodera glycines; identical to SEQ ID NO: 125618

SEQ ID NO: 141960 - protein, 95 aa, Heterodera glycines; identical to SEQ ID NO: 125597

SEQ ID NO: 141961 - protein, 101 aa, Heterodera glycines
MPKADDSHVKSATVPEMTSSDHLIADEQKGTSGGKHTLLELLGIDPNQVQTYSADMPKAYDTCGKSTMAHVMASSDQRIAEEQKGMLGGKRTLSELLEEEH

SEQ ID NO: 141962 - protein, 113 aa, Heterodera glycines
MSNNSTIAMPNNTTNSSPSELIFCSGIVLTYIELAVHPISLLSTFFFVVLIIKTSVFHANLKRILLGQSAGIVMFEMARITYVLIKVVAGNVFMQGPIVIQIFGLFGYILRNA

SEQ ID NO: 141963 - protein, 70 aa, Heterodera glycines
MQQTDKGEEGKISLVASKDGLEMILGWKNGTQHRYIERKARPTSLQIFIDVGSVEVFSDQGEWSCTARIP

SEQ ID NO: 141964 - protein, 47 aa, Heterodera glycines
GILHKDNRWHNAVCECSGLIPLGDPLSLQTLWAFVYSMSNSVDEDGR

SEQ ID NO: 141965 - protein, 71 aa, Heterodera glycines
MPQPQALTIIHLKKHCWTKRRRGQPPENDEENANDDESQQPYERSQTIPLLIMFIVYVFIGNVCFLLMSRT

SEQ ID NO: 141966 - protein, 73 aa, Heterodera glycines
MLTLANFCQKFWMVGKELVGVQKKKFNFFGAIFVPSQKNTASFHSSMHKTIAFWTQTTTIRALWNVYKPFVGM

SEQ ID NO: 141967 - protein, 18 aa, Heterodera glycines
MQQRQRAEERTPSKDENT

SEQ ID NO: 141968 - protein, 211 aa, Heterodera glycines
LKIGFIGAGKMAQALARTFVNLGRYPAEQLMASCPKARENEVIILSVKPMQIGKVTPEIAPHVKQSHLLISLALGKITVKGIRSFLPSNSRVVRAMPNTPAVVGAGVTAYTMGTPAVVGAGVTAYTMGDSNLVHNLFSTVGHSFETPTPEIQMDAIGALSGCGPSYVFSIIEGVFSIIEGLADGGVKMGLSRELGLSRELSIGAMTLLRAA

SEQ ID NO: 141969 - protein, 242 aa, Heterodera glycines
MTFGNTAPRKYSISPEFEQIKFEKRVAETRVGQLNELLDNARELAEAFKRELQQRKEEMAHKDQRLQNLPKLEYFPRQRQLDELRQTLERERKSHSLLEESFLNLQREKSHLQDELVETLHRHGQKHEAMLAAMAESSQRESELNATVRQLQNEVLQFRKHSHGAMGLAPVGSATNSLSSALSTSSLLSSSTIALHNISIGESSIELEELSREELIRRCNELTERCKREIRSKNKEKQLKEE

SEQ ID NO: 141970 - protein, 419 aa, Heterodera glycines
MWPLRSTGNEKNSKNVPIFPLKRCYWYGCPSCFPDDAAIVGGGETAGALRARDAKRTRYIAREFEVEVVWECHLNAMLEDNPAMKAYFDNCPDSGPIDFHDAFFGGRTGPEYLGASVINPETGDWKSRTIKVKDFNSLYPSRNRLTKTEIVECHAELAKLLNDSKIEVSSIDQLTEKFWMVCYKAKDEHVVEHSTSNVAIALWTTSAARIHLLESLKKVYGPAPGVERYDTRILYMDTDSIFYDYLTRLGDPLPGGEQLGELADEYPNHTIMEFICAGPKAYGLWLRNNATGEDEYKLKVRGITLDSDACERITFEKMKDMVQNKLGQPDNNVRFNYPTKNFRITKKGEIFTVPLVKQFNPTVNKGVIRDHGLKVVPFGYSDEEWCKWNCPGACTCLFNSDLNVNMFTEEELNDPDIMP

SEQ ID NO: 141971 - protein, 183 aa, Heterodera glycines
DTDSIFYDYLTRLGDPLPGGEQLGELADEYPNHTIMEFICAGPKAYGLWLRNNATGEDEYKLKVRGITLDSDACERITFEKMKDMVQNKLGQPDNNVRFNYPTKNFRITKKGEIFTVPLVKQFNPTVNKGVVRDHGLKVVPFGYSDEEWCKWNCPGACTCLFNPDLNVNMFTEEELNDPDIMP

SEQ ID NO: 141972 - protein, 471 aa, Heterodera glycines
MYNQQLRRYLKMRKEHKERPVRVQLSNGAQLLNKTVETGVQVRPGPDEPKDKSVMVTDEDEEEEIEVPKFLTPTSPTQGSSRSPRTNKKAAKQQKLIEKKDHLLAIIMSDPQRFGATDRGKIINPKTGREFIDSDLAWSIERLVDPRPENAPSPRGTKELKRKLAQNPLASSLLNRLFVGSGFVGQGSDVQADLADFQALSRKNSGYRYLLLAVDVLSRRMFGAPVKSKRPADMKRAFEELFEQMPRVPDTLYTDRGLEFVAKPLKEFYAEKGIQKFETSSKKKAAVAERAIRTLKTRLYKYFSANNTSVWVDVLPKFLSAINNSVCRATGLRPNEISDANAREVWKRVYGEGLAQLDKTPKIRAGETVRIPEPKHIFEKGYIPNYSDHVYTVDEARSTNPQHYLLKDYYGTKLKRKFYLPELTKVQVDENTMYRIEKKYKERVRDGKREILVKFIGFPEKYWVKNDEINE

SEQ ID NO: 141973 - protein, 158 aa, Heterodera glycines
MRDTDKKKKKEEIIAAGTNNVVSEQQQDGVPGDEHSDSDNSTEERAQNGVPGDEHSDNATEERAQNGVPGDEHSDNATEERAQNGVPGDEHSDSDNSTEERAQNGVPGDEHSDSDNSTEERAQNGVPGDEHADSDNSTEERAQNGVPGDEHSDNATEE

SEQ ID NO: 141974 - protein, 91 aa, Heterodera glycines
LFEYPKRTLEKIDFFVFGAVPPNRCAQIYGETESFGNSFPIVCTLILRWIFAPHNCLSTPNGHLNKSIFLFHKYFFRKCSKAHQILFTSQF

SEQ ID NO: 141975 - protein, 43 aa, Heterodera glycines
MHDDILHNVGLDSRAAIPTSSCRRTAVIISLHFGLHKNSQKSA

SEQ ID NO: 141976 - protein, 57 aa, Heterodera glycines
MATPPKANALVEAAGKFNKLFIMPPNRPTRIKKAMNILFGRTEEEKRVTGNFVSRIA

SEQ ID NO: 141977 - protein, 36 aa, Heterodera glycines
MRKAKCETPKNANNAKGEMRKAKPRPIPGNDKFQPG

SEQ ID NO: 141978 - protein, 42 aa, Heterodera glycines
SVEQLFQNKFEYISLLCIFSVHYKIKSFFVLILLFNYFLLTK

SEQ ID NO: 141979 - protein, 294 aa, Heterodera glycines
MGLKLFLILKMSDNPKEEEKQMDKEIYIDHNVVVFLCRFLPIFASYGTNFAIQTESDRVLAFVVRNIWPMLRSEIRAIEFTHHNNLHHFRQSSSSILRDCQTLHSVFSYGQFPAFPADDSATATDCQALAKWLLCSPPRPDGSPRMFHCELESTEQEYQLAPKIDEFKAAFLYASSPANFIINICLVSLAHTSILPFDLTNDLTGERMVLTKTVLEYGQYGTITVPEYVTKFVMVRSPMCRDENKWAKWEKEAEEWEDNMNQRNRNLIEIDVNEENLDDGLLNTITSPNDQQQK

SEQ ID NO: 141980 - protein, 806 aa, Heterodera glycines
HPLPRPDDIFNALRGATVFSQIDFKDAYLQVELDEESKQLVGLNTHRGLFQYQRLPFGVKSAPSIFQKLMDELTSGLEGVFVYLDDFIVASTTTEKHFQILSKFFKRLQDWGLRVKINKCQFLCTELKFLGHVISADGIRPDPDRSRSIKEMPAPSDQRTLRSFLGAINYYSRFVSQMRDIRAPLDELLKKDKEWNWGPEQQQAFENAKQIITSDLLLTHYDPSKPIVVAADASSKGIGATISHVFADGKEKVVEHASRSLSPAERNYSQIEKEALAIIFAVQKFHRMLYGRKFTLLTDHKPLISIFGSKNGIPIYTASRLQRWALTLSNYDFKIKYISTKDFGQVDVLSRLIMQHREAQQDDDYVIATAQTNSDFNSSSEDSIEHGTAAVEYVLHATLDQLPVTATEVAEKTNQDEELLEVLQNCRNHWPKTAHSSPLSAFYTQRARLTEVDGCLLMGDRVVIPSSLRNRILTALHFTHPGIVRMKSLAKQFVYWPRMDLDIDRWVRNCQECLSAAKMPPKVPLSPWPSPSEVYERLHMDFAGPCADGNKYLVVVDSYSKWPEIFKMKTTTARILVDKFIWLFSRYGYPKEIVTDNGQPFKSFEISKFCREHGIRHTFAPPYHPMSNGRAERFVDTLKRQLKKCGETDSHWVQNSLLAYRSTPNASLNGKTPAEFFLGRPVRTILSLVRPNEKKKHSDTTDKQYRHKMAQQFNRHYGTKERTFCTDNPVQFANYRNGSKMWLSGRIVSGNGVVWRIYSPQLNAVVTRHSNQIRKSFPIPYRDSSEPNEQQDQNEQQQEAPQSPRH

SEQ ID NO: 141981 - protein, 111 aa, Heterodera glycines
MSELNFQIWCFSFKTNTADARKYNISGLISRCLKIPISNLSNVFLAIAQARLFDLENFSHQCLRYICQNAGQLFGSEEFLQIDQNLLCELFDRDQLVVSNEFEIWKAVILT

SEQ ID NO: 141982 - protein, 142 aa, Heterodera glycines
MMELKMVAETDQPANKCLLLTVQHAFPKSAIFTLISLFIGQKTLSSHAEDGDVCPLRIGTRALSAAIRATSRGSSATRTFGNGWKVRESKGRRGGHLRLNVRVNNAAFAVQIGETLKNRGERHLKCGREIDILSFWPLFLFK

SEQ ID NO: 141983 - protein, 18 aa, Heterodera glycines
ILFDRARQEKATVGTKFA

SEQ ID NO: 141984 - protein, 212 aa, Heterodera glycines
DPCAILHFRRPSQRHTEQFSDLTPNSQFSVSHSLAAAAAASLTPFMGFASNGLYGMSAAAPGLMYGQNGPFHPYNNNSNPSSSSNSSVPSSSSSSAAMSSLFIGGSALSPYKLPPQQHNPSSSSIKLSFGSASVPSADHSLLCSASLSAGINPNERRKQRRIRTTFTSAQMRELENTFTETHYPDIYMREDIAMRIDLTEARVQVEHRETKK

SEQ ID NO: 141985 - protein, 27 aa, Heterodera glycines
MTGFFSNGANENYIFIAAGKCVSGKMQ

SEQ ID NO: 141986 - protein, 24 aa, Heterodera glycines
MDGRSDFNKVLSADKMPVRAKAAS

SEQ ID NO: 141987 - protein, 120 aa, Heterodera glycines
MTVFPMIAEFSLMPQLLCYKWASVYSNMTSSLRTFGQAMVLPMENKMRFPGEMVSRVGVLSTGMALTAIFDAAVGFLGYAKFGEHIQGSVTLNLAPTPLLVLVRLIFTAISFLDFLLQQY

SEQ ID NO: 141988 - protein, 46 aa, Heterodera glycines
MAWHSTTDIGCGVAKCQDAQWKLGNVLGQTIYGSGDTCSVSLTSGY

SEQ ID NO: 141989 - protein, 142 aa, Heterodera glycines; identical to SEQ ID NO: 126125

SEQ ID NO: 141990 - protein, 35 aa, Heterodera glycines
DQKRPRFCESIKKTRKSTAMMLTPVILNLKFFINF

SEQ ID NO: 141991 - protein, 65 aa, Heterodera glycines
DGTLLLSKVEVEEDSERSAWKTDDEDEGDDDEHGIEEEEKLEEDGRGATTEATTREGDNTKTNKQ

SEQ ID NO: 141992 - protein, 332 aa, Heterodera glycines
LYDSISLHIKIQLLKFHSQLEQKAISIWKKFFLNIYKNMIFEIPNLVFENKCYHNDQEKCELFANLFVNSFNNSELIQAFAWTTLVNQSFISDIEFNIIETQKLLRKLPNKNGTSPDNISYKTLKNCHPSLATVITDLFRISLDSGSLPDIWKESIVFPLFKKGDKFNSENYRPISLTCSLCRVMERILSKNIYNYLLKKNKISEYQFGFVRNRSTTSQLITVVEDWYDAIINGKNVDCIYIDFQKAFDSVPHNLLLYKLEKIGIRGKLLMWIKSFLSNRTFHVKIGDALSSNKKVDSGVPQGSVLGPLLFLVYINDLPGCLPSGVKILYAD

SEQ ID NO: 141993 - protein, 99 aa, Heterodera glycines
MGHTTSIIQRLWFPGAWPCRPLHRRSGRLGPAVDRHSRIRDVSAVHGVAISAPATTEGGRGGHGRLRRRRRRVGRGRKGRGRREGVKRERRRRAKQCAD

SEQ ID NO: 141994 - protein, 47 aa, Heterodera glycines
MTTKQQRSDNNDGTAATVAGRRRNDSSNCTAECHQHGQPNDVHDKKD

SEQ ID NO: 141995 - protein, 92 aa, Heterodera glycines
MFSGKTTELFRLAQRYILAGRKVAVVKYALDTRYDESHACTHDKRKMEAISATKMEDAFEELNKFDVIGIDEGQFVGFFPPLIYHIWHFHLC

SEQ ID NO: 141996 - protein, 119 aa, Heterodera glycines
  unsure (1)..(119): unsure at all Xaa locations
VIVIGYKIILVSLPPNNDIPRTELFRLAQRYILAGRKVAVVKYALDTRYDESHACTHDKRKMEAISATKMEDAFEEIWHFHLCXFKDIVKYAQELANTGKTVIIAALNGDYRQEVHRRR

SEQ ID NO: 141997 - protein, 92 aa, Heterodera glycines; identical to SEQ ID NO: 129555

SEQ ID NO: 141998 - protein, 101 aa, Heterodera glycines
  unsure (1)..(101): unsure at all Xaa locations
MIGRAVRNRPFIFEGIFKFILYPRKMSISFFEKFYTSQKRLRMRRRAVHNRHFISQRIFIFRGYPRKMDISFFDKFYTHTNALEHDXGGRCAIDLLFLREF

SEQ ID NO: 141999 - protein, 133 aa, Heterodera glycines
MCYYAISFYFINVIVHFFIAISSATSPVEDNALLAFMKSYGLHKQNEIQTGEYSAQKYEAHLGIVYFMRENWQCAKIWDKFDEFEQGECQKYRKYLEILYEYLFTEYIGMPAVKRKFVFEKFKFEIEGPIIYA

SEQ ID NO: 142000 - protein, 18 aa, Heterodera glycines
MRTRPIWQVKQRLLTSQK

SEQ ID NO: 142001 - protein, 71 aa, Heterodera glycines
MQRQKDGGVPCEEALHQVLGLYRVTPHPATNSSPAEKLFGRKLRTMLDLVRNIMKPKTHVSPIQSIPNLFL

SEQ ID NO: 142002 - protein, 139 aa, Heterodera glycines
MEKIMIESKMVSILQNNETFLERFNVVSISPTTWGVFCACVSIVAVFVLFFKGLPFFWQFQEGERKMTEKLEQTFCAIGWTFATCNGRFSPIPSLRKPKDNLVNKTLMDVSSNVNSQRQILPKLVTELDLELTRFGEFQ

SEQ ID NO: 142003 - protein, 211 aa, Heterodera glycines
MEILKKKIFFPQELRDVLAAREQRLVGELSQCRTDGQRYFDARFATLHALIADSGKAKSSAKASFVSRMEKFNAKKTDDLEVALTARFLCDNNASSAISVAISQLGTVPAVSAVEPTPTPAAVITQNGDNHNINNNNNKRCGEASSNKTVAPAAAAAAVSTNAAAPPHPPPPARNENVVKRSNSPSSLVSSVGEDSGLGGQISPVNHDKQK

SEQ ID NO: 142004 - protein, 196 aa, Heterodera glycines
MAAVAAQPKVEKKIMDEKIAKVREVVKNISTNDIVLALHNFELDVARTIHAFCEGGSEVALGDWERTGGAKKRNQKKKSSSKGGAAIANASSLSHQSNNSGTTTPSVASSLVNCSNVSSATNLADKLLLTNGSGPAATALPTNASVGVVTHQQLQQQQPSLLLNERGNDGVADCEEKSFSTTQNHHHNHQQQPQKH

SEQ ID NO: 142005 - protein, 33 aa, Heterodera glycines
MTDEPETKDQLIYLIIVCEKARRFDDMVEAMKK

SEQ ID NO: 142006 - protein, 154 aa, Heterodera glycines
MNDKIDWLGRFAASHPILGFFSNRRDSIHQHSITGTQSTSISITGTQSTNIPINGTQSTSIQSLGLNSPAFQSLGLNPPTFQSTGLNPPAFQSLGLNPPTFQSLGLNPPAFQSVGLNPPTFQSTGLNPPAFQSLGLNPPTFQSLGLNPPAFQST

SEQ ID NO: 142007 - protein, 93 aa, Heterodera glycines
MAKCFPWVQLRLIGQPSLELDEDFDEEFELFKRYQMQVHRERASDLTPDAFRRFLASSPLFPSPPHEGQQQQQVEGAEDILALIRTLPPILPI

SEQ ID NO: 142008 - protein, 184 aa, Heterodera glycines
MLIRCQCEPIKPQCPPGPPGPPGEHGIDGQPGQHGMPGKDYTLVYMPSAVCPVMDYSQCMPCPSGPPGPPGPPGSQGRPGCEGEPGEGGRLGKHGAPGKEEFGKVFNRVLGQRGMAGEAGLPGLPGLPGLPGAAGEDAEFAPTLIVGRVIALSTFLFAMYIFRMDERFIRLCENIMKEIDDDDH

SEQ ID NO: 142009 - protein, 35 aa, Heterodera glycines
PLELLLPLTFCCLDIESQKTLFDVNLALNPSKRSL

SEQ ID NO: 142010 - protein, 95 aa, Heterodera glycines
MTDCEHHSVPPSAPPVDFCPSSPPPSYASSPTAPRNNANDRQQQNTAKGCFLPSCKNAKRATKENDAGGTEPSQPTSATVVVPMAKDKVTILCLG

SEQ ID NO: 142011 - protein, 62 aa, Heterodera glycines
ALFPNLAPIIPRHISLAPALIHSRIITICKTTVSTVPSFARLTVVLTTVPRVSTVVGSLNAE

SEQ ID NO: 142012 - protein, 20 aa, Heterodera glycines
LNNFTDSFAPFMCFYFPFKS

SEQ ID NO: 142013 - protein, 25 aa, Heterodera glycines
MVIFDKKRAENSWLEDLMVILTKVK

SEQ ID NO: 142014 - protein, 68 aa, Heterodera glycines
MNESISNLVDTLRAGIDTLYRAMNTGPSTSTVPKKRKNSTAPEEEEKKKPEGEGGNEHGKGGGEKEKP

SEQ ID NO: 142015 - protein, 20 aa, Heterodera glycines
RAHEQLNRMQVPPVAVRLTV

SEQ ID NO: 142016 - protein, 235 aa, Heterodera glycines
SFSDARFFHSELPRFLPLQTVVLFHLGLSTLNTDFKEQFGDVKFVCFVCTGGSSTRMSEYAKFFSAMANVASGGNLCNRTDRFVMFKTGPVLWANHGIGMPSASILLCEHGIGMPSASILLCELFKLLRLACCADVLFIRLGTCGGIDVKPGTVIISNGVVNAAMENKFVQWIQGKEVKRDALLDAQLGDDLFDTVKRDALLDAQLGDDLFDTATEMHLPVDRGLTFCTDDFYEG

SEQ ID NO: 142017 - protein, 104 aa, Heterodera glycines
MQMDLVQIDFKMGKLLQALRMTGFGLHKSVAQHKYEELKSKMEQKKRGGKLGIIDVCQLWSCAEDIKKISQLMNKTISNIKKEINNAEQLLKRSKKFDLTIINY

SEQ ID NO: 142018 - protein, 87 aa, Heterodera glycines
MVLISQKQFDELSTQSLWRPQLEKDACGVGFCVSVRGIPTHKILQEGRVMLERMVHRGACFCDDDSGDGAGVMTAIPDKLYRDELKK

SEQ ID NO: 142019 - protein, 76 aa, Heterodera glycines
MVTEQNGATFAVDVEEIAAGHHVTPVDMTTATSKLQLEEDKSRVEIFHDYARRQKRTIWSWFQGILTRNDSFIVNQ

SEQ ID NO: 142020 - protein, 94 aa, Heterodera glycines
MVCEKCTKKLSKLATVHVEKSDQTAKRVTNENKLLSSKQKFKPASEEFKKCRICNKMTHHISAYYCQDCSYQKGICPMCGRKQIETAKYRQSLT

SEQ ID NO: 142021 - protein, 276 aa, Heterodera glycines
MSAKIIRVPKIACDLSLAKNGVSKNRNYAQKASQTILAHPIPSTIAFIHPIMNAKIIRVPKIACDLSLAKNGVSKNRNYAQKASQTILALPIPSTIAFIHPIMSAKIIRVPKIACDLSLAKNGVSKNRNYAQKASQTILALPIPSTIAFIHPIMSAKIIRVPKIACDLSLAKNGVSKNRNYAQKAPQTILALPIPSTIAFIHPIMSAKIIRVPKIACDLSLAKNGLSKNRNYAQKASQTILALPIPSTIAFIHPIMNAKIIRVPKIACDLSLAKNG

SEQ ID NO: 142022 - protein, 31 aa, Heterodera glycines
MGSKNPTQNKSTGYREAIPEGFGLPINLGAS

SEQ ID NO: 142023 - protein, 17 aa, Heterodera glycines
KIFNSFLNRPKSLGLTF

SEQ ID NO: 142024 - protein, 1125 aa, Heterodera glycines
MTAPIQALIRGCASKLGALLGTEIPPDLGINALPNQCQRRLYKFRNLLNDLERVVQKIEDNLGLANEYIGKLSRDNAIRKETEMQELMQELQINEKQKAADVLIPILRDKIEALEESYLDSCIEGKASAIIQGIPISESGYDDAIDLLLKTYGETKRLIRTLNREFMSLPISESLEDDESLYLKSEKIFRQLISMNQNVEDGMYYSNLEGKMSPAEVLDKYCVIKDAEENDDWDTSKFRNAFSRALDQIKHRQELRKNVIEPKRDKHELTMSFTAFSKNDKYQGRNKFPQRNSDQSPPRGRKFEPRKFRDQRHDNSDSSVSHSPMRDRRNSPYPKRDWSSSPEREKRKKDEQRKCQLCQGEHSASKCPKYMDALSRRNKVLKMELCFICLRTGHWASQCTLKGYKCNICNRAGHHISLCRSKDIPKDRRNSSSESSPVRSKINTTQDFSESEEVEKEITSVTSCVTSKTTKLSLLKCKYVTIYNPENPRQRKRILVFMDDGSQKTYISTKLAQFLGLKPIGNQRFELSGLSNVELGKFESPIYEFGLKKGNFDILMKCRALDKILKKIPVIELNQLSQEQLRKTKLKVPEVYGEPDLIIGNDYYNRLSISVLEELQSGLYINDSNIGQFLSGQGKVQFFKSLNGSQSDISSSVIHHTVNQKCGNDIQWIIGQVSDSNHEGSVEWELNGDQLSPNDLNKMIMDWNGLEHVGMSDLNSDKQNVRQRMIDKISFNGDRYQTELLWDEELAAQLPTNYDMAFRQLMSNLGRLRKTPDLLRQIHEIIMEQVETGFIEECEPLPIEERYLVGSKVHYLPHHPVVKETSEHTKVRIVYNASARCRGGLTLNQVLEKGDNDYNDLAGILIRSRIKPILLTCDIAKAFHQILIHPKDRNAMRFLWVRDPYVEDSPLMEYRFTRVTFGVICSPAHLSLTIKLHLSKYKDKKVREIERDIYVDNIILGLERAEEIQSYYSLLKEIFSKAGMNVREFVSNCTKEIEKLPSEDQVVKGGVKLLGIKWDINNDTLVIHFPVFKSEKLTRRKVLAQIAKPFNPNGFAAPAILPAKLFRQRVETNKKLKWDTSLSNEELNEWITLMKDWENQSITVPRNIIPKEMIKNSIIPSKYRTIPIL

SEQ ID NO: 142025 - protein, 65 aa, Heterodera glycines
VGNYDCVPNGTANSTLVAVYMEPLFHIRLYNMAMFAWMCAATASFAFLYWNGRRKAKRTTTAGAK

SEQ ID NO: 142026 - protein, 118 aa, Heterodera glycines
FNKNRNYAQKASQTILALPIPSTIAFIHPIMNAKIIRVPKIACDLSSLEKNGLSKNRNYAQKGSQTILALPIPSTIAFIHPIMNAKIIRVPKIACDLSLEKMVQVKIVITLKKLLKQF

SEQ ID NO: 142027 - protein, 170 aa, Heterodera glycines
LPWKEYLFVGYIFPLEFLEPMYLVSIVTPAYFSNIERLCQNARGEVLETTYIDEKRMILRWRLPLVEIIVDFFDKLKLTTSGFASFDQKDDGYRDCRLEKICIFVNDKPIDELSALCPGVNAKAKAAEIVKKLADEIPQHQFEVMVKAGTSKAVAQRTVRMKKDFTGVLK

SEQ ID NO: 142028 - protein, 192 aa, Heterodera glycines
MESFCCVCKAIYGGSHNCSVCKLPCHTFCGDSGGVENEGFGGMVVCHNCVNEGNAPIAEGSENDDYEPQNEENEGTQAKDKKRHRNNDATKKLDAVEWAQENSIHSAARKFKVDRKQIKNWMAHENKLRNQIMTPNGGKRMRLGGAGRPVQRPDIDIAMAEWITEKRKNKLPVSRNIIRRMATSLFIDTDIK

SEQ ID NO: 142029 - protein, 152 aa, Heterodera glycines
MKNLKTKLKVSPMLNKQTNAFKGPSKVRSPVEVADVEIGPFKAMLRYIYLDDLNGLNDDTLFEVLFVAKKYKVNGLIKACADFPIWKLRNVFIAYSKANSLGEKVTIIITYLSNQIFMATFECQNDILANRGYIGLSNDTNNVGFGWQRKKL

SEQ ID NO: 142030 - protein, 68 aa, Heterodera glycines
MLTSNLKILVISFFIAFILTTTQSLGQNDGDTNDGEGDEDDDNPLVKREDNVVLLNADGETDVLKQSP

SEQ ID NO: 142031 - protein, 24 aa, Heterodera glycines
CTCGVVVKLSTFHNFSPGFNSPLG

SEQ ID NO: 142032 - protein, 52 aa, Heterodera glycines
MPQSIDALKFADEMDQEEEQLIMHFFKNFTKILMPTGQPKSVLIVPTEGVRY

SEQ ID NO: 142033 - protein, 77 aa, Heterodera glycines; identical to SEQ ID NO: 137953

SEQ ID NO: 142034 - protein, 77 aa, Heterodera glycines; identical to SEQ ID NO: 137953

SEQ ID NO: 142035 - protein, 105 aa, Heterodera glycines
SLLNFEPEQFANSEFLHQFGQCQTEEQVQKLQEILKPMMLRRLKEDVEKELQPKEETIIEVQLSNIQKKYYRAVLERNFTHLMKGSTPSLISLNNTMMQLRKCCN

SEQ ID NO: 142036 - protein, 50 aa, Heterodera glycines
MAAAQMSAAQVSFWLGGASVCGATVAAQMSAAQMSANRRHKKQTRYSDSV

SEQ ID NO: 142037 - protein, 1381 aa, Heterodera glycines
MDKTLAEILEKLTQAIKQQSASTSTATQPAQNITLPDIHPFSTDNAEEFEEWLERFQFAFDCAVANMADEAKLKLLMTKLNPSAFGEYKRYCLPEEITKFDFTDTKTRLIKLFSHPPSLAIDRYKCLRVCREDGEQFEIFVNRIKAALRKFRFSELNEEEFKCLVLLTSLKSPSDAKLRQHILARLTAEGTKTTKTSKLFDKVIEDLNTQLKTEAEAKILEQPKPKINAIQHGKSSPNKHQNRGNGRPNQKFTGKSKAKIPPSNCYRCGELHWAQDCPKKENICSKCNRRGHINRQCDKIRAFHQNKGRNFNTNTVMLPAAYINSVHSSNLLKAPINVNGTTIGFILDSGAEIIIINEDDYNAMGRPPIQICSEEARFFDGKRCKFIGRGTATFQFNGIQTIQPFYVAKSGSLNLLGTPAMEAFGFLEEIRRMINPAQINQISSNDADKIQQFVEILPQKYEQIFSDGLGYCSKMKANLVLKEGANPTFKRARPVPYSTLPIINAELDRLEKMNVVTPVEHTNWSAPILVVKKANGTARLCADFSTGLNDSLQLNQHPLPLPADIFATLNGGKFFTKLDLSDAYLQIELDGTSKKLCTIATHRGHYQYERLPFGVKSAPGIFQSVMDNMFSDFPFALAYLDDVIIVSATFDQHCQHLNQIFTRISEWGFKVRMDKCSFFKNEIKYLGVIIDQSGRRPDPSKITAIAEMRIPSNVSELRSYLGMVNYYQEFVRNFRFIRQPLDELLKKDAKWDWSPKCQNAFTKIISMLQSELALTHFDPNLPIIVAADASQHGIGGVISHKFANGSIKAVSHFSRSLTPAEQNYGQIEKEALALVEAVKRFHKMIFGRKFTLLTDHQPLKKIFGNKDGVPKHSHNRLVRWSLILTAYDFEIQYVKTDKFGQADALSRLISVQKSKSDDDEVIIASFEVESALDRNLINNVNQLPITFKNLAQETANDQALQQIRQFVKNIWPEPKNFQPIEGLDEAKFIQFYRRRDEISIVKDCLMFGDRTVIPKSLQKQILKMLHQGHPGVKRMKSLARMHVYWPMMDAEIETFVQKCTSCAAVAKNPIKTTLQSWPKSDGPWKRIHIDYAGPFHGKMYLIVVDSFSKYPEIFEMNSTNAMATISKMRSLIAHYGIPETIVSDNGTQFQSHQFQNFVKSNGIEHIFTAPYMPQSNGQAERMVDTFKRAFAKIKGEGVDGNVLDTFLLTYRTTPSETLDGKCPAELFLGRKPRIGLDLLRPPLSIPIVKDNKMEDQFNRKHGAKFRSFEIGQLVFTRRHNSAEWRHGKIIDKKGVIYTVELPNNSRGRFHANQIRARQIPDEDIEDPLDVINGTFGLPIPLRDQNLAEVPPANQSPPVRRYPIRNRRPVDRLQIDPSRSSY

SEQ ID NO: 142038 - protein, 213 aa, Heterodera glycines
RRMPQSNGQAERMVDTFKRAFAKIKGEGVDGNVLDTFLLTYRTTPSETLDGKCPAELFLGRKPRIGLDLLRPPPSIPIIKDGKMEDQFNRKHGAKFRSFDIRQLVFTRRHNTADWRPGKIIDKKGVIYTVELPNSSRGRFHVNQIRARQIPDEDIEDPIDVINGTFGLPIPLRENNLEEIPPANDPPPARRYPTRNRRPVDRLQIDPSRSSYV

SEQ ID NO: 142039 - protein, 301 aa, Heterodera glycines
MANADSPILISDEDLSDDETHLRKLLLSEKQQQQLREQQFNPDRPYSSTVHSLPINHVQIMTPAQAEKLKREQQLALINQKIKEMEAAKKQIEEEESAEEEGRILKEKAWKAEEQRKRAKRELDEKVKKREEEKKAEEKAKKDKEEVKAAFKKIGMSTEVGGKEDENKPKKKKSKNNKGKDTENGNLEAEKLNEGHREAKKDAEEKANRKAEAKKDTEKKARREAEAKKDAEEKANREAEEKRDAEERANREAEAKKDAEEKANREAEEKRDAEERAKREEEGKEAAVETKETQKARQNTQ

SEQ ID NO: 142040 - protein, 395 aa, Heterodera glycines
MSSTFKSLAKTWGFEHQTTVPYHQSANGQVERYNRTIVDMLVTSTEGKNWAAALPLICFAYNSSINYQIGNSPFYVMHGFDPRLPSEVTLGKVEDHFSDMAVYVQELTKRMEEVKTTVKENLRKCADQMIKQQKWTKEIPWMEGMLVLKRRIDKRNKLEQNYDGPFRIITVEKPNLTLKEMHADAMGFTVHMDQCKPYFSKEEQILVPNEEPNSGSKRKIGDKNLEDTDEEEETEINTISMEMLTEFDDGNNLNKHGLLFWMEIILDGIVITALYPKDSFEFSSIPKSMVQSQWEIHKTKEGDEYLTAWIFDENIQLFITGEREDLIIGNGIQAWLNQNGNVICENGEATYWETYLDMDGLIYKNKITPEFWITYNEPEMCKEYESRHAPLQRFF

SEQ ID NO: 142041 - protein, 79 aa, Heterodera glycines
MAPLATTQAAAPFVAPTHSAAPPNQNQPVGAAPDGETRTAVGPVGVVEQPVLGQSAGQNVASTSEEMPSDTSSTSAVGV

SEQ ID NO: 142042 - protein, 150 aa, Heterodera glycines
MSAPFREQIRQAYEEAQDILLDQKDFPLPARQPEHTVTLYHAELRSILSELDTELKNSEEILKEVNEPYEKWMSLRTSMTGNERTQDGPLYDEFVLTVPFLSAITNLRKYIRSLRSQRAKIEQSITTDPGSNKTFPSLVHLPKTTLPTFS

SEQ ID NO: 142043 - protein, 252 aa, Heterodera glycines
RLDLDMGGGRILACSVDSSVRVWSLEGQRLRFTFTGHSEKVTTARFFNSGRSVVSGSNDRTIKVWDIVKSICQKTLFPASTVADLVSQKTLFPASTVADLVSNESASKSLISCHFDKSIRFWDASKSLISCHFDKSIRFWDFRSGDQPAKFLKLGARVTSLDITSGECSLLCSARDETLTLSLLCSARDETLTLIDLRTFATLHIYSAEQYRAEQYRTSSDFGRAVVSPSDSFVASGSADGHIFVWNLLTTR

SEQ ID NO: 142044 - protein, 87 aa, Heterodera glycines; identical to SEQ ID NO: 129152

SEQ ID NO: 142045 - protein, 75 aa, Heterodera glycines
CFSIKKEDGEKIFPYILVISFCFWWGAWNSGIMRTRPIWQVKQRLLTSQKVRCRDETNQHCLPRGTRHGPPKEWI

SEQ ID NO: 142046 - protein, 151 aa, Heterodera glycines
LKKSIFLRGGGRTLFEKAFPVSEQCSKKAHDQFLADLASILPSNNTPLIDSDAGFKVPWYKSVEKLGWYLSRVRGKVQYADVGAENWKPISNLHDMSSSQSKSLGYKSLAKSNTMSCQILLYKYRSEGRKNIHARPPPPPPAPLPGSIPAK

SEQ ID NO: 142047 - protein, 75 aa, Heterodera glycines; identical to SEQ ID NO: 132731

SEQ ID NO: 142048 - protein, 248 aa, Heterodera glycines
GGRLDEEMNFLPNAKLNYHRREKRAVSPIVAQNNRTETKAANVAELPTENTFGGGFQVVIQTPEVPGENILTREGLQRHVAILEEISKFSVEMFGEKWHLSDICFKPPPPASAKDELAQFMGDIMSQIIPCVWITPIDCFWEGSKPLGPFPEYDLGPFAQFVPFVPNGKLSWKTLNPEALLNTTRSFVDVGMVGELFERAGIGEAYQDRPCIDPLDPDCPSTAPNHFDRCAAYEHFSKWNSELPPDRR

SEQ ID NO: 142049 - protein, 106 aa, Heterodera glycines
MPSDKYERKRKKELDFDTTQELKKKRDDDDEFGNQTHRRHRSRSPKKYGNGFDLKGLKNRIIFLRSSRHKKHRDTSPGDDGERAGEAGFDTTILKGWHLAKQNAFV

SEQ ID NO: 142050 - protein, 195 aa, Heterodera glycines
PEVIFLPVHFPGHWTLIIHDVQCGTHILDSLPTPYGRLDWQLTEKIGKIISDILPSTVLTGIFNAVNLTVQHDGNSCGYFVCLYAESWLMNNRTFVLPDLSINYEKRRILWHINELYNSDNVPYHPREGVPTPCPIVYRHADEAPSTSKAAEPVEVDDHDDIMIIEPQTSGQAVVAIPTQAQVAGENQEDTRGLE

SEQ ID NO: 142051 - protein, 50 aa, Heterodera glycines
EHSAASRPHDGRFAPVFNFFGDIRPLRGLITGASRPSFNFLRTFGRLAAS

SEQ ID NO: 142052 - protein, 239 aa, Heterodera glycines
EVQQLEEVQKLEEVQQLEEVQQLEEVQQLEEIEQLEEVQQLEEVQQYEEVQEVQQYEEVQQRLEEVQQLEEVQKLEEVQQLEEIEQLKEVQKLEEVQQLEEVQQLEEVQQLEEIEQLEEVQQLEEVQQYEEVQQRLEEVQQLEEVQKLEEVQQLEEVQQLEEVQQLEEIEQLEEVQQLEEVQQQRLEEVQQLEEVQQLKELQQLEEVQQLEEVQQYEEVQQLEEIEQLEEVQQLEEVQQ

SEQ ID NO: 142053 - protein, 84 aa, Heterodera glycines
  unsure (1)..(84): unsure at all Xaa locations
KNGREAPVLRPRSGRMSPKNLKKRARRARPEVAKRPNAPQKIKKRARSARPEAAKRPNVPQKLKKRARSARPEAAKRPNIPRKX

SEQ ID NO: 142054 - protein, 66 aa, Heterodera glycines
CTLQFYCPNNLFMYNTKLDIAFFRSQLEMSADHLSTVALFTIRYEHNVSIVVRALKHGVSRMIQFR

SEQ ID NO: 142055 - protein, 28 aa, Heterodera glycines
QLSLIIYALMLEPRGLRLDADGFVHNLQ

SEQ ID NO: 142056 - protein, 43 aa, Heterodera glycines
MKGRRQLDTAAAKRLFKYADEMDGCDGQPPYFEAPRWSTNEEG

SEQ ID NO: 142057 - protein, 54 aa, Heterodera glycines
APIRAAPLAYNHRLRGHTPTQRQPLARPFILPLNDLGVATRCPMTNDDVIDRNG

SEQ ID NO: 142058 - protein, 351 aa, Heterodera glycines
MSDHPNVALADLSCVANDVWLDTLFWIDRVEVGTKFALIDARFGKLVATHFNLRKWRLGELGVHRAPSGWDRGGTAAVTVMDDNALINRLPLATYVDLEVIAFLQCLQRVINRGIAVQFTIHSTDLRCWAVMAQRIWPLISHAVLALNDMKAVNFALLRRHVSPNVLFDCANLRAITNTHMFPIRPPPSAVHINALLNPPDEFDEKPKHNLFRWLHTPRKDGRPKIVTIRKWRKPQWASFMPSLITFFNASAVPVNFLVICHIACNTNFQKMERENEETDERLTPNARVPAHAVIVRQRNGTDQRTVAKWKWEANRILDTAMHQQFGFSIFSSRMANDVWLDTLFWIDRTE

SEQ ID NO: 142059 - protein, 155 aa, Heterodera glycines
MANAMYAARARAAKAEKRQAQLRKAARARAGNARKREVVAIAWQTAEGWKERTTDHTMNDCRVNLDSIPLIIKVPSNRFLFPFCPFAFVAHNWTTDQKKIAGIFHFFQRQLFPSQFVGQIEELNGISRRRQMKLNDDNEIDGRRSIGKCLMGEIG

SEQ ID NO: 142060 - protein, 63 aa, Heterodera glycines
MFYGYGNKIAKLLMFVTNFAIFLIGVRFFVAFSPKFGTKFPDFDSEAHFVDELDKVFNWAKIG

SEQ ID NO: 142061 - protein, 132 aa, Heterodera glycines
PCCPGSQKVVSLMANYVGTFAHSFSKSSLCLDAKSVAGALKGQLIGCSKGGDATLLADIEASLANHSSDECAHSLGFVRAMFAIAASASSHASNNSEWQALSAQFGGQISEIDSKCAEFGISIAKVSFDGPK

SEQ ID NO: 142062 - protein, 141 aa, Heterodera glycines
MTFSLLPVQAIIMYESALNWTTSVHILPNDRRSSICLVELFKKWHSHYYRFKQLSFPKALSIGQQAFIFCLIDRRSSICLQLSFTKALSIGQQAFIFCLIDRRSSICLVELFKNGILIITGSSNYHLRKRSQLDNKRSYFA

SEQ ID NO: 142063 - protein, 181 aa, Heterodera glycines
INEQCSRDFREMPFKILCFPPPIYCFPPPIYFSPRSGPLEGGTVVDIVGHDLGSRLQDVQDRVQVAGVPCRVLHYELSVRILCVTERSPLPFRAPIRLTIGRSARRNAQSAEHFEFRSPQVLSAQPTFGPQSGGTRLQLIGTNLDVGRNASVYLDNLECPCSALTTDLMVIATPAKNQIKK

SEQ ID NO: 142064 - protein, 585 aa, Heterodera glycines
FLLSAPTVPSASPYELELISELGACHPLNSSALSCDSPSLALPTALLRQSSMARWMVGMAMDGVRTVRNLGPIIQVSSAEGRSEGQKKCQKMASIHLQLTTVPDPQFSPFAGLHILQAEQPLMLSGQWLSQAATPAEYSVTIGTALCPVFLLEPDRLLCRPPTVPPLPTDDSGSEMPDGRPLVVVSVSRHFRHCYFSVPCRSSFTCLLPGAGVLGLAVAGVLGLAVLLVIVIVVLVAVGLAWRRRQGEHERTYRRIQLQMEQMESQVRSECKQAFAELQTDVLAELDGVDDGAGIPFLESRESVARLLLRDFEPTINGARRSDLFEVHRQRRNIYGQFINYPFFCLTLWHSVPLPPFVSASERASLASLLLAVLSRNLAFASDVVLSLLSAHVQRCSLMHSPHLLFRHSDSLVEKLFQQWLALCLLPHLRDSEGPARSLFLLYRALKSLTEKGPVDAVTGQARYSLSEQSLGPVDAVTGQARYSLSEQSLLRESVEARPLTVIPLDGFVIPLDGFDQAPVPIRTLDCDTISQLKAKLLDTLYRNVPYSTRVGIDQFDLEWRCPRRWRCPRRGKGLLLDDDQPQRS

SEQ ID NO: 142065 - protein, 598 aa, Heterodera glycines
RTDWSLSEKSGSHNTTKSIPHSVIKVNYTFRMFAHNSYGASPASAPSASVPCATPPDVPFSNPMEVHAQGTEPDNLVIRWTPLSRNVIRWTPLSRNVWNAHGLKYLVRYRQMDDSAPTDWHEFFVEDPFANQTTIREQPTFRNQTTIREQPTFRPFLVQVRAVNSRGFSAIEPETVLGWSGEDVPLEAPRGLRLVPLEAPRGLRLVAHRNHSTVELGWEELNFSSVFSSVRGHFVGFRLDHWPLDHWPSVRPFLITSQIVPNISTVATISGLQALTNYEAKVCVLNGQYESEVCVLNGQYESEGSNLLKFTTIEGAPSKVHNLRVHSVGSRSLLATWEPPLHPNGNLRGYLAFESAIAPTEETFVLRRQLFYLHTEETFVLRRQLFYLHESLSPETPFRVAVWAETGGGEGPRTWRNTRTWPLRDPPDPPLFSIHSLSPTILRVRWFPSGNAYWRMSGSSFLLNYTKKGTSQWHQTVPIVLPQVVFDLRNLAEGTDYVLIGEAREGPKRRRASEALDIRTESSRGRPPFSNERLRSAAWFLAVLIACALTFALLAVACVVAQRNADRFLAEAQRRLSGAMDSKEREKRQKTREKGERD

SEQ ID NO: 142066 - protein, 119 aa, Heterodera glycines
NGLSKNRNYAQKASQTILALPIPSTIAFIHPNMSAKIIRVPKIACDLSLEKNGLSKNRNYAQKASQTILTLPIPSTIAFMHPIMSAKIIRVPKIACDLSLEKNGQVKIVITLKKLLKQF

SEQ ID NO: 142067 - protein, 113 aa, Heterodera glycines
ICPPRLSETQVKRFNDQNDPCKILLATDAIGMGMNLNIKRVIFTTLKSRDGSLLPAYFVKQIAGRAGRYASAYCTGEAMALDDADAGLLEKLMNEPIDSIDQAGILPSFDQIE

SEQ ID NO: 142068 - protein, 68 aa, Heterodera glycines
MHAFCARAIYHRACQSKAKQQRWCFERIKGIESVYRLLEKYICNLSTILRSELEMINFTIQTSFRCSN

SEQ ID NO: 142069 - protein, 68 aa, Heterodera glycines
MHAFCARAIHHRACQSKAKQQRWSFERIKGIESVNRLLEKYICNLSTILRSELEMINFTIQTNFRCSN

SEQ ID NO: 142070 - protein, 21 aa, Heterodera glycines
MAISFFSWGFDRKLGTNICLL

SEQ ID NO: 142071 - protein, 19 aa, Heterodera glycines
TFAFSSLALPNTHTIFEML

SEQ ID NO: 142072 - protein, 19 aa, Heterodera glycines
TFAFSSLALPNTHTIFEML

SEQ ID NO: 142073 - protein, 19 aa, Heterodera glycines
TFSFSSLALPNTHTIFEML

SEQ ID NO: 142074 - protein, 19 aa, Heterodera glycines
TFSFSSLALPNTHTIFEML

SEQ ID NO: 142075 - protein, 64 aa, Heterodera glycines
MKSPKKRQSILSLQAAARPNQFQAQVDGATFKAALLSGPPGIGKTTCALLCCKELGLAFVEMNA

SEQ ID NO: 142076 - protein, 108 aa, Heterodera glycines
MLCSVDFYEFFVFRYAFPSVFGWCASAALSSRLLINWTNFWTCFNFRADYTIVPLVTLVLSIVLACSSVFEIFFMNSVLKKKCPVCAYASTDDYDDDDDYLVTECAID

SEQ ID NO: 142077 - protein, 353 aa, Heterodera glycines
WRAVPLLLVDCGASILWFFFDRVKKRRRPPKKEIFICADCWLLVFDFLAPSQLGLEIALISRRFDFYVDEHFKTRKWMLNKQLLITWKIVGNGPKQMQIDDADGNPLPIPRNPLPNKVIGFRRIQIIYIDQNVIEFLHRFHRLFGTCATALDITTENVRILDYFLLHIWPMFRASMHLMILNTIFFRRLRQLAPSSLSDCPSLRVVWLDDGTFPEFPPDDSAMASDGQAVAKWVLTPRPDGQPKLLKSPVNSPDQWSSTIEQFKAAFSNASSPVSFSINFLPSSPLNSAVPFDRINEATGEQLTLEQYDTNNFWLDRCPIGWDDKKWDNVWKELGAARTNSIDIQIEDGGYDD

SEQ ID NO: 142078 - protein, 121 aa, Heterodera glycines
YTKIVVAIWPLPQLFKTPNQIVGPFIACLVIIVRLNNAHHVEFALHRLKVVHGHPRPHYRFHDIFRVLSPHTVRLITVAKGVAVSSARPIVSDVNDALISSVHVFAARRAFVQHFQRTVTV

SEQ ID NO: 142079 - protein, 32 aa, Heterodera glycines
WSASIGSLKSKQKYHQSINPIHHSSKRSVIIS

SEQ ID NO: 142080 - protein, 21 aa, Heterodera glycines
MLCEILERDELQIPEEIQCGM

SEQ ID NO: 142081 - protein, 31 aa, Heterodera glycines; identical to SEQ ID NO: 126976

SEQ ID NO: 142082 - protein, 68 aa, Heterodera glycines
MHAFCARAIYHRACQSKAKQQRCCFERIKGIESVNRLLEKYICNLSTILRSELEMINFTIQTNFRCSN

SEQ ID NO: 142083 - protein, 84 aa, Heterodera glycines
MKIIAEARDGTGAHCFDNVDQTMAVFAFKLRLANSVHTTAHSLRLFVFKEGTIPMEDNRILGYYITSDRHLFYQRVQGQQNNPN

SEQ ID NO: 142084 - protein, 22 aa, Heterodera glycines
VRLGYSNNYGEQKSNAELKYRL

SEQ ID NO: 142085 - protein, 30 aa, Heterodera glycines
MSEKFRQDMPPQGGYPSFHVHRTLPKSFLS

SEQ ID NO: 142086 - protein, 49 aa, Heterodera glycines
MAILNYYPPSSNRCGTELNSSNELNQGFQQLLQVHLSLFKMKMASCFKK

SEQ ID NO: 142087 - protein, 58 aa, Heterodera glycines
MPRYCLFGDSVNTASRMESNGKAGKIHISSSSNRFLTTVIGGYVTEPRGEVIIKGKSF

SEQ ID NO: 142088 - protein, 304 aa, Heterodera glycines
MPCPRLVCPADRVRVLCVPQAAQLAHFVRAVREDSKASGGGGRSDLEVPARRKGIAQCLATDHPDFGGRAPNSPQSKYIVVYKNPSQQVDKNNGTTKGAQRWKVMATEGGEEEKPTRLEVPASERDWLQLQPHYRPNSFSKAANQFPAELQKHVDDHSAKGLIEIGRQWRQRCLQAIFSAIDECKQSPNSRRAKRSISLNGAGIPLNPGGRTGMAGRGKFARFGPNRMLIYALIRRIVDEEEEENDCRKEDEDDNCEQNGAEEIQRLLKPSPAIAGRRRIFVAISSAVGAGAAPICGEGVENVP

SEQ ID NO: 142089 - protein, 206 aa, Heterodera glycines
MGDDGEINHRQPQKITAVGAGKGPPVWKIPKKSTSKKGSDGAGKPSRESHNNRESHNNQQSDSAAKGGYNGLNIDGLFEEIEQQKNQRTINENGGNRKEHNEVADTDSGNNGVQWEMQSELCSANGRDDLVRSPSLAPQSSPNKLQTSKGIPKQECDDEKSQGFFGSHKSSTLGLALYKAEKEGRELRSRHLRSGQSPQNVPNSSV

SEQ ID NO: 142090 - protein, 47 aa, Heterodera glycines
AVGAGKGPPVWKIPKKSTSKKGSDGAGKPSRESHNNRESHNNQQSDS

SEQ ID NO: 142091 - protein, 77 aa, Heterodera glycines
MRFVLSLALLALFVVQCSADDSSPSSEAADENPSAAHAAAEPSAAGDGVPPPPPSAEGAAAERKKRSGGKVAPALIL

SEQ ID NO: 142092 - protein, 130 aa, Heterodera glycines
KSELRSTSFSNNFSASNSFYNRLYTSHYSAKIIKVPKIACDLSLEKNGLSKNRNYAQKASPTILALPIPSTIAFIHPIMSAKIIRVPKIACDLSLEKNGLSNNRNYAPKSFSNNFSASNSFYNRLYTSPL

SEQ ID NO: 142093 - protein, 70 aa, Heterodera glycines
MSAHQKEEEDKNENIVANKNDNFEKKRSAKAQKTPKAKARLVLRGGQGRIGHVPDGSAKIWRQTEGWLCA

SEQ ID NO: 142094 - protein, 129 aa, Heterodera glycines
LAALTFIQSNRNLWSPDEGEMGEGDLPLEEELADWVQAETSDGQFYYWHIYTGETRWEQPEKFYTSAQYAERYANIVEETTDQREVGQCANSAYDLTQSSVLKKVLQIRTEELRRICPSPAQVRLLVLN

SEQ ID NO: 142095 - protein, 127 aa, Heterodera glycines; identical to SEQ ID NO: 133730

SEQ ID NO: 142096 - protein, 170 aa, Heterodera glycines
MMIILSTKLITLSVLLLPILLGIANAAGIGDRQKRAVEEEGRKSVSELCAIHEQKFKELFEVERGSAEKEEVLWMEKIENKADKEEEKEKQKEKEKREEKAAEERMDAKNEAWLSTLLGNYLCQKLRGKGGEQNDEKLDYAIEKNVWTTPATVDPLLACKISKSCFSKHF

SEQ ID NO: 142097 - protein, 75 aa, Heterodera glycines
MLCCTALSIQAIRCIFNPDPESGLRVGVRGWKRRGSGFSPKMAKNVGVGDATLDKSDKKCSRVTRGQAVISGMNE

SEQ ID NO: 142098 - protein, 135 aa, Heterodera glycines
MNTADTVLHEIFRINQSYTEFDLLQQPISCIIATYSTPVGTGFNPLDYCEIKELGRICVKNMDNFCLFYALVLSRFYQLINKNDEEKISMDQFRKIIKNEQRQSEAVKKLIIDAKINMNEKTYGLNHLQIVQDFW

SEQ ID NO: 142099 - protein, 75 aa, Heterodera glycines
MASEEIDEKSNEKKYTLKQIELNGGSIGGYGTPQPLTALHRRMLSNVGIDNSISVMPENLTSEMLATAMYRAWSV

SEQ ID NO: 142100 - protein, 71 aa, Heterodera glycines
ILFVHPKIRIFLLVEARAIQYAMERIFEGKPKPKCVFLTLEEGIDRLKLNSDNFLILDGKFTVAVSMARNA

SEQ ID NO: 142101 - protein, 41 aa, Heterodera glycines
MPYAINYGTLITRDGKFREIFFREIFKFIKHGNVYKNVLDT

SEQ ID NO: 142102 - protein, 54 aa, Heterodera glycines
HYTSLILPHASHFSLLLGTGKVSPLVSAQSFASRIRSIKTFSSLSMFSTQYFTS

SEQ ID NO: 142103 - protein, 104 aa, Heterodera glycines
NGLSKNRNYAQKASQTILALPIPSTIAFIHPIMSAKIIRVPKIACDLSLEKNGLSKNRNYAQKASQTILALPIPSTIAFIHPIMSAKIIRVPKIACDLSLEKMV

SEQ ID NO: 142104 - protein, 99 aa, Heterodera glycines
HPEVHSLQRIQSNWVPLIRLKLINFDHEIDIVFASIPGEQQIDADDLRQQNILTKFEEMIEKLDNKIKQLKEEEDRNDQASLTNAKEQILKSLRSLAGN

SEQ ID NO: 142105 - protein, 71 aa, Heterodera glycines
MTKKNNNFHKLLLLLKLWAKSNYIYNNAMGFFNGTSLGVLAAKIVLLYPEATVPFLLERFFFTYYSWSNFN

SEQ ID NO: 142106 - protein, 90 aa, Heterodera glycines
MARAFACTRVISVKLRVLRVQVARLTCSPVRKSCSSSNSSKRVRSPCPHQQQMTRHPNGKESADMVVRFNPAKNVLAELFIKVFAGFSME

SEQ ID NO: 142107 - protein, 249 aa, Heterodera glycines
KANAEAKAKKDAEEKAQKDAEAKAKKDAEEKAQKDAEAKAKKDAEEKANAEAKAKKDAEEKAKKDAEAKAKKDAEAKKKDEEMKKQKAKPEEKPEAPAEAVAVVPEAKKAEETKEKLKQEEKPVKVPPSPAEKKRKDAEEKAKKDAEAKAKKDAEEKAQKDAEAKAKKDAEEKAQKDAEAKAKKDAEEKANAEAKAKKDAEEKAKKDAEAKAKTDTEEKAQNDAEAKAKKDAEENANAEAKPRKTQKRR

SEQ ID NO: 142108 - protein, 51 aa, Heterodera glycines
MGRRRRFDGSGITKFWAILTESSLGWMVSSALGIVSVRREAGQSIEMGGAF

SEQ ID NO: 142109 - protein, 81 aa, Heterodera glycines
MAALRRAPISSCLPFLILIINFPPTIQAWQLKRAEDNLLLAYDPIAENYVGNQQCCSRVSGPDLRKDSGFIGLGLESRKDS

SEQ ID NO: 142110 - protein, 21 aa, Heterodera glycines
MAKYGLQQSRKKYGFPYYYKP

SEQ ID NO: 142111 - protein, 360 aa, Heterodera glycines
MNTTAPTDIDLFLFFLGGAVELLTNFVGIPLSIANLILVARTSVIHPNMKAILIFQSLFIILRGSCRFVICLFKFFLWDPIGAESTLFFPALLKMYFIGIYARNFVPHVLVVERILSTLFVRTYEKNRGNLFSILWMPFALIIPIYIATTTSSPHDHNQPITNLITTAVQLLVGSIVLGIFYQLSRYNSKIYQKMFQNIGSNNLSIRYQLSENIRIGKQLIPPLFLNLGNIFAGTMILLWDFLDLPFYIYIFNLAAIINSIFGLLIEFFIITCHPFLNRDLCQFLNRIGKMFGFNHLAYNHRIGDATVTFGTNNTAPSLAAVNGIAQRNLISGKALIDNQTKPEDHFAMLKEAWEKGPMK

SEQ ID NO: 142112 - protein, 189 aa, Heterodera glycines
MDKLGRLVQMCATFPHVTFFWLPPPFVRDRQFEHETLIGKMRDFFGQKKNIQFVATTATGRSLLEIWRYGNGYNTDHVSPEGVMKEKGLNMLKAWLLTQVKEFPGDQELGIEKKKPESGEKGKGAGTAADRQHGRTEPPPFRRDGPVFRRSNSRPFVQHPYSRTAVDRHPFRPFRTPNLPNPNRRHFDR

SEQ ID NO: 142113 - protein, 59 aa, Heterodera glycines
VTSPSTTGSTGSTMTTTTTTTTTTTSSTPTTPNGTTTKNWSESLAAAVGGKTTLVLIIV

SEQ ID NO: 142114 - protein, 63 aa, Heterodera glycines
VLGSGWAGCRLMKGLDTQIYDVVCVSPRNHMVFTPLLASTCVGTLEFRTVAEPIARIQPAISR

SEQ ID NO: 142115 - protein, 375 aa, Heterodera glycines
RISFYMTNFGEEASHMGSAAALELRDLVYGQYREVGVLLEASHMGSAAALELRDLVYGQYREVGVLLWRGFSLDQCMNQCYGNELDEGKGKQMPVHYGSSPLNFVTISSPLGTQLPQAVGTAYAFKLANAQRSADEKRVVCVYFGEGAASEGDAHAAFNFAAALRCPVRCPVLFFCRNNGFAISTPASEQYAGDGIAGKGIGYGMHTIRVDGNDPFAVYKVTSEARKLALENNPVMIEAMTYRVGHHSTSDDSSAYRPMEEVKEWAELDPPIGRPMEEVKEWAELDPPIGRFRRFLERRQWWDEKVTIPNPLEVRREVMNSFAKAEKLKKRAPEELFVDVYAEIPKHLKDQQAQLREHLSEFGSEYSQMEHFQKS

SEQ ID NO: 142116 - protein, 89 aa, Heterodera glycines
MAWTWIQEKSRPGSRSRSNSNKKYWKTRMAQVKFTEKLEFRSSANEVPMPIYQCINSRGEFVDGSEECPLPKVLIRKSPTEFSVSGHCS

SEQ ID NO: 142117 - protein, 56 aa, Heterodera glycines
MGCIKAIVEGIGSAKIVGGAFGALRSHAIFGTLIILAFIMGCIKAIVEGIGSAKIV

SEQ ID NO: 142118 - protein, 146 aa, Heterodera glycines
NGVSKNRNYAQKASQPILALPIPSTIAFIHPIMNAKLIRVPKIACDLSLEKNGVSKNRNYAQKAPQTILALPIPSTIAFIHPIMNAKIIRVPKIACDLSLAKNGLSKNRNYAQKASQTILALPIPSTIAFIHPIMNAKIIRVPKIA

SEQ ID NO: 142119 - protein, 134 aa, Heterodera glycines
MGEALKNRIEQIPEEEKTKGKTRGEILKEKIGASKPIEEEIERRKFSIDFNDQRIDFIELSAQLGYILGFEDPTKILSGAIAKYYCDLKGGIDSLCVYINGITENVIVGDQLASLLRIVVVEGKFGDVIESKGN

SEQ ID NO: 142120 - protein, 57 aa, Heterodera glycines
MEYLNKTNERLKATAYYYRHSKTALDEVQKRIAVMEVIVGLLIFLIFTSPFAYYFSF

SEQ ID NO: 142121 - protein, 244 aa, Heterodera glycines
KREVVSLHIGQAGVQIGNACWELYCGVQIGNACWELYCLEHGINSEGRFVDSEEGPADNSVDTFFAETRINKYVPRALFIDLESKYVPRALFIDLESTVIDEVRGGAYRQLFHPEQLIEVRGGAYRQLFHPEQLITGKEDAANNYARGHYTVGKELIGVCMDRIRKVAENCSGLQGFLLFVAENCSGLQGFLLFHSFGGGTGSGFSALLAECLTVEYGSGFSALLAECLTVEYGKKAKWNFPYP

SEQ ID NO: 142122 - protein, 123 aa, Heterodera glycines
MKQTVGLSQFGTALRVSPDRKCNGGASPQEPCLGDRRNSPASIASQPAAKLQAVQQQQHPPHQQRHCDNTPTTPATSATSFMAMSSATPGTRNCSNGTSQCSMSMAGSTAAAMGAPVMTITYR

SEQ ID NO: 142123 - protein, 163 aa, Heterodera glycines
MALSPPNLPIELLRLLLLLLFVFTSTAQILSPNDLDGLERSIDDFKVFLAEQDRMSAFLSKKPKAHLLLFHFVPFARQHQFIGLLDEQGDEALHSVWRRLEQWWKCMPDAEQILQQLEHHFVNNWLLDTGRIDELKRNYEERKGEDDTDEEAAEEIDYECQID

SEQ ID NO: 142124 - protein, 126 aa, Heterodera glycines
SVFCSKSTALTSRWTARTFNGQPFTTTTAHFLAMGLVTVYGLGVRTLRRRTCSNRTTCDQRELSPGADPNNKCQIYCCNNANSVVTVHHRLLVLFRFGDLLIGALIRTNSFLRWPFLSHSLPVGTE

SEQ ID NO: 142125 - protein, 132 aa, Heterodera glycines
MCENFFDACAPHAWACLTHEHMQYAMMRGAARGAEKRHGGDSVQRQMAEQHQQRESGQEGECGGGKEAECRAFALQLVHKLDALAYKTAEGQTTEAAECDEDACDAAGAEASVTPERMCAWMQFASAYSGLT

SEQ ID NO: 142126 - protein, 108 aa, Heterodera glycines
TQVLCKGRQKIGLVYFLLLSKKADAECFSFSKIDPNSCDVLPFHCVALNPSIANMESVKNRHVAAVVIASRRCLYLLFANLTKNYFAIVGINCSAANFSDPVTNKCRF

SEQ ID NO: 142127 - protein, 119 aa, Heterodera glycines
NGVSKNRNYAQKASQTILALPIPSTIAFIHPIMSAKIIRVPKIACDLSLEKNGVSKNRNYAQKASQTILALPIPSTIAFIHPIMSAKIIRVPKIACDLSLEKNGQVKIVITLKKLLKQF

SEQ ID NO: 142128 - protein, 100 aa, Heterodera glycines
MTEYVNYDEMHKAMEKSYGKLCERNYIDFSELPGWSRPVINRYPRFSVMPVFDPQFTVSVFGAKKPGFGSMKLLEVHRDPRSRFTVPIHGYSVKNLHWIN

SEQ ID NO: 142129 - protein, 261 aa, Heterodera glycines
DHLLQMSESSPLSPPAEAAHPIAPGTLFQPISVAGGNNRNSTGSTNSSQASSGFESAKVGPMNANGHTLIDVPLPDSEFQFAPFGNFDQFRQLFIRHRFVDRCSCPPPLFRLSPQRFARSSRQRFLPPLFRWLFNSLSFFRLLFHLRWVGFVNWPWRDFDSPKKDKRKMPPSKYHRNDGQGHTGNIQPKAVKFIMGLKKEAEIYAEWLQRLCLSEYLALFLGQGYDLPTLARSSPEDLTTLGITRPEDRKRLFQDIQTWRN

SEQ ID NO: 142130 - protein, 86 aa, Heterodera glycines
MALWLSCCCAIITFFTMAPLILQWHHCEAAYDQEIFDTIQMIHICQFIHDHIAEEGEVENIAVITCGKEIEPMAKLLRNQTEKYLI

SEQ ID NO: 142131 - protein, 151 aa, Heterodera glycines
MSGSYFVLAEFILAIIFHSVAIVQIFLLLRSNVRKNISLFFMALLINWLCAALLLLPYEIHAIIIWHPTEGVLYDGATLFFIALSAHLLLSTIPMSVFFMTIDRICIICFEHNYGSQIKRVLKRCFLSALAVGILFNFIGMLSAMPVPTNT

SEQ ID NO: 142132 - protein, 82 aa, Heterodera glycines
MNGEDDGARDAEGSAGMVEIEHPDDEKLPPLVKIQGLFDALSTNITSISTNFEPGPEYEQKVENSIFRFRTFILKLIKTSRK

SEQ ID NO: 142133 - protein, 128 aa, Heterodera glycines
AHSAHCCPAGFACAREEERCVSEQNGISLSTQMFPTHHATKRRFHGTKMPTECPDGTFCGSSTDICCAHSLPTNEGEQTTTFGCCPLSKGICCKESQKCCPMGYKCSAEGCERMEVRERIVRLFLDKN

SEQ ID NO: 142134 - protein, 70 aa, Heterodera glycines
TEVRSVLPVPTCCPLGDGFGRRRKDFWRLETNAQQSISYGCCPAERAVCCADHVHCCPHGTQCNARGGEC

SEQ ID NO: 142135 - protein, 223 aa, Heterodera glycines
GLSVLLKRDGGADEDDEVVNTQPRPPAPPPPPPPPPHHPSQQHHRRPPSLPDQQSSSSDDSHPPRPPRPPRPQRTKKNHQSSLKHGRLNQWQQRRRDLQQQQPVVRDLLAEAAAAPLPESDDEQMLEGGYLLPTPSQNYGDIPVLPDYADEIEEMDTAQQRLASRRKLKEEQRLDKNKKYKIYYSPPPSPTLPPVYKRPDHPPPPPPPRSIPKVELKRDPQPT

SEQ ID NO: 142136 - protein, 103 aa, Heterodera glycines
LCAYPVEKNTIRPRDLRRVLGNSLWELNHPEDALYEYEKADEQPGDEEEEGEEAEEEEAEEDDGGAAEGSGEGEEEGEEEEEEPEEEPENGQRFDYVFKKKTF

SEQ ID NO: 142137 - protein, 34 aa, Heterodera glycines
MKIENDNEKCRFCRSVFENFKKANPEREWLSSLR

SEQ ID NO: 142138 - protein, 75 aa, Heterodera glycines
MIGRAVRNRPFIFEGIFKFILYPRKMSISFFEKFYTSQKRLRMRRRAVHNRHFISQKDFIFYRLSQKNGYLLFLI

SEQ ID NO: 142139 - protein, 92 aa, Heterodera glycines; identical to SEQ ID NO: 125147

SEQ ID NO: 142140 - protein, 69 aa, Heterodera glycines
  unsure (1)..(69): unsure at all Xaa locations
EILYLTKALEYETEGCAQSXILFHRGFLYLDVIPEKWLSLFLINFIHIQMLSSMIGRAVRNRPFIFEGI

SEQ ID NO: 142141 - protein, 201 aa, Heterodera glycines
MGLCKCPKRKVTNLFCFEHRVNVCEFCLLSNHESCVVQTYLSWLTDSDYCVVQTYLSWLTDSDYDANCLLCFESLSSKETLRLRCLHLFHWSLSSKETLRLRCLHLFHWDCFDSRARQLPQTTAPAGYKCPYKCPSCLECIFPSENQSSPVVDKLRAKLQTVNWGRFGLGLPSVCLIHTYFNYSGTPAPPPPPLRHLPSPH

SEQ ID NO: 142142 - protein, 274 aa, Heterodera glycines
MTFITRQTEEPMRTAKGEKGQWHGQQKPRRTFDTEARRTLDTEARRTLDTEARRTFDTEARRTLDTEARRTLDTEARRTLDTEARRTLDTEARRTLDTEARRTLDTAMQIIAAISKSLPPTPPESARKIRHPTQSPLKGHFQVGHSTTIPKPFRLASRSPVPCRFAKRHLEAMLEERRRKEEAERRREPFRAKPVPQSTYRADSDIRIGQLKRKRTLSLPDKAKQQNVPMRGQSVPLSTYIRPNSAMEETRKLRRQRRAVEELAKATGPRGMEV

SEQ ID NO: 142143 - protein, 147 aa, Heterodera glycines
MCGKAVEVGRENRADYALVAKAYARMANSYKMKDDPKKALHFYEKALSEHRDPDIVKKHKELAKEVKEMEQKAYIDPELSDKEKNLGNQLFKKGKQWEKGRKHWEGNQSEIGNGKSMDNLALCLYHFIPFKFLRRLPRGYETLQRGD

SEQ ID NO: 142144 - protein, 22 aa, Heterodera glycines
KNFDFFPEIEKFFGLSGTFESR

SEQ ID NO: 142145 - protein, 66 aa, Heterodera glycines
MHFNFNHQKLLKFDVRPHWAKYYLMKPCQFLPNYPRLEEFRQLAEAMDPAHKFRNKFIKENVFNEI

SEQ ID NO: 142146 - protein, 210 aa, Heterodera glycines
MLPIKFCFFKLFLYWQFTLILSQQISSKKECREFEQNLLVLFGGNKAFSGAIEFEPLEKWTKECFADWFCEKIKTKFEKSAQINGEIEEKMSKMQAKFCEENEKGKSIEKAMKSVEKETEEIIQNMKIDQKMQEKMRKIMEDGINKNALIGEKLKKIMDHFKIQSFSDLINGKSISFGFINLQIQGYFKFCSVKRKKSNAVIDKAQKKNP

SEQ ID NO: 142147 - protein, 33 aa, Heterodera glycines
MKGRGKRRERTAPPITQTLFVIIVLSRSTKKTQ

SEQ ID NO: 142148 - protein, 96 aa, Heterodera glycines
IMFVLHWSTSLVTFFVFIVLFVFIKHNKSHINWGTSTEANRYRRALNSLLKISRTEDHVKNYRPQLLVLSGNPVARQALVDFAYCISNGRSLLLCG

SEQ ID NO: 142149 - protein, 335 aa, Heterodera glycines
DGMFRYGILTIAALCLTSISSNMIAFNFTQIVMRRTNWENASFSHVVPPTVPYSSREKSALLYAVGAASIVSTFPFSALYTRFGARFVFFGAGVASAVATALLPLAAARGMTAFLLVRFVQGFAYGANFAAIGFICHRWAGFAYGANFAAIGFICHRWANLRQHGLFLSCMTSFTPLSQTLTNTSCMTSFTPLSQTLTNTVAGFVSSPSFGWPSVYFGHASSPSFGWPSVYFGHAMVAPFLFGLWLFLYTDFPETHKCVGRREKAAISEGKSSAERAISGKVPYWSILQNKVVLVVWLNSFADIVTIVFMTTYMPIYVSKVLPYGVRETGIWSAL

SEQ ID NO: 142150 - protein, 189 aa, Heterodera glycines
MGGGDLDEADEEKGGHAAGGSQRQKCGGHGTGDAGAEEHETSAEARVQGTERKSADDAGRADSVKQRRLFPRRIGHRRRHHVAAVQHEPGQHVLLTTEWRLIRPMANLGYHIRKSKMDEFLGKDAFSQLVLLITIWVKLNAIILDEIDVRQSAAIVRMPYLNIPSRQQHTLVELSLSFSAFSRLLPPIE

SEQ ID NO: 142151 - protein, 153 aa, Heterodera glycines
MHFAQIEKFGNVMLVQGDDPAYFLAAHSCDIVFVDREMPYRTAHLLFRRGSPFTALFNKVILGSVIESEKVAIRRSYDRYRMLREMIRNQECEEKMAKSHLYKPLGFVPMFGLLAMCGISSGTALLIFAIECAIGSRKSKEISDEIEEERFRK

SEQ ID NO: 142152 - protein, 129 aa, Heterodera glycines
GTAFSAPLPTGEGTVDTGCLFYQKSPPRMADFDYSLPIYSTLSRIAIRDHNSFPLAEIWRLFHPFSVDTWLAIVLFIALHSFVFMVIEKIEFLVNRRTVAQMPIFHNILWRLLRLQLLQPKSVRLATVS

SEQ ID NO: 142153 - protein, 105 aa, Heterodera glycines
MPTLLTKLCALILICQITLLASTNPLEEAPQKSLAKKRLKILVYSPTIGWSHMQFMGSIADTLVGAGHDLVNQMINQKLMNYKIWGTHFSRFNEQKGRGIAQGSV

SEQ ID NO: 142154 - protein, 27 aa, Heterodera glycines
MNVERIKMNSNKIFFNRNSNYRTQTCD

SEQ ID NO: 142155 - protein, 95 aa, Heterodera glycines
MFEYPKRTLEKIDFFVFGAVPPNRCAQIYGETESFGNSFPIVCTLILRWIFAPHKCLSTPNGHLKKSIFLFSGQSPRTDAPRFMGRPNPSGVASL

SEQ ID NO: 142156 - protein, 46 aa, Heterodera glycines
MRLFFILTAVQTIDTIQVRSANTNNNMNNIRSSQQMNVHSINLNRY

SEQ ID NO: 142157 - protein, 64 aa, Heterodera glycines
KNRFIFVFGAVPPNRCAQIYGETESFGNSFPIACTLILRWIFAPHNWLSTPNGHLKKSIFLFSG

SEQ ID NO: 142158 - protein, 75 aa, Heterodera glycines; identical to SEQ ID NO: 138893

SEQ ID NO: 142159 - protein, 104 aa, Heterodera glycines
MADRRTIERFLRPPPPPQPQQQQPKTFLVKTLKTVLKIREKLGKNFQNIDCLDLGNLISSENLKNFLLPTAATTGISKMLVLVNVCKQNDQQKWECEEQLHFIF

SEQ ID NO: 142160 - protein, 33 aa, Heterodera glycines
AASRPRTGASRPFFKFCWAYTGASRPFLNLLGY

SEQ ID NO: 142161 - protein, 80 aa, Heterodera glycines
MCIPPIIYLALNKTVRRDVYIMMMKPLSKLFYCCIKAPADPSTTRLFNTVTVRRMAAGGKVVPASSNVHTAKISNSNMKY

SEQ ID NO: 142162 - protein, 123 aa, Heterodera glycines
MHDSTIENLHRTNNAIEGWHLAFRQRFAGLHPPFSKYCSTKLRKKAKPQMSGRKCPILAWAAKFSKKLGRKCPKMALKKWAANVRAANVRAANVGPQMSDLAGAANVRAANVRAANVRDAKVG

SEQ ID NO: 142163 - protein, 48 aa, Heterodera glycines
MRKKWNSTFTINLSEKIGTVKNITLFIFSSVFEIKIYGPDLLQTFESR

SEQ ID NO: 142164 - protein, 77 aa, Heterodera glycines
MSSVGPFVTFAQFHSSLLVLLPTPKRCLSNIPMQMVHCFDDRFDVAIHWLIKKPSVKRRQNIFNAKRMRRILQIRDF

SEQ ID NO: 142165 - protein, 35 aa, Heterodera glycines
MPDRTGLVFSKMTGFGIRSLIIRSIRNLVHQKMSS

SEQ ID NO: 142166 - protein, 75 aa, Heterodera glycines
MKKQTLLMRNQIEQVYAERDILTFTDNSAGTLPIELARLYVAETVLAIEYLHSCGIVHRDLKPDNLLITSMGHIN

SEQ ID NO: 142167 - protein, 68 aa, Heterodera glycines
AVLVRFITAPNLLASQQSLLNLPDRTGAHDSTVPSTPPKAKRYNQNIRKNFLKNFFSIFLFDKRASEC

SEQ ID NO: 142168 - protein, 39 aa, Heterodera glycines
MRRIISWSSFKCEFRRQKVTGKSIATYDFEEAEAESYLC

SEQ ID NO: 142169 - protein, 648 aa, Heterodera glycines
MTNRLFAHFSEPLLYYSRFIKKMRELRAPLDQLFGKDELWNWADASKDGIGATISHIFPDKTEKVIEHASSVLSEAQRNYSQVEKEALALIFAVQKFHRMIFGRKFTLLTDHKPLISIFGSKKGIPIYAASRLQRWALILSNYEFDIRYINTTAFGQVDMLSRLIANYPRPEEDILIAKICTETECFIGTILQSRIDQLPVTATEIAEMTQKDEILQKVAKFSKEGWSQKCNDPDLAPFFPKRNEILQIENCLLYQNRVIIPTVLRDRTLKALHMAHPGIVRMKALARQHVYWPGMDSAIEKLVKSCEECQIAQKAAPKTLLSPWNATKRPFQRVHIDFAGPCQDGHVYLLLLDSFSKWPEVYQMNTMTSKATISVLRLIIHRLGIPEEIVSDNGRQFRSSEFSEFCKEFGIRHTFTPPFHPQSNGQVERFVDTFKRAMQKCSKKDKNWAEKMLLSYRTTPNSAINGHSPDQLFFGRKLRTQLSLTHPTGKVNETIDKTIFHQKQEKYRTKMAQNFNEKHGVKSNEFLPTDPVLVLNYQHGKSHWLQGTIIERLNNSPTYRVNVPRLGRNIHRHANQMRRRYVFEESLGFVGPAQFIFNKAIGSPSYFSDESYSFMVLSPEVYSPNVASKLSNSIFLILFLEREAYLI

SEQ ID NO: 142170 - protein, 45 aa, Heterodera glycines
MDEIARLIKGNVSRKLKNANDKRFCTSGHRFGHIRTFFNPKGHET

SEQ ID NO: 142171 - protein, 61 aa, Heterodera glycines
MGSRRIGEMVFLGKKGKCSSAVDYVQARYIAQLVGAADLEQTRFLSFTEIYQHLGPPMEED

SEQ ID NO: 142172 - protein, 92 aa, Heterodera glycines; identical to SEQ ID NO: 127421

SEQ ID NO: 142173 - protein, 75 aa, Heterodera glycines; identical to SEQ ID NO: 138893

SEQ ID NO: 142174 - protein, 182 aa, Heterodera glycines
SGCLSGGHHPHSQHQGHENNAHAERHTAKSERNRRPVHRGQQLFSRFSVFVQHGPCGTVIRVFSIPDGERLYEFTRGVTRYAQINSLAFSQDSRFLCLSSNTETVHLFALLTPFEQQQAYHHHSHHHQCQKSDETSQEGLSSWVSYLSQQASAYLPQHVNELMLREKKTAPARLPILGTLSR

SEQ ID NO: 142175 - protein, 56 aa, Heterodera glycines
MDEEETLKLIDYDGATFIPVGLFENPRKLANKVVPREFYVATPTYVAIEYYEEDIM

SEQ ID NO: 142176 - protein, 204 aa, Heterodera glycines
MIKRGTKMIRRGTNLIRRGTNLIRRGITVIKSGTKVIQRGISVIKKRTKVIRRGAKVIRRGTKVIQKRTKVIQRGTTVIKRGTAVIKRCTAVIKRGTAVIKRGTTVIKRGTIVIKRGTAVIKRCTAVIKRGTAVIKRGTAVIKRGRTVIRRGTKVIKRGTIVIKRGRTVIRRGTTVIRSGTTLLGENRVMNFFLKNRKFPEILE

SEQ ID NO: 142177 - protein, 75 aa, Heterodera glycines; identical to SEQ ID NO: 124542

SEQ ID NO: 142178 - protein, 187 aa, Heterodera glycines
MDIYRELLKLKKCVQSFWLDLRKDSVIWRMRNYMLFQHSWTLGEQLSINGSERITSEHVETVSLFVVPPPPKQRRTLLDSLSEMASTSKSFVQIESTFDDELKKYCSVDLIGQELDPLDWWKINEGLFPIIAALAKRYISAPATTIGSEQLFSVARDVFDYRRSKLKAEHAEMLIFLNKSIPKIRFY

SEQ ID NO: 142179 - protein, 153 aa, Heterodera glycines
ASHGQKPPFHATARLTRPLEPILFPKLRIFADFPYLHYSRLEAVHLGDLLRISVRSGRRFKLPSHFQGPCGAHETPQEPRCFTGATSLSQAEPLPGTHTLNEKRTLARTPHDVCEFICVTAQNSSCEPSFLAWRGNEPTSLSATGWTNCASTE

SEQ ID NO: 142180 - protein, 41 aa, Heterodera glycines
DNYVMKPSREGGGNNFWGDEIPKKLREMSRAELSGHILMQK

SEQ ID NO: 142181 - protein, 116 aa, Heterodera glycines
KKFDDKDAIILIVAGKLYRNYEQYQLNYLMENVSKNKIKIVQMSLTEAAEELTQGNDHSLLYGTQKVAIAFYRSISSLRDERIFNARLMIERSTAIKIPTVANALASQKKIQQVIL

SEQ ID NO: 142182 - protein, 53 aa, Heterodera glycines
MTAMPYYEEMAKVCRKRCHLCDKAMPLNKRIAKKVADRAKRINDGLSDEEMNE

SEQ ID NO: 142183 - protein, 677 aa, Heterodera glycines
MANGFNYGDYDGEITLDFEFARPLDIDEEEGKEDENTEEENSKKEEKEEDEKVGKTESSDRQADSVENSEAKKETKTVQMKKMVKKLTKQQTEKEEKLIQYLCEVRQCDSQKTEECWMKLFDALTALDDEDRYDNMRQYCSANKSWIRYCSNMAMCDDIDKVIVFKKKTEEDEVIIEEDEEEKEDDNEKEKAQIKEREEAKGKEKKTKQGKSSDKKPMQNEVSSEKIAKPKKSSTKPPSAAGVKKKPNKEVPPINLMDEPYVGQPQALQYSVSNIGYGNQIQEPYTTQRNDSLMYTTGSPMLPHSMSSIGPSMTLSDSVYPTPTNNITPYQTVPSVQQQHQHQIQYPPTQQYSMSFNGVPSPQYQTYTSFSMPPNSSQYRDIGLPQSHLASTAGGSGSLAPLNQYPPQPGMAGPPSFVGNDANAMVNNNYPSSSDHHKQRSRRQKRGDRSPYDFSMYNNSDKSASTQSVPSSSSSRRQKARTPNIVQKANVEKKIETPEEHMSNHLKMYMQCVKKLLTEHLLVDNRNEDKVSKNFRQLLYGVMLPKPVFIAQQLNMALNGMPKDGIDIASLMSAPSYSMANPFVAAKKIIKDKGLSEKSTKNNEMETKQHKKGMLAQPPIKQDLRVLLEIASTQSRWPTKGGGLGKAKVGRVLGIFYNSLENLQKNYLKGRLLGFFV

SEQ ID NO: 142184 - protein, 86 aa, Heterodera glycines
MNPQQKLTHTAVIGRAVSSSGRPGTWQDLGWTLPDSEILQILESNEKDNFNAIDPNLFVDPSTKRFWLQYGSFWMGIFQAIFSFPK

SEQ ID NO: 142185 - protein, 49 aa, Heterodera glycines
MQKYLCFCHRKRLDERTKVNIFPNFHFIVPSVRVISQKTVVGDRRKVQI

SEQ ID NO: 142186 - protein, 96 aa, Heterodera glycines
MNSEDTKEMWRRIDCFYAGRRDEVKDHRHFPDPDPNNFGIIRKPRLCRLRQIVSIFDLTIFKVCKKRSKMEHLKKVQILTRFSNTVRTILNRLGCR

SEQ ID NO: 142187 - protein, 94 aa, Heterodera glycines
IADQLLAFSDAHIALVLNRPEKNEKLSELATEHSENVSQFDSFGTGDNARITRLLGKSLCDGIVAFQMGQFERTFDLVYPIRTQLYKISGSNAQ

SEQ ID NO: 142188 - protein, 137 aa, Heterodera glycines
AVPTSIWAANDDDMYKPKQYDQQEQPKQAERPAAAYGAKLADDDMYNPKQYTEQQKAAAAGGGGRPTYEAALADDGLYNPKQYSQKPQQQQQTGADDDDLYKPPQQYNQQQQQKMGRPKSYEDELDEDDLYNPKQYN

SEQ ID NO: 142189 - protein, 25 aa, Heterodera glycines
SKSSLTTAQKNMFFVRFRPRGAQEK

SEQ ID NO: 142190 - protein, 31 aa, Heterodera glycines
MRTSLLIPLSLFSLITLLFIVSFSEADIEMD

SEQ ID NO: 142191 - protein, 52 aa, Heterodera glycines
LTGAIYYLILLKTKQKNMLSKARIIVEQSSSKFLSFYYKMPLMFLPLFRQLL

SEQ ID NO: 142192 - protein, 45 aa, Heterodera glycines; identical to SEQ ID NO: 124527

SEQ ID NO: 142193 - protein, 92 aa, Heterodera glycines; identical to SEQ ID NO: 124679

SEQ ID NO: 142194 - protein, 69 aa, Heterodera glycines
LFEYPKRTLEKIDFFVFGAVPPNRCAQIYGETESFRNSFPIACTLILRWIFAPHNCLSTPNGHLKKSIF

SEQ ID NO: 142195 - protein, 53 aa, Heterodera glycines; identical to SEQ ID NO: 139101

SEQ ID NO: 142196 - protein, 36 aa, Heterodera glycines
MVVTVWWHKVAVGPSFLFISPAALSEALWAPASLIL

SEQ ID NO: 142197 - protein, 98 aa, Heterodera glycines
MHLPWTFGIIHFFRFIYTLKIESVVMEKNLKIPKLLLSFFFLETKSLMAISRSENPILTTISTQFRTPNTVSNKKPKIQFFEFAFLVYKWLKSTLLKQ

SEQ ID NO: 142198 - protein, 168 aa, Heterodera glycines
MAPLLAGTVARTMAVSVVSPLELVRTKMQSERLSYSELRGAIVRTVKSDGYMALWRGWTATIMRDIPFSAIYWSLYEFSKPRLMQIAHRQQPNFALSFASGALSGSVAALLTLPFDVVKTHQQITLGQIDAERHAHHEKAAKMSTRNTNMFGVMRELVNSKGLGALFT

SEQ ID NO: 142199 - protein, 166 aa, Heterodera glycines
MDHLCRVCGNRAAGIGTGSEQCEWFNRPGHFSGTLDAFVKIVRIEGLRSLWSGLSPTMLSAIPATVFYFTMYDNMLCMWRNALASNKNNSTFSGAAFMAPLLAGTVARTMAVSVVSPLELVRTKMQSERLSYSELRGAIVRTVKSDGYMALWRGWTATIMRDIPFS

SEQ ID NO: 142200 - protein, 18 aa, Heterodera glycines
PYRDRDLSFSKSGTGNRD

SEQ ID NO: 142201 - protein, 104 aa, Heterodera glycines
MGEHGIELDRRHVQLLADLMTYRGQVLGITRDGLVKMKESVLLLASFERTIDHLYEAAFFGQQDRISGVSECIIIGTPMGIGTGMFKLLQNQKPVKFVQQSDKQ

SEQ ID NO: 142202 - protein, 58 aa, Heterodera glycines
MMRSIAEEKGGLLSSTFQFLVQSDSSELRKMIMFQVPIHEKLILLLLGVPDHESEHLF

SEQ ID NO: 142203 - protein, 304 aa, Heterodera glycines
FAGLTGYVTVETDQNTRVFVLSNRNGQGNALQIFMQFAWVDGKLNVTLRNASSVMWDTRGGVIPNVTLRNASSVMWDTRGGVIPQAVPPCGFDGNGCTVSVFELYKGYFISGIVLFVLIIGSSLLIGYFISGIVLFVLIIGSSLLIMVYLIHSKIVENRKTNLLWQIPFSKIVENRKTNLLWQIPFAMMKRVKQRVSFHGAERSHHSLRHGAERSHHSLRSNQTNVSALTHSTMDSLAQSKNFSLYTYNGDKCIVCTFGSMTAAAPLSVAEMAECRAMPLFHHKRTRFLGLILDGPNGLGGGNF

SEQ ID NO: 142204 - protein, 110 aa, Heterodera glycines
MSPYGHGTVAAGYQQQQQQQQQSPFAALNFIPYGAAPPEGIEERHNANHNNKMMMMNSNERKRHSINTTAAAEAALMGTTGVPELELGPDGARGSVSLQMAYEPANLALQ

SEQ ID NO: 142205 - protein, 45 aa, Heterodera glycines
LNLKKCQRLLFLKFFEILTFSSIIYYFAKLIHKYSLERALKRTKC

SEQ ID NO: 142206 - protein, 121 aa, Heterodera glycines
LFEYPKRTLEKIDFFVFGAVPPNRCAQIYGETESFGNSFPIACTLILRWIFAPHNCLSTPNGHLKFGAVPPNRCAQIYGETESFRNSFPIACTLILRWIFAPHNCLSTPKRTLEKNRFFLF

SEQ ID NO: 142207 - protein, 42 aa, Heterodera glycines
LDETVAESFYGGVLALYSISQIIASPLLGYWSNRVQSHKLPL

SEQ ID NO: 142208 - protein, 71 aa, Heterodera glycines
LHRAHFEHPPPPNLRKSNFFHFTVNLYDRDNQPIEIEQAIFAGFVEKEKEVHGENTRNGIHYRASLLFANG

SEQ ID NO: 142209 - protein, 39 aa, Heterodera glycines
MTRAYGKLLGPCFKTGRTDDRLIHRERTTESPRWTALVA

SEQ ID NO: 142210 - protein, 76 aa, Heterodera glycines
MDGIVPPADEDEQVPTMDEEETDEEEEAMPPPAVVEDGAVEDEEEGANAISDGETGGYGNDNDGMAFLGVLFWIGQ

SEQ ID NO: 142211 - protein, 69 aa, Heterodera glycines
MWPPPILFERTNGEESVFRENVRAYFSEHCDTISEVHECDLFFVQLNGGEGWFPEDDQIFFALVRQWPI

SEQ ID NO: 142212 - protein, 291 aa, Heterodera glycines
MDFDHSPTLFSETGSETEKSEGNEEGTKREQKEKDASTKQSDDEEEEEETDESSTAEEKGGEALSEREECWKRMEEEEEDGEEEGEEEEEEEGEKEEVGREKGQRGRGKEKGNGRDGRIKTAENGRGGGGKPGGENRPTTVRSMKRKCANTSAGGPLFQYPSEVSRRAEKRPTEFDSQMYAAGEQFSREVKTKNEKSYNKILGGRRTAKNTRKQTERATDDNQPKTGGGGEGEGGEAGGRTDGRTIKLDILNRMFDNTFKPTKHERAQLAQDSGLSMRVIQVKRNGKSAKE

SEQ ID NO: 142213 - protein, 193 aa, Heterodera glycines
MLSDNWSLRAVAKWTRECRRRSLVPHQCRSKFEVGTEEPENYNWHSCYFYFTFGLKWSASPGKMNRFLGNWVANITDDHRNFIVAATYLIASLIARQHQHNLGGKLLLQFQIALIYQKKITLTAIFPTLFVPPEPEVGLEHGTSIDANKFTRLSVPHPLTVRPLTSSHLQTLHRSRRSPNVKSLAGERPLHGL

SEQ ID NO: 142214 - protein, 22 aa, Heterodera glycines
CFLRMSTITQANIVRPSGNCKA

SEQ ID NO: 142215 - protein, 17 aa, Heterodera glycines
MSKIKSIGSSSGYLFLF

SEQ ID NO: 142216 - protein, 24 aa, Heterodera glycines
ITGVSIIAVLFLVFLMPSQNLVRF

SEQ ID NO: 142217 - protein, 24 aa, Heterodera glycines
KFLKYLFISLFDSESIREPYLTFN

SEQ ID NO: 142218 - protein, 528 aa, Heterodera glycines
FSSVFLFFFQLLEISKIRWEATDVRDSVVLGIGSINPECFEFLLEEFNFLLEEFNSKGILREINDRKNETNVRRRKRKDLLRLQILRIIEFTLFRDFLKNCAIFERNSGTLPQSLLELFDSIRFHTENDNDRDLNVLTDRDLNVLTSLRLHFAKLISLIINGTPIEQREKLLEQREKLLPPDIKRSLFFLFLSWCGRTIGTIDKRKGVDVGISVEHHAIRAMCAKGVDVGISVEHHAIRAMCALATLGPMFECPGRICEEEAMFRWLETLLSSTNSIVDEICEQIVDEICEQILCHILHLNEHNPLLELVVQMCYTKLLELVVQMCYTKNDLVGIRCFNAISMLFSQREFPEFPCEYISLLCLCQSFASSIELASVRQTAFLLVQLLRHQFLNTHNSHADNDKQQFCNKWTVRNVRGIIAEKLNCSNFHPTNQFGISKSLSSQYPQLTMPIFSEICCRLESARPNRQLICCRLESARPNRQLSLLAILPEWLRNVHFVDPNAEEEQSVALNGCGSEESTQLILNNLLY

SEQ ID NO: 142219 - protein, 1049 aa, Heterodera glycines
RGDDSYNLLRALSGVCETCLPSILKVMIMWYEHQQRVSITEIGPFFVCDARDRAIKRTLAASYLFCIVITEIGPFFVCDARDRAIKRTLAASYLFCIVLIEILPQLHFHPCGCDEQINFIIDNSFKQISYRDPALFGNALFGNNYDNSLLVAELFAEVIGILSQSHSKQIQKTFFDHLNEYRKDALTSSIALRSIISLLMGTKFFRVQANQVSEFEIGVGFLNELQVSEFEIGVGFLNELGSYFLEVDLKQKDLKHALAGLLVEILLPMTAQIRTETNIPSLISFVDLYGPTYELVNKKQHKNASYPLLTCLLCISQANSSFSTWNASYPLLTCLLCISQANSSFSTWVQFLNLTLANLKNKDSMVSRMALESLYRLIWVYIIRISCEGNTATRVYIIRISCEGNTATRSRLESICGSLFPRGSLESICGSLFPRGSRNLVPRDAPLNFFVKIIHFIAQFKVDFAFKEIIFDLIGCARAEIIFDLIGCARAASRQLAIYPERMNVGLRALMVIADGLQQKESPPGMSRSLAPNTSGTIPNTSGTIHRTKRYITKPLSMDVARAIGLEQYYPHCRKAFDAILRTLDGQIGRPLMMTAPQMRGKEYNDLIRPLMMTAPQMRGKEYNDLIGADMKAKLDLFRTCIAAIPRLLPDPFRTCIAAIPRLLPDPMSHQDLIDFLTRMCIHVDEELRTTAYQSLQNLVTECPEWREDIIHNFIRFFISSIQDTFPALIESMDTFPALIESMVRLLLQLLTVWKANILMEQQRKKVEESTQNLSDNFTKHYPSASESTAQTNPSMAEKATPSQQKLVMQAAANIIATSTSSTGNTTSLALVPLFPIFSTFILVQMGLPKSSVPSFPLFPSLNINPTFVLHCVEGLGIALLCQTRLSTKKAVIQLLREVKQLIELIKLQNHEMAVIDILDSAIKLQNHEMAVIDILDSATPYVLDKYVVHLPALEKKKWPKDFKKWPKDFALVCERISMLETDANLVNVANGNEYMQWDPWACALSGYCEYMQWDPWACALSGYCEKKFLPTQCSTASTVSSSFPHIFL

SEQ ID NO: 142220 - protein, 147 aa, Heterodera glycines
MPRIIQLQQEVVDKIAAGEVNHYESIFEMIFRMKDNGHGIAREDMSLACSRFATSKLHAAEELRSIGTFGFRGEALASISIVANSVTITSKTQSDKCAHRALYRAQSALFSVVLTAEEEAAVVVTFAQMETETNTAQFAHYSMPKCP

SEQ ID NO: 142221 - protein, 16 aa, Heterodera glycines
EAIPEGFGLPINLGAS

SEQ ID NO: 142222 - protein, 58 aa, Heterodera glycines
SPQDTCKAIGIISNNPEFADVRSLEGLSPTNKPSVPILAIPTTAGTAAEVTINYVITD

SEQ ID NO: 142223 - protein, 183 aa, Heterodera glycines
MPRRALLSIQTDIEQAAKALSTETVGQVAKPSKRIKRNLSWKKLEGKAEPKDAQPNQEQNLGGSQKEGGAESVEQNAEPIDAMDSAPPVHQRFELIGINWTIKKTITKIRGMPHRVQCAISPQTEQPRGKERVAERPETVGVPCVAELVAFGRQNSQPKSVGGKPRQHIGHYEKQLRKRGHSE

SEQ ID NO: 142224 - protein, 51 aa, Heterodera glycines
LSRLQRTFVVGFWADNPKLLSRKLRGPVDFGEFAADCPILVSLALPLQQIR

SEQ ID NO: 142225 - protein, 185 aa, Heterodera glycines
MTNVLSRLAANTFGLRILTAECHEFSHTWHPHCFWSLRDPFLPAWLFCLRTYGTLYALKALVDRRGRVHRVNWLRVLFNTLRSSFFLTTTEILFLVWLCIFRRLLGFATWPTVSVLNAFAACSMSVWIESKARRGILVPYLLNLASEALFRQAQNRRWICRSPPPFPHFQSLLFGISVASAVALL

SEQ ID NO: 142226 - protein, 241 aa, Heterodera glycines
FFTSVRSDSGKNVPIVEAVSADQFEAIRERMCQLEKQVNQQQEEKEKYADSLIQQQNAEQSEFCAKIDELSEKFGQFKEMHEEFVMKIDEKINANAEVANATQRKSTELEEQQNKLKNCVDILNYRFGNALIDQILELQNEQKTILGRLNEMEKKQQKDEEKETENYVLAELIALVGFPICFYLSIHSYGLRNWEFDWSYGVAWGALLFVFGALLLLICDKEHEEVYYKEKTIYNPPNGFA

SEQ ID NO: 142227 - protein, 182 aa, Heterodera glycines
REIRTELEKQKLITENIVLKAKIVNIEQHQMKQNKQNGKEDEQQGENVSADQFEAIRERMGQLEKQVNQQQNDNQHVSADQFEASRERMCQLEKQVNQQQNDNQHVSADQFEAIRERMGQLEKQVNQQQNDNQHVSADQFEAIRERMCQLEKQVNQQQNDNQHVSADQFEAIRERMCQLEKQ

SEQ ID NO: 142228 - protein, 117 aa, Heterodera glycines
MCQLEKQVNQQQNDNQHVSADQFEAIRERMGQLEKQVNQQQNDNQHVSADQFEAIRERMGQLEKQVNQQQNDNQHGKYVSADQFEAIRERMCQLEKQVNQQQNDNQHGKYGSDTVFL

SEQ ID NO: 142229 - protein, 81 aa, Heterodera glycines
MSTSTPNISLTTFGDITSDQNHLWPSFALSDDENDLDRLQGQRKALDAKIAELERRQMIMEGTEATPKAKGNFEPSTNNGN

SEQ ID NO: 142230 - protein, 23 aa, Heterodera glycines
KPKLFGLFKKELKIFKNFIHLPF

SEQ ID NO: 142231 - protein, 111 aa, Heterodera glycines
AQPLSPRDLDELETSIDQFRTFLNDQPRMRTLLALKPKVHLLLNHFVPFARQHQFLALLDEQGDEALHSVWRRLEQLWKTMPDEEQMRQLLEHHFVSNWLLDTGKIDEMKR

SEQ ID NO: 142232 - protein, 124 aa, Heterodera glycines
MWLTIRYGAKECKIEVDIGGETDGDQQKQSNEGGEEKVEEQKNADEKQTKVAEKEEMEGGGKNEENGTDCEAAKPSEAKQQMPTNLGELRERICAETGYENGTMKLIHKGKMPMAVRKTMAGFG

SEQ ID NO: 142233 - protein, 56 aa, Heterodera glycines
MADRNSELEKQKKVLLDFRQNSWDAKACHEDLEISSDNSLTVKRKGTNLGTYWELI

SEQ ID NO: 142234 - protein, 126 aa, Heterodera glycines
IHDKTIRQVLFFKQLSWRLLKIEASAHPKCGADEQREPLRSKTNSPLRLLTVDGKCRISIKKSSQNCSLLAGKIELILKEIHWLATMLHLRMAIDFHKHLVDLANCQKKADSVTPFLGQRQNPFTV

SEQ ID NO: 142235 - protein, 100 aa, Heterodera glycines; identical to SEQ ID NO: 134221

SEQ ID NO: 142236 - protein, 92 aa, Heterodera glycines; identical to SEQ ID NO: 125147

SEQ ID NO: 142237 - protein, 50 aa, Heterodera glycines
MGLEDREVSIECIKGALFLQMFQEAVKEKADEELKALNNIITFDHFYNAV

SEQ ID NO: 142238 - protein, 244 aa, Heterodera glycines
MFHSVRKSFRSKSSTDPNKRYGFMDLLKEMEDTIRGNEFFMKKVKAITKKAGIKEGGGFGALDQYYAKEARLVFAKGSGQDFLRNIIDLSQWMTAKEVRECAEKFKWIRGLNAKESWDIEVNGSGKASSVSADLRKDQSDKAINDRHNEDNAYGGTFGSERGGEDEDGSGSGSEQREYDEDGRGSGSEQREDDEDGRGSGSEQREYDEDGRGSGSEQREDDEDGRGSGSEQREDDEYGSGSGKD

SEQ ID NO: 142239 - protein, 190 aa, Heterodera glycines
MNTWNLFIFTNRTVMKWEMNKLNKWPIGVMKTFIKMLRMTKIKKMVSKKREIIKKFDAIKEKLREKGQNTSKDKAKIEMKIGKLLGLNRSLIYKWKKELNLNKNKIKKNFYDEKKRKFIERFDEFKELYGQGKQKEFAKELGISKQTFIKWKKELVPNDHKKENKLRKMKHYLQIKEANPKMSDEIIVKK

SEQ ID NO: 142240 - protein, 91 aa, Heterodera glycines
MNTIIIFLISFSCIFLAHFLQFVHAAPKVTVCFGYGEPFTAKAYLGHVFKRNYDTRAVQTYNGKQCVKINAQNWSQSDGNAAIFFLLENGT

SEQ ID NO: 142241 - protein, 24 aa, Heterodera glycines
ITGVSIIAVLFFVFLMPSQNLVRF

SEQ ID NO: 142242 - protein, 235 aa, Heterodera glycines
QYIDMMSHAEYPSFDYSSIRSGIVAGAPCPVTLCSRLVNELLVNELGMKDLQVCYGTTETSPVSFMSIREDPPEQRIRNVGHIMDHLEAVIVDKEGRVTPRGQRGDAVIVDKEGRVTPRGQRGDLFVRGYSVMYGYWDSVTHGFVRGYSVMYGYWDSVTHGSSEVTKDRWYRTGDIGLMHSSGTVSIVGRSKDMIVRGGENVYPTEVEQFIDRHRSVIVEQFIDRHRSVIPFALI

SEQ ID NO: 142243 - protein, 28 aa, Heterodera glycines
MLLQKNGHDYVLSDDNENEQSKSIANSD

SEQ ID NO: 142244 - protein, 113 aa, Heterodera glycines
MGQNEREEIVVKTEQIDQKEQNENSATVDQMAIKENLRAKGKYQNKHRTKIEFKIGSVLGASRKKELNLNKVKIENIHFVDQMDGENLKSPNEKIETIQKFERIKEKLKENGK

SEQ ID NO: 142245 - protein, 69 aa, Heterodera glycines
MTTRCAPPPTRWSSSRLATTASTRRTWRRRTAARWTSNTCWPKCGTPTASVPVIKTVYTSNIKKEFSVK

SEQ ID NO: 142246 - protein, 123 aa, Heterodera glycines
MANSVHAEHHQPGALSTIGDVNGDFGLVKDFTSLLGFDCILPVMRDCEQNENGREAEEEGAKEENEENGGTNKQILLLRKNDYGRTKVSQDGEGKRHGGRDEGHGAPRGTGEAPPVATTGASP

SEQ ID NO: 142247 - protein, 173 aa, Heterodera glycines
MRYFHLAVILLIICRGCHAEGDPPPTEPPAAGDDGPLNMENFVCAKKDTKHGFITQKDGMIVMDSEGVPPDASLYYFQQKNEGKLSIRMAVEEECKDAFDKNVQFTVDNSCEKKPNDGGGPCPESIPNCKFFDIVCPITMRAVIDPSDAGVFKAKLKDLANLSKTCKKWQGFV

SEQ ID NO: 142248 - protein, 87 aa, Heterodera glycines; identical to SEQ ID NO: 129152

SEQ ID NO: 142249 - protein, 240 aa, Heterodera glycines
MALICLASLPLSFVEDQALKNLLSILAPISRRHFTSDVLRNLYANVKARVKEDIRKTDFISLTIDGWSSHEGKHSLLSVTVHYIDSNMEPTFRVMEAVPIKGSHTGEKMCGLLSQVLNDYGVNAEKVHLIVRDNESAMQKATRIAGFESLHCTAHNFNLCVWDGIKKLSIDALLEKIKKSIRKIRKSRVLGDEFSALQDETGIPQRNLVKGITVRWNSVFLMLERFYENEEALVLMPAKD

SEQ ID NO: 142250 - protein, 41 aa, Heterodera glycines
MSTMFCVSFQFTVISGLKTCAPINMLFNSFVFEGDYFFIFS

SEQ ID NO: 142251 - protein, 132 aa, Heterodera glycines
MDDETCFCSGALYPKPGEAPDGSRMVVQLNCRCTGAYHLGCIAKHLIKRGGKCPTCRTETITENCRPTERWVQLMRDAGDVSEQEEDIVFLDEVLQPQTPPPPAAANDVAEGTAQARGRGRRTLRDNFRKRH

SEQ ID NO: 142252 - protein, 201 aa, Heterodera glycines
HDYPNVLLLSTPRILNFQCKILLILKDYEQKCLENQSSGHTHYVMQLVINPKDNNTFATASLDKTIKVWQFGSSVPNFTLEGHEKGVNCVNCVDYYHGGEKPYLISGADDRLIKIWDYQNKTCVVTLDGQSHMVSRQCCLPRIRIFVGGSGDMVVRSGHSRHQRLRAVAAHGWWRYWCHVDSATAATNTLMAQQQAAAAGN

SEQ ID NO: 142253 - protein, 229 aa, Heterodera glycines
MPKSEIDGKGGQVPTENESASEGTTTQRTTEEGKAEEKGSQRTTEEGKAEEKGSQRTTEEGKAEEKGSQRTTEEGKAEEKGSQRTTEEGKAEEKGSQRTTEEGKAEEKEGPSSEESAEESVMKESTTIRTTMEEEKLLGEEEQSNSKRTTTKRATAKGANLKRKVPPGLKHNRRRVTMRTPIAEGKRQKQFDESGGETGLPQFGPNVFFNYNFFLCHSNPTKLISFESL

SEQ ID NO: 142254 - protein, 198 aa, Heterodera glycines
MRTPIAEGKRQKQFDESGGETGLPQFGPHVKGEAQALYDYEEAKSGEDGLTGKKSAASKLFEVEFLAWKDKFLRGLKVFAGTFQLCRNIADYLKERKRNARQKRIPKGETKECNNGLMAQIMASAIIEDSSISKRLIKRALKFSFPESQFDIICAAGGALSLFNGAEKDGTSGVLSYAIYGRRHCQVKRRSVTCLAFE

SEQ ID NO: 142255 - protein, 39 aa, Heterodera glycines
KSPFALFLIAHFIVALLSFELVVQTITNVFCKGLCSVRL

SEQ ID NO: 142256 - protein, 68 aa, Heterodera glycines
MDCIVCSITRVDFILRPPYTMCGLLGILTSFEKGANMDSEKSLMLKRSKEQQVLLTVRPLKTAQIFKQ

SEQ ID NO: 142257 - protein, 27 aa, Heterodera glycines
MFNIEGPPRDREAAEKGSETHLILFTC

SEQ ID NO: 142258 - protein, 27 aa, Heterodera glycines
MHRIIAAVKKLVVGSVLAVRCTLCVLL

SEQ ID NO: 142259 - protein, 17 aa, Heterodera glycines
GNDEMRTGTNICFQQFR

SEQ ID NO: 142260 - protein, 95 aa, Heterodera glycines
MEPGKTELVPGGARAEAKQAMTNIGELLQAGGSSFKHVVFAKILLADMSDFQAVNETFKSYFTPDTYPARSLCQVVKMPKNGRVKIDVVAIAEKP

SEQ ID NO: 142261 - protein, 153 aa, Heterodera glycines
MAAAPSIRIIATSKAPAATGYRWSKQWMTIEKAQLYLLFCSQAVLVNNQTLYVSGQTGMMPGKTDVVSGGARAEAKQAMTNIGELLTYAGSSFKHVINCNIMVANMSDFQDVNETFKNFFTADTYPARSFFQVVKLPKNALVMIDAVAVVSGQ

SEQ ID NO: 142262 - protein, 252 aa, Heterodera glycines
MAWAATAEEIRESQMRAKAQYDKQNRVLDIQLNRIKAIILCLQMESVSLDPGEEFQEELTEELEEELLGKEEKWVTAQNSENEVEGEEKQKDEGEEVELNEDAEKKKKEWATAQNSTNNEKEVEKCGEKEVEKSKKKMKWVTAQNHSEGFGNGGFGEQTKKVVEVLLLDLETSAQIREYVVCQLQSKGVVLVYPNPSEKNNFPYFIFLPDVFDGKFERPLLPGDRVFVEDYAWVEGKEHLDKSRWIYAEQIR

SEQ ID NO: 142263 - protein, 22 aa, Heterodera glycines
GAEAWPWIDDVVEEVECECFEE

SEQ ID NO: 142264 - protein, 411 aa, Heterodera glycines
MSLEIIPFHRRREALSIENGCIIYADRVVIPASLQKEVLQQLHQGHPGMKRMKNLARQYVYWPGMDQQIEDSVRSCQACAEEAKAPVKTLLHSWPKEDGPWKRVHIDYAGPFFGKMYLICVDAFSKWPEVFEMSSTGSAATIDKIRYLCSRHGLPETLVTDNGTQFTSNEFKEFTRKNGISHLFSAPYCPMSNGQAERFVDTFKRTFRKLKKEGVANRLDTFLTTYRTTPNESLAGNKSPAEMFMQRKIRTTLDLLRPKRRPIIERDETMERSFNRRHGAQPREFMVNGKVFARHRISQPWKAGRVTQKKGVIYDVSFSDGSSSRFHANQMLVRHTPDYEEDPLDMLNDAFGLPLAPSVVENPDGQAEVQLPMRADTPEPLNDGPLDEDVPSIPEGRPKRNRRPPQRFSPG

SEQ ID NO: 142265 - protein, 1066 aa, Heterodera glycines
MALTVEQLLQAIAQQNQNPSLSGIDLFELGDESTNIEDWLQQFCFALDCSAPNIKDEQKVKLLMTKLSKAAFSEYKKSCLPKDVTDYNFAKTEEQLKALFAKPQSVWIDRYECLRAFKSEDENFRSFINRHKRLLRDFEFKKLNEEQFYCLMLLTALKSPKDGELRKRILGKLAADGDRAKYDKVVEDLQMYLSTIAEAKCIEQQPAPPKQILAVKQNCAVRTKGFEARGQVQQQLKVCWRCGRSSHFPSVCPHIKVACRKCSKVGHLEAQCNQHQAWLIRQGKMQSRKQGNLKLGGVLINSMNQPKRLIECPIKMNGNFVEFALDSGAEVVVVNEETHEAIGKPKLSPCNVEAKYHDGTKCTLIGKGEAEFEFGGIIRKGQFYVEAIRRMPIPTNVSTLRSFLGMVNHYQQFVKNLRFIRQPLDDLLKQDTVWNWSSECQKAFDQVIGTLQSDQLLTHYDPSQEIIVSADASEHGIGAVISHRYADGSIKAIAHASHSLAPAERNYAQIEKEGLALIYAVQKFHKYLYGRHFILQTDHKPLLSIFGNKKGIKSCTANRLQRWALILLAYDFDIEYQNTSEFGQADALSRLISKTTIEDDEVIVANLMNVETELLNAVVKQFPLNSDQIIVEIGKDEVLKKVMKYLRTQWPTSKNMSLEIIPFHRRREALSIENGCIIYADRVVIPASLQKEVLQQLHQGHPGMKRMKNLARQYVYWPGMDQQIEDSVRSCQACAEEAKAPVKTLLHSWPKEDGPWKRVHMDYAGPFFGKMYLICVDAFSKWPEVFEMSSTGSAATIDKIRYLCSRHGLPETLVTDNGTQFTSNEFKEFTRKNGISHLFSAPYCPMSNGQAERFVDTFKRTFRKLKKEGVANRLDTFLTTYRTTPNESLAGNKSPAEMFMQRKIRTTLDLLRPKRRPIIERDEAMERSFNRRHGAQPREFMVNGKVFARHRISQPWKAGRVTQKKGVIYDVSFSDGSSGRFHANQMLVHHTPDYEEDPLDMLNDAFGLPLAPSVVEDPDGQAEVQLPMRADTPEPLNDRPLDEDVPRIPEGRPKRNRRPPQRFSPG

SEQ ID NO: 142266 - protein, 566 aa, Heterodera glycines
MVGGEAEFPETPRHTPTIAMLTSHPSNVESFPSFRTVNDFWSLEAIGITDDPNQNDDQVAMQQFSNTVRQLPSGRYSVRLTWREPRPPLPSNWAIAYRRLLSTTKRLQCSPELLDRYSAELTRQMDADIIELTGRNNDEHFLPHHAVINPKKLRIVIDASAHAKGTPSLNDCLHRGPVLLPDLCGILLRFRSATIPVLADVQGAFHAIEVEPEDRRFCKMHWLKNPARPVSGDNLLIYRYKRLVFGATCSPFILAAVLLQHFDKHEHPFAQALAANMYVDNLLIECETEEEAIDKSSIAKQILKDADMNLREFLSHSPNVMKQIPEDDRLDKTPAKVLGLTWDTPSDCVTFSLPKDTDATATRRSVLSIIASTFDPLGLVGPCLLPAKRLFQRLWGEGTAWDAPLPDTEAATWSQTLSLWQNQTIVIPWHSILGKQSRLQLHVFCDASEHTFAAAVYIRSETADSSEANLIFAKNRLRPRTANQRFTIPRLELLAILVGIRAMRFAEKELRRPINGRHLWSDSQIALSWVKSDEPKAQFEQRRLVEIRQGQHTTFHFVRTDQNPAG

SEQ ID NO: 142267 - protein, 76 aa, Heterodera glycines
FDHPSLFSLPPADPLGSRQLNPSLSADHLRPPALITQIKSPAALLGSRQTLTESSAAHFRLSTIHHSSPSRQPPFQ

SEQ ID NO: 142268 - protein, 608 aa, Heterodera glycines
MSELIRQRLTAEVRTLSDLVKRLRQRVGRLTEFTRMAPEEIPLAEETKLAKGVRTDRQLLQRSIDRVNGMLRECFDHIQLLGDPFLKQAEEDLLAVLPTFDDEQADPNVEEWPVITLLSKAQLILDGLQVYIEARFDTTDAISSRSSSRVSDHGADDENRIHRQRQSTDPPTQAQPANAHQPSNSARADQTLFNQRTPAFPLNLTFPRASNRPTHRSEPHHGHFRQSTNDDDALRVSRIEIPRFSGSAEEWVTFWAAFDFAVHSRQYPAFQKHLLLLQYLEKGSPPRRMIEGYPPSDANYSTVVSILRDRYGDVGNRRDQLNAQLLHLKPARNNLKELRQLQQEIERICTQLCSLEPEGELSPIANSSLVTNLIKSKLPPPVLLDLIRMERESYTSWTARNWREGFATIVTDKEQVDLCVRTFQDMDIQPRERPPERAPSRPGGRSFRPPPPAPERRYLENTRAFPALAQPVSANGISCSLCEQEGHRPSACQRYTTVIQRRRRLEEQGRCLRSPSRPHHSRLLSSRSMFEMSGERPSLPPLPVNRPPGANKPSTRESRAEWKCVPQRQSCHGSQRRTGPTESDSHHNRTARVRRGRKHSRGGMRRRL

SEQ ID NO: 142269 - protein, 37 aa, Heterodera glycines
MVAHCDKRLGHLSTHLAIRRGDIPNLFIFVGNEAYYG

SEQ ID NO: 142270 - protein, 161 aa, Heterodera glycines
MAECRECKENGRPKYEFSLSDSSTKSLKIHLFSTIHADSEYVKNFQQLEKMKKESKEKADKKQPTIENLIGTNLTSSGILSVADKRIISMITCNNLSFGLLSDPTFKAQCKYELKDESDYRKRVLPEAYKLVKAKILKDLDDCANLSFTIDCWAGPSDNFL

SEQ ID NO: 142271 - protein, 55 aa, Heterodera glycines
LSLTGHGVTKNWVQKNFVLAVHHFPGQHSGNAIACNVRKLLDSWKINDDRVFAFV

SEQ ID NO: 142272 - protein, 16 aa, Heterodera glycines
MMANGQPTIFSSRHKV

SEQ ID NO: 142273 - protein, 60 aa, Heterodera glycines
MIQQNSVVIFSGFIDKNKPIKVQFSYLGTHLAAYLYGFIDKNKHIKVQFSYLGTHLAAYL

SEQ ID NO: 142274 - protein, 320 aa, Heterodera glycines
MDNGDDGACADNDLRNDVNHQQQRLDKSQVDGADEADWTAGQDEGDKAKPTAVDERAEEHGDAEGDDQQQSMEDEGAAAGGHQRQLQQQEMGELSAHGSASLEQARQTRALFHSHLRRLRQQQQQQQQLDQSQLEEADQAADDQMADQDEAAAAVEEEGMDESAGFNFGDLLNGTEVMRFDPKLWQNDEQNGGQQQQQKEEAMEEEEREGTSRDDGDDQQQQLQHRLQLKWALITDSVAPLAAELAESLRAIIEPTIASRLEGDYRTGKRLNMRRLIPYIASDYRKDRIWMRRTRKARRNYQICIAVDNSQSMQHNHMTE

SEQ ID NO: 142275 - protein, 32 aa, Heterodera glycines
GGGDSSSNSSEGEEEEANEEEEEKGQSREGDE

SEQ ID NO: 142276 - protein, 86 aa, Heterodera glycines
MPNLLQVLFGPVVYRPYQPNLLESGGNKLFSIGAGAYNTCVVLSPILVPYIAFSWTHSHHFSFVVALRFGVLCHCLFLPYDWSADK

SEQ ID NO: 142277 - protein, 124 aa, Heterodera glycines
MMVNKFIKLFVLLLLISPTNEKPHQKRALVTIALIGALAQLKAYLLAHTGVILTASMITALTTLSLAVYVKLKPSPSETTRKIKKSDEDMGLLLCNPKPRTAGNLRLPLIQEAGNLRLPLFHFL

SEQ ID NO: 142278 - protein, 227 aa, Heterodera glycines
MLWEQNNRGLEEEAKQRQIRNKIEELTAKLAGKPREEMGEEEAKELGKEKERFENPPEPPRERRPFYSSAVARFECQSELDSASKLRGREERGDRERNLGMSGKRLFTNMLKSAVGTVNDRPCIPPEGLNREMLKRRPTPAPVPQFTTRSAERSPVRKTYAPFRKGMPLERAEEAIYKIRKSLLQAADALSELADELFPHGEAREKDEGKEDEEAQWGGPGPSHSFM

SEQ ID NO: 142279 - protein, 173 aa, Heterodera glycines
MTNIPSTIRPIATTNIPLTIRPITTTNIPPTIRPIAITNIPPTIRPIATTNIPPSIRPIATTHTPPTTRPIATTHIPPTIRPITTTNIPTTIRPTSTIHSPIIIKPTTTIPTTTIQTPTKLIFTTATPNTVSPHTTKSADDTAPTTASYHSILDELRGLAEEADEEGILFLRR

SEQ ID NO: 142280 - protein, 198 aa, Heterodera glycines
MELPAPIFHRLRHFVPSILKDCISLRVINTYSYGFFIEFPCDDSAAASDGQAVAKWLFTPRPDNVPKVFKCYLDKDDANLTSKVEAFKTAFANASSPANFIVSIWFRYFADFVVPFDQINELTREQLTLKRTDFHYCFLLVRCPIARDESKWTKWEEEAIDWQSYGQWNRISICPIFVDDIGDGLLDEIPGPSDQQQK

SEQ ID NO: 142281 - protein, 126 aa, Heterodera glycines
MGTQISWHSKHWGLNPPTFTDIPITENQATSIPISETQFSGFPIVGLNPSVFQSLRLKSPAFQTLGLNPPTFNDIPISGTQPTSISISETQFSGFPIAGTQPTSISISGTQISGIPNTGTQPTNFQ

SEQ ID NO: 142282 - protein, 82 aa, Heterodera glycines
MRRGRPKCRFGDGEPPNYLNVDIKDGFVLNTWLDALQASFAGVQVLAGDLDDAICSHAFYYAIWRKYELLPERFNWHSKAPD

SEQ ID NO: 142283 - protein, 139 aa, Heterodera glycines; identical to SEQ ID NO: 139758

SEQ ID NO: 142284 - protein, 335 aa, Heterodera glycines
MPIRALPCPTTALTHRPLNSARPVPLTDKTLTYQNTHKTVIFLEQKPTNTPKILLQINQYPSHSVKRTTRSASRAPTNPNEVEEEEKKEKTPPKKIIRTHSPSEQTEVQFLGSTPTSEKSDPVTLSPETQKLLAKLKASEIKVQTKQLKKAIDCVEQTVKTNQNADLIQTTNAVKKFNSIRENTPDQPNFHSNFSPEIDNGFLKKLTTLEDERSEIWSNAVKECKKQEERRVRSVELQTNNILESVAKAIRAEDFNRKILEELLKTVQSTTYATRAARDKTVICAQKLQNNLLHQRRFLTAQERTATFIRKTFGLPTGTKEVDNSGATTSADGQQ

SEQ ID NO: 142285 - protein, 148 aa, Heterodera glycines
TIPVTKAKPPVESESSSSGDDDEVPAKKPAQKAQPAKTIPVTKAKPPVESESSSSGDDDEVPAKKPAQKAQPAKTIPVTKAKPPAESESSSSGDDDEVPAKKPAQKAQPAKTIPVTKAKPPVESESSSSGDDDEVPAKKPAQKAQPAK

SEQ ID NO: 142286 - protein, 44 aa, Heterodera glycines
FFNLCFYLDHSCDQGQTTGGVRVEQFGRRRRSAGQKTGPEGTAG

SEQ ID NO: 142287 - protein, 47 aa, Heterodera glycines; identical to SEQ ID NO: 132414

SEQ ID NO: 142288 - protein, 74 aa, Heterodera glycines
AVSRPPPPPAKKTDKGKIVPPSMLSKPQKIEPFKVRANRLPLLSPQFACHFLCLSHSHRRWGLPNPKKDARIGI

SEQ ID NO: 142289 - protein, 22 aa, Heterodera glycines
MRAKWRKKRMRRLKRKRRQAKK

SEQ ID NO: 142290 - protein, 45 aa, Heterodera glycines
GTPLGLYCKLTEMHKAGQVSFANVVTFNMDERSIAAAGGIDLFVS

SEQ ID NO: 142291 - protein, 110 aa, Heterodera glycines
MSGEKESTPGQYRLVEVSVGGQKVEATAAQVPGKMAEFVEWLNAEDAQTNDVATFAATAHYKMAKIHPFWMETDALAMNFILKRKGWNTVILPDKYRRAYYECFDTGFNC

SEQ ID NO: 142292 - protein, 109 aa, Heterodera glycines
MSSDDSQMPQEESSEDAPTPPEDYFDTPEDHQKAVDIQRGREAGRNTAGGMRRDRDVSASFDDDKDFLYILDTEGMDPKIISEQVEYFCCKRKGDKTFQELNCFDGCMR

SEQ ID NO: 142293 - protein, 115 aa, Heterodera glycines
MNDTNSDDSAKLPSFVLKKVPINGHFCFKNAGTNVACVCSPAEQSAADWPSVGSFFCVLCQRKRRKSAKEIAKDSETSRERRAMRRRSIREEEETADSEKEGKSAQILKGLINCK

SEQ ID NO: 142294 - protein, 48 aa, Heterodera glycines; identical to SEQ ID NO: 130859

SEQ ID NO: 142295 - protein, 38 aa, Heterodera glycines; identical to SEQ ID NO: 130615

SEQ ID NO: 142296 - protein, 36 aa, Heterodera glycines; identical to SEQ ID NO: 134159

SEQ ID NO: 142297 - protein, 127 aa, Heterodera glycines
MADFEGRVKAYRLVDYTTVSFSIITLFRAHGYLPRPRRSSAQKSAEKKKQKPYAEPIYAGEEKIIIFCPNKAADDGEKGTAENAIGDDAEENADEQQFGEPPMLARATLNRAGLEEEDEEETADEAS

SEQ ID NO: 142298 - protein, 50 aa, Heterodera glycines
MAKPIVLNFASQSMDLAALGPILIKKVRRGANKCHRWGKSLSLAWTEIFI

SEQ ID NO: 142299 - protein, 190 aa, Heterodera glycines
MPTVREILESLQKPTKRPRMPANEDSKEILHGNVSFKALGETSDFGLILWQKKCNKQATKQKRGGAQKRWTKWEERREKAERRDKADGPRKPLPSRTHAKTPQPSEEEPSTSEAPARDNDGRPPSNPTPMTPQEMDVPSVEMLEIDVSYPSTPADDDQQAEPMPSTSTARCELMTTPSTSKGAGGFGLDD

SEQ ID NO: 142300 - protein, 281 aa, Heterodera glycines
MAHDNVTIIKISANTNQNRPANALGNGPVDAVENEPADAVDYGPVDAVGNGPVDAVENEPADAVGHGPVDAAVLKIRRKRVPALLLAAVPLAKKFAVALLVAAGKEIGKNLFSGSKIKDNPAADGYSDSKQFYVSEECKRDFNCTFFACHPHPDAEGDSFCRKGFTRKCCQVFNLNFYQMELEYNDGEKEKCFYNFPICGESGCVSDRKYYTIKSKGGKVEIISHAKPPPECAFDAVLLFYAIKMMLNHLKQASMVGVKYYYPYDYGEGVQGVIYQHIVVF

SEQ ID NO: 142301 - protein, 201 aa, Heterodera glycines
HPIQQILTYSLRIVHPRTISAQMQRRVKQSLNEISHLCAISLIEKAIQNGICISEVFVDLVVFVDLVGNKEEVYQTFLNERFPTLKITVSKKADAIFRIVGAASIVAKVTRDDKLAEWVFDEIGFIAPERGLGSGYPSDPITKHFIRTMVDPIPITKHFIRTMVDPIFGYPSLVRFSWKTVERVLERKAIKYTWEKKNFDG

SEQ ID NO: 142302 - protein, 43 aa, Heterodera glycines
MPPKLIYFEVFLVKMKNMDVKHGLMLANILRQYWDDEVIFWKN

SEQ ID NO: 142303 - protein, 16 aa, Heterodera glycines
MHILGYFIAGIQYIKY

SEQ ID NO: 142304 - protein, 64 aa, Heterodera glycines
MGNGNSHHQTATHYLDPAIIHEPPPAPYPDMNMIFKSIPKMMQVADDMHRMSNYVSPFPNIYQN

SEQ ID NO: 142305 - protein, 57 aa, Heterodera glycines
MCSLFFAVFTVFSPFVQQNFFSTVRPGRVMITDQNSGNELIDWLLMRLCDPMLAFAI

SEQ ID NO: 142306 - protein, 339 aa, Heterodera glycines
FISADCWLEVFVLLPRSQLGFGIAMISHRFDYFVDEHFKTRKWKLRPIVIQHKIGQNGAKEMEIVNYDGNELPIPQIPLPKKVIGFGSISIGSIDQNVITFLGHFDRFFATCATTLSIDTENIRILEFLLLSIWPMFKDTIYQLSLDIIAFRRMRQLAPSMLNDCPSLRFFNLSNGISLEFPPDDSANATDGQTVAKWLFTPRHDNLMNNLTIYIENSAMEQQWSATVEQIKASFSSASSPVSFGISVLIPPSSSIDSIVPFELTNEFTGEKLALSKEDEEADLSGFSLIRCPIVSDDKRQQQMIIELGDRWNQINIFIGDDGVGDGLLDGSPGPSDDH

SEQ ID NO: 142307 - protein, 109 aa, Heterodera glycines
MSHNPKEAEREMEKAIFISADCWLEVFVLLPRSQLGFGIAMISHRFDYFVDEHFKARKWTMGPIVIQRKIGQNGAKEMEIVNNFNGKELPIPQIPLPKKVIGFGSITIE

SEQ ID NO: 142308 - protein, 234 aa, Heterodera glycines
MKAFFHTIFEGVLEIVVLSKSAIYSYDRAWCESLGKKKEKDRQEEEAEEQGEEEEEEEHRPEQERQEQERPEEERPEQERQEQERPEEERPEQERQEQERPEEERPEQERQEQERPEEERPEQERPEGERPEQERQEQERPEEERPEQERPEGERPEGEDRPEGELPEGERPEGERQEKQRQEDGEEEDGDDDDDDDDDNEDGAVQCKVILRRGGEGDDDDSAGGNSGGNGAKD

SEQ ID NO: 142309 - protein, 128 aa, Heterodera glycines
MKRTNASNITPPRAKRSMAPALDLDPNTVALAEQERQRTLVFIGLPESNAIRPSERVQEDREAATKILDHLEVEAQPTAVFRLGRYDPQRTTPRPLKVVMPTTTHQHMALGGWKRERARLRSLQNLNR

SEQ ID NO: 142310 - protein, 84 aa, Heterodera glycines
MDLFDGRDGPGHFGRTDSFTSGSALLRFVCQHSAACGARDDCRRNRHTAICEHGGSVEKNGEGAEELLRERIAKDALIVRRSTE

SEQ ID NO: 142311 - protein, 766 aa, Heterodera glycines
LQLNLHSVVHALVVNSSTRHQTLDYFFHILTTNRKLSQLHADFSQLANCTSVLNVFSVILLLSDKIVIEKVQSDYLFHPKCRIDTTDESRINMDSEKLESYRKELGKFITATYVPNFNTECFYLGIEFMRISATYVPNFNTECFYLGIEFMRISVNVNAMSNAFSRLKRFYLSDLRRRVQEMEERMNAWKQCQPGASHRIKSAMRRAKEMLKATNIDADLLTFVDNCPLAIQSQCLLLRMFVARPQFGGNVCAFHQQTAQSFFAFPETYLEVAVEFLTLLVRYLLGFCFRLFTFPFSKSKMSRIFLKNFIKNPFIGSKIKNPFIGSKVVDLVVDLLFMLCPLVNHDASVFYRQIVSDSLAVEGLFPSLVKFYSAVETTGSHTEFFDKFNIRRNIQVIFKCETTGSHTEFFDKFNIRRNIQVIFKCMWSDLSHRDRMVQYAGFSPSFVRFSPSFVRFINMVLNDTTFLLDESLDKLKVIHDIESVMSNETEWDKLSQEEQQLKTDQLRDSKGQVKMWIQLGTDTMELFVTLTSDAPQIFRNEALGERVAAMLNHNLVQLCGPKCAQLKVHDAINLCGPKCAQLKVHDAINRFEWDPRTLTQQIVKVYINLGSEMFAKQIAQDERSYTPEAFSTIIERFKMRNILTINHLELFANLAEQAEAAYKEKMMFEEEFEDEVPEEFKDALVYTMMSDPVELPSGQALVYTMMSDPVELPSGQICDRKNILRHLLSDPTNPFTRQPLTTDELRPGGIRGDVKPREHSELLGKC

SEQ ID NO: 142312 - protein, 16 aa, Heterodera glycines
SLSLVKISDYYPPFLF

SEQ ID NO: 142313 - protein, 27 aa, Heterodera glycines
MIVVVEVQIEETFSLLRTQFESHGKCR

SEQ ID NO: 142314 - protein, 68 aa, Heterodera glycines; identical to SEQ ID NO: 134199

SEQ ID NO: 142315 - protein, 66 aa, Heterodera glycines
MLIKKGSNTKLIRSLLHGDLISPFWLGTRENVRNILSKWGIEPRQKIMKGRKFNHYTTCACVYSHD

SEQ ID NO: 142316 - protein, 17 aa, Heterodera glycines
HKHLFDLFYHIHNLIKI

SEQ ID NO: 142317 - protein, 82 aa, Heterodera glycines
MEETESGRESGKGIESLRESGKGIESLRESEKGIESLRESGKGIESLRESGKGTGSGRENGRDRKWKRKWKRQKVEEKVEKE

SEQ ID NO: 142318 - protein, 414 aa, Heterodera glycines
MQSLGNRQLRGVNRIEEKTLGKEENGEKEKMKLKSERDKIAALERALEKSVTEYTAKRNEQTERIAQLGQLRREAEKSASPLDTGQSVAKKTPRKETTVKGFLVELHNIKTELLHSFRQSLSSLDRLCVETNDKMEFLNGLKLAALREGETSAELNKPSFDMKRPNEVEVKRIFSLKMPDESEAVQTVPMQSVADQRLAQRISEAASPPKPQLVSVGVQSPDFAAQSREKTPKSTRGWLCVSVTLIGLNHFSKGAPLKKTSTPKAAKNGGQSLRNAVPISSTPLSFSTLSPKPTEAVSKETPIVEKPMEKVPGKVAMPLATPPTEKAIPSPPETVAILSQSQATEKGLTGGEEGTEKQRESQPTGESAEKANVAEEGMDDEAADAAREAVTFDFMKYVLPQERSVSNISTGLVW

SEQ ID NO: 142319 - protein, 101 aa, Heterodera glycines
MTRQRCRTALPPLQSLLTTNFPPLLNIPRLLSASTPLLLLITNFHQIRIPNGVPPNCGLTANRLAQTRLTATRLLRQHRPFTAAPALPHRNVLNSTAAEGR

SEQ ID NO: 142320 - protein, 59 aa, Heterodera glycines
MAHDLAEMTFESEDIELKRQLALATRAYHCHMQSLNTNQALHTLRTFIGDRVNNEYLLR

SEQ ID NO: 142321 - protein, 69 aa, Heterodera glycines
GNELLAPHRDCQLTPFLCAAPTTNQIFVVYAVANERAQRVQCLVCVQRLHVAMVGASGECQLSLQLNVF

SEQ ID NO: 142322 - protein, 234 aa, Heterodera glycines
MFISPTPDLGAESAPPPVLLRRILPFPTTTPFTSSHRAKGPSHWINGNATQRGRLRSVIVVPNAAGNGQKLGETSARTAGPPANSGERSPRPSTSSSSAQPPKSPATTAPELRARPTEQLAKVAELLGQVGEEMAKILEAEEKSTDGKEDLLSLPSDGEEVVPETPPPPAAMSRNRDESWGEGSGQLSFTRGSGGHYNARKIDEEEENRWATPGAWFTAPPRVSGPKKKKPWYH

SEQ ID NO: 142323 - protein, 212 aa, Heterodera glycines
MIAEPLEKGLAEDIEGEIVKITIRNVKFKMLDAQIAKEPLYRGGGQIIPTSRRCAYSAFLMATPRLMEPYYFVEVIAPADCVTAIYTVLSKRRGHVTTDAPIPGSPLYTIKAFIPVIDSFGFETDLRTHTQGQAFCMCVFSHWQIVPGDPLDKSIAIRPLELQPAPHLAREFMIKTRRRKGLSEDVSVNKFFDDPMLVELAKQQDLFSGFGV

SEQ ID NO: 142324 - protein, 45 aa, Heterodera glycines
VQAWIQASRLFTKYRPLLNSPPELMVGLTRGQGPLVSQCESLHGK

SEQ ID NO: 142325 - protein, 65 aa, Heterodera glycines
LFIGFDYECPRGHRFMVVEPGKVLRHRRMSGTLKTDAAPLMDNDLAIWMPCPCKKEPRMTAQLMR

SEQ ID NO: 142326 - protein, 57 aa, Heterodera glycines
MSMCADNKDVEKEEEEKAKKKVEKEDGELKEESEDDDGDEIQLHNEKALGLSFNELF

SEQ ID NO: 142327 - protein, 80 aa, Heterodera glycines
MSAVGRVADCPVLLRMLRLLVNLMVKHGRRLKTNGHERLLLRHGREHVLLDELESGDGRDGEDQRLILKGVESQWPFAFK

SEQ ID NO: 142328 - protein, 47 aa, Heterodera glycines
MFPSMSQQQPLMPIRLQPSSMLHHQINQQAEHSQQDGTVSDSPDSGH

SEQ ID NO: 142329 - protein, 224 aa, Heterodera glycines
MESPKGSLPEIVQASSCCHFQSAPGGRPNVFAAQQTIGAGGDISADQHQQLITAGGGAAGADHSLLSSFQHQQQQQTASSAGVGPPDGVGCSGFHMLPPPYGNNLSSLAAAGGGQMCSSQPFGQICPYSPPCAGHNNATANSQYGTMNSSNRRLTETGILYGGGLSKQQRDSQVMDKTNGMGQKTQRDNRTEGQMVEKIGKTNADNETKEMERNRKLKFSGNCF

SEQ ID NO: 142330 - protein, 50 aa, Heterodera glycines
LSRAGAPLLACEVVPSQEETLAQTAHWITERRANHFAGLALAVSGFENEH

SEQ ID NO: 142331 - protein, 99 aa, Heterodera glycines
MGLCFEKPRLEWSQKAEIPETIRDYSLMEPQILELLNANHPTYRVKICEKFSIPQQFCWDANSCHSDLKIVDDKCLTIHYIGNGKGKLFKTFLIALIIN

SEQ ID NO: 142332 - protein, 134 aa, Heterodera glycines
MRKLIAKRDAARDEDDVGHSHKQSLHSENQTSWNISNDCPVEKRCKRFLVKQKNLIDHFRPYHEQRIMKVKMKKAPSVKKRKRQRNIRKSDNQIIIKKTCKRERLNLRLIDTHQNSGSSRLPECKHGSFAGWYI

SEQ ID NO: 142333 - protein, 15 aa, Heterodera glycines
LKAIHCLPVLGTAKH

SEQ ID NO: 142334 - protein, 103 aa, Heterodera glycines
MGTVKKKLEEKLFDEIFGEKWEEKEEEKRNELKKREIIAKYYRIKEKIKQKGRKFSKKEWNKIEEKITKKLGTNRMKIYKWIKELGLNQKFNLSKLKTDEQKF

SEQ ID NO: 142335 - protein, 254 aa, Heterodera glycines
FFSLISAKRMGNKFRNSCQNEGPDATKAKKGDENELDDQNDEGAEEVEAKTLPMAEEAGETIEENESEESSEECDFSFFAPKSNGEQMAAIDTNLYSRQIYALGHSAMEHLRKASVLVYALGHSAMEHLRKASVLVSGLGSVGVEVAKNLILGGVRSVGVRSVTLHDTKALAFRDLSAHFYAKESDVGTNRAKVCFDKLAELNDTVNCALSVENLSEDFVKQFDVSTLTSFSRSPNSVVLSVGRSHMRPFPLRR

SEQ ID NO: 142336 - protein, 42 aa, Heterodera glycines
MAALNEMLARNVPAKNGDPAFFEICQQIWAILGQFLGKVSKL

SEQ ID NO: 142337 - protein, 1475 aa, Heterodera glycines
MEKANNDLVSFQDGVNRSLRHINRLVKANYDAINRAAAEVNTNLQTCEAQIISLSDRMDLFKLEHKDGTDSQGGNSVNFTGGNGQQNTSLIRVDPFVEQNPDNNNEVNTLTGVTGLEIFSQESVTAFDKWSRRFRDYIQVVGKNLDEAEKLDRLRLALDDVPRDLYDTLTPAETTTVLRALKFLREKLDSPQRKELAKRNLALCKQRDDEPVGIFLRRLAPLVEVAYSNLDPDQLKERLSEELIDRLRPDLAFLIRLTGLSKGKELDIVKAQAEELELLLKTHKGQIPDPILQTVHAVQQNPWTPSRERDRRQNYNSNEAGPSNSYRNFSNSPNRGRYGQGRGGGTFNQRQRGRGNWRGPNNMADRSWNQRPYCTFCKRTGHMAYNCFQRKNQFSQRQFTPNSGPNLNAIHDSPEFHQDANRQSSNVTLDINELLRAFSVMNTQGPSSRGGNESASMNAISTMPADHPRVAEVAYQGTGKTQVNPCEPSDQQKISQWEGIGPKLSKYFMVLTAFMLLITGLINTTTANTIPKHPMVCQMIKDGVLWQIPNLSSCPKFSLDYLENPKIKSLRLYTPNVFEHQTPAWSCRKIRKSIKKYTSLTNVPISEMLEPIPLEISSDECWQMIRHRKCKLGVLIEDSGLWHTDLKIDNSPRHWLIGSWKWETVFIDNCYLIPTNITSHFGGNTVSIQNFEELNCPYEKGTCLTQDNSLIVWTPENETNCEFQSIGNWKGEMMGQHWISSNEPLMLEFSHNAKTILDCDRNLTISQQGFAADTVSLRGRKRTRVTRTTDGLITSSQLASELSFLNWNISNTMSFSFQHTTHSICEYMEQTRRWVISASISEPITFARITFKNPNLVAKNLAPGIIKIWPCVPLEPNQYSFYPLEESNPVTNECFEFLPIKIEMRGIHQMAFVDPTTMIINPSSKKAPCSSNQKQMIVIDNEILEVDQKSASVSRIKIKEIGNLSFNQLTTPILQPFSFHQLVLTNVTDILTHSYTSNMIKESQIAFRIHFQNKGTSIVPDEQWTKTGKEFKHFLIGDWDGIFWKILTILVFINTADLILRFYFILRNQYINLGRSNTEKRNNNTHIDDRPGSSQSFERSGFVNERPEYTPIRPLSEIEKAPLRNKTRRVSFKLRRKTETATNRTIIGNVNALTQIGANSELLSMMSLSNTAVISTIINSQIVRCLVDTGSSVTVASRALIDILGCKTVPSHEDAISASGHIISFREKAKVMLKVADICVPITIYFVNEQKSVCNRDYQLILGSFAAENYTIPPSSQVMIRANIKTALQPKHSLVVDKPDLNLLNNDLGIVPSVSAPFVEDIPLTIINPSNDPKILFKGMHLAYLNEIVENDGIFYESDQEKIKSGNPDPNGLTDPSFKIDLSKSDINEREREALKNLLEEFKDIFSKSQYDLGSFSGGEHHFDTTTEAPISSPPRRMPYKYRDELKKHIEQLLNKGVMVESETYRKRMVELDHV

SEQ ID NO: 142338 - protein, 175 aa, Heterodera glycines
GYLPSNSPPQGEVLIHGANVALGYFKNEEKTKEDFVELDGKRWFATGDIGEFREDGSLCIIDRKKDLIKLAHGEYIALGKVETALLTNPNVDNICVYGESHKDYLIALVVPNLKNLQVLAEKVPFEIRSSFRFFTMIPQRFSPLQNDVNEPSIERICANKEMPKILQKELHSFVS

SEQ ID NO: 142339 - protein, 48 aa, Heterodera glycines
  unsure (1)..(48): unsure at all Xaa locations
REEIXRKVIICAEPWTADSGMLTEALKLKRKNIEKKFEEEIRQLYEEN

SEQ ID NO: 142340 - protein, 498 aa, Heterodera glycines
MPFPPLADDPWLPSEGFFDVRGRAIGIYRNWDERRQTFDCNDSSTNAQHFVRCQITSDQLTVTHLNNERHLKRITCCEMVGLADGQSALLIGTIIGNIYALLVRNMELTEHVVFLDTALKDISEFDSQQKQVNGVNVHSEDQSKLYILFNNSFVVFYDITSDEVLQTFKSETPITVTNGNEHSCDEFVIFAGGVPLDELDNRFTLSVFCADKSLILDFDSAILDFCVFCANDNSSHILFVLCEDEIVAIDLLDPIWRMLPLPFLHPIHSSPVTCVTTVNSLSEKAQTLLGRLANLQRNASNIFSRSNLTLKNGQIAQRRRINNTNAANDLQLVVTGHENGVINVWLASEFSFKPWISLNTARDFEGFIDDSAPNLLQNSNEELTRKEPADANSDENNANFCLPPVRKAGLFDPYSDDHRLAVQKVFVDSQSGEIAVGGTAGQLLVYEGLPNSKKDMPRNEVLLLDMTSSEDAAHLRLTGRLPSESPIQARNVPANYPP

SEQ ID NO: 142341 - protein, 201 aa, Heterodera glycines
FCDKYFCLILLISTPLFRLCGYPPFFSHLPIPGMKSRIRAGQYNFSGPEWRIRAGQYNFSGPEWDRVSEAAKDLIRRCLVTDPDERAKDLIRRCLVTDPDERATITQLMQHKWITHYQQKPATALATQKVLNEREVDWSDFSEEMENALATMRVGDVHIKQMGDARNALLEKRRKRTTEEEEQKETLPEGTTTEEGEKMTK

SEQ ID NO: 142342 - protein, 19 aa, Heterodera glycines
MTNSNLASNEHSAFNFEGK

SEQ ID NO: 142343 - protein, 18 aa, Heterodera glycines
MTNLPSISKGRNDKFQPG

SEQ ID NO: 142344 - protein, 83 aa, Heterodera glycines
METLLDKNTFAVTAGFKFFLPFPNSLKNKFSSSIIRITIAMDTFEEFVIVNEKSFTDILLTFGYNRGGNSEIKFSDVTQFAAL

SEQ ID NO: 142345 - protein, 98 aa, Heterodera glycines
KVFYNHLLPIYFLADLKLSIACRFSAQQSTNTVFDSIQKIIHYPKVFLQPLIANIISCRFKAIHCLPVSAQQSTNTVFDSLQKIIHYPKVFYNHILPI

SEQ ID NO: 142346 - protein, 223 aa, Heterodera glycines
MSTDHKERATQAKKVGIKTTKNRAKFEPDSRPSTSKVAPRSKKEPEFQLDPRPSTSRQAGYIPPPAPKIVPKHEPTKRPVPYRIPKREPKIVEETPQRQQQPPAAAVVEEMFLVPPPRRGTKRRYPVIGENDAEVRIRKRVRQARRVRVQYSPEPGPSTSAQSDEQQHRELFAIPSNQLTMNQRVERLYIKCNRYADRMGVRGNTINTANGKPLAHSNLRMAI

SEQ ID NO: 142347 - protein, 101 aa, Heterodera glycines
MPNLNCVEFDDTCAWHNCQTPADQLMWFRTSANISSDQMMTTTGTGVMPSWDFAISKIRFFFIFLLVSKENKKFRRIFHENILNLLFKRPFAMKITEKALI

SEQ ID NO: 142348 - protein, 275 aa, Heterodera glycines
MDIFLAPKLPVGGMENWGLVVLHADAVRISTSDGPLPLGTDDSSSSSRAASREERAREQKQHSLMLVDRRSEQYRAEKAITHELVHQWFGNLVGIWEWEELWIAEGFATYFVFDFLNAANHPHLTGAVMVKMLKDLVGPAEFRAGITRFLRENSFKSVDRRAIWAAFPTVADHGVDPVRLKDAMEPWLVNRGVPEVEVQRNYEDQSVRLKQRPADQNRHIVYLDDEAMQQMRMNWKDEEDEEGGREKKGVGRGAGDEEHDEEDVGEDWWKMKRMD

SEQ ID NO: 142349 - protein, 67 aa, Heterodera glycines
MLTSIAFVPIGGLTEAVNALDVEFRNLPEMQPMLEWLMNNYTVVHALMVRERNRVSKPKLGMSRKER

SEQ ID NO: 142350 - protein, 98 aa, Heterodera glycines
MENRLILGHSLIALIIGNSLIANFDYVLTKIARIIMRMKNGEEKCLKLVTMASNSEQYSTADGMPMAKAKKRGHKLELAKMVMAEKNGAETEEPIGGG

SEQ ID NO: 142351 - protein, 89 aa, Heterodera glycines; identical to SEQ ID NO: 140574

SEQ ID NO: 142352 - protein, 48 aa, Heterodera glycines
LKITILAFCHYFFTISAFFGKFLNKNAIKPKNTPLRIDLKIFSKNTPL

SEQ ID NO: 142353 - protein, 185 aa, Heterodera glycines
MPGTSSTHKESVFMKLNKRLTVLEQNMSLSSEHLLELSRRCVNGAARAENELKQQREGIAKEAERMAKQEANRVETEMKQKITELQNEVRRLSQQLQSVQTTVQATGTGGFFYRPMLSPMHGYSASDSHCRGEQACLLSDAMMGTTLSPLHSTSAAPYSANSMPVSAHSAFEGKTMDGLWTVIYE

SEQ ID NO: 142354 - protein, 24 aa, Heterodera glycines
MPWLRVPQLDEPDMHAMRSHERSA

SEQ ID NO: 142355 - protein, 70 aa, Heterodera glycines
MAGVDYVLKFMQIAEHSEQQRSSGRTPKLSQQKWAMAEEDEMPQFIKRPFRVPSAHSVDKFVDESLKSDG

SEQ ID NO: 142356 - protein, 63 aa, Heterodera glycines
MQKNTVLPSPPTERECYDNDVCCIQWAANGTCKTAPRYMNTWCQGSCRFDGCRPYADYGKPEF

SEQ ID NO: 142357 - protein, 138 aa, Heterodera glycines
MNKKHNVTMARRRPTKSAAFPPANAPNAPPTKREAVTKVGCHEVQAVTDYACSIAKQKAPEGAKPTDQTQKQSGGGRLGVIRSSRGQMELNGRDQTNQQKRERERKEQKRMHTQFGTAKEMRPFVNDGPISAFLSMRK

SEQ ID NO: 142358 - protein, 575 aa, Heterodera glycines
QLHLSSAASDHSESSSATLFLSLISWFCALGGLLLGYGTSIISDSLHFMTADLRLNTFRQSQGITTASLLVGGAFGALAGGKAADLQSQGITTASLLVGGAFGALAGGKAADLVGRRRAMVTLCFLFIVGNLCSSLAPTFPLLLSARIFLGFSLGGFLLLSARIFLGFSLGGFSSVVPIFLSELSPSSIRAQVVTRSTLNIVAGQLLAFVVGALLGSVWEERLDIWRWMNLDIWRWMNAVSLFPALLLLSALLLFVPESPRWLVSSGQMGNAFVVLCRIRHNAEEAREELAEIAQSQTETKKSSPFRHFWDRWLRNCVMIGLGIALIQQIVGVSAPLGIALIQQIVGVSAPMYYGTNILERCGMDIELAMIVNIAIGIVSLVSMAFGIWLMGRIVSLVSMAFGIWLMGRCGRRPMLLVGMVGSSLSHLLVALIFWLMPSGNAKGVVVLLLLLLFCAFMQCAITSVWFILAEIFPLRVRGITMGLCSAIVWMTKMGLCSAIVWMTKFAYGLFLPLAMDFLGISATFLLLLLFTSLSTIFVWLFLPETRDKTLEEMEKQFRGRLGSTEEEREEEKQR

SEQ ID NO: 142359 - protein, 34 aa, Heterodera glycines
LYALPIFHYFTFLPLNSLFCGSIKNACRGIRKGH

SEQ ID NO: 142360 - protein, 167 aa, Heterodera glycines
KSLLIAGQSLRTLTIESRDDKVQEICQLLLYWLNDELAEERIVVRNLQEDIYDGQVIQKLTEKLAQVKIEVPEVSQSEEGQKQKWRIIVDALNRTINQPGGQPKWTAEMIHAKRIIVDALNRTINQPGGQPKWTAEMIHAKDIVAILHLLITLALHYRAPIRFPNNV

SEQ ID NO: 142361 - protein, 16 aa, Heterodera glycines
EAIPGGFGLPINLSAS

SEQ ID NO: 142362 - protein, 16 aa, Heterodera glycines
EAIPEGFGLPINLGAS

SEQ ID NO: 142363 - protein, 17 aa, Heterodera glycines
ALPGPGPKQPWYHSKAK

SEQ ID NO: 142364 - protein, 115 aa, Heterodera glycines
MKQQNVQIAEEETFGKTNDEMPNGAQKQQNGQAKEKQKVGQTAPVARPLTVKDWDYDERGQCGPKHWLRIAKCEHLVQFQPDPQIEPPEIYGGLLDQNYRFVQYHFHWAQNDNEG

SEQ ID NO: 142365 - protein, 64 aa, Heterodera glycines
MASSAEHFVSSFVRYEGSLTTPPCSENVTWTVFTDPLLITREQMSLLRALKDCKGNVIEKNYRP

SEQ ID NO: 142366 - protein, 77 aa, Heterodera glycines
MGEKANWANLFFCMAGKTDAVKWEKKNIDHRTEQSPITTELEAAEAAKHYYCIGIMIRINEELKAGGKKGICLVMIR

SEQ ID NO: 142367 - protein, 16 aa, Heterodera glycines
MALFKCSAYLYLKGNL

SEQ ID NO: 142368 - protein, 74 aa, Heterodera glycines
MAMAPVILTPYVLSPNILNPFAMSPLILSPTVLSPDILSPQILGGAILSPTVGSPAILTETFLAASVLSPSVLS

SEQ ID NO: 142369 - protein, 49 aa, Heterodera glycines
MASINDLDYVRDYDYIKKMKEILGIMMCLKSITMLRDKDLWMVVPVRDK

SEQ ID NO: 142370 - protein, 64 aa, Heterodera glycines
MDNRFIDRALFENSATKKYFVGTFPADRLPKCTKFPCSLIVNLDPSGMPGTKKRSNPRIPLYFS

SEQ ID NO: 142371 - protein, 36 aa, Heterodera glycines
MLGKCSPPVTKLASTADEIEESVPETSSGCWKRFRQ

SEQ ID NO: 142372 - protein, 77 aa, Heterodera glycines
MAQAESAEETYEHAMDFYFQLDNYVQMSQNLTIDDQLPPGWDATAEVRVYCATPTVEASTPAGWTIHAVASNFTLLG

SEQ ID NO: 142373 - protein, 470 aa, Heterodera glycines
GISRVFILHYLEASNEILVSHNVISRESFNGLGQEYFDKLIAHSFSACRNQFTNERHLLNRTHGAEMLWTYANSLFFATTVITTIGPKQSNSKNSHLSFSGYGNLVPMTEFGRIACICFALFGIPLLLVTIADIGKFLSDFLNFLYRTYRTFKTKVPSSPFGLLSSFQVRKQSRRSSVSTMTKAGSINLNEINEADVEESAPHELRIPVVMVLFVLLCYCAIGGFLFHWEGWTYFEAFYFCFITMATVGFGDIVPTHFGDIVPTHSSTYIILAYIIFGLSLATMCIDLAGTATMCIDLAGTEYIRKIHYLGTKMEDAKGTVITGLKAGEQILKHRGIEVIRTASGKIVQVGGAMLSLRQAQELGVEYILSEFKYKHKNILYEPLSPAVQRLIKNKNIKILPGDISDNDGLILQNILPGDISDNDGLILQNRSYGKPFLLLQTSPNAIHRYTMPAEDDAILVPFILKETNI

SEQ ID NO: 142374 - protein, 158 aa, Heterodera glycines
VDFRGKILTAPWIWLDGQFRQNVHLKIDDKGKIVQIMEGHHEAEKQCDDGALLPGFVNAHSHAFHRCLRGRSQIGGQGTNNFWKWRQDMYNLVRHIDYARIFQICVGTFREMLSAGITTVGEFHYVHHADDEKFGLDLAVVEAALEVGIRLVLIGRFE

SEQ ID NO: 142375 - protein, 233 aa, Heterodera glycines
SCFITLAYLTIKLLYLSNVFAQLYFMIKFLFLETDRYNWYGLGVFLDIMAGIPWQTSGYFPRVSLCDFTVVRQVANIQKYSVQCVLVINIFNEKIFILLWFWYALLLLVTSISFNEKIFILLWFWYALLLLVTSISFIYWLTMLIFPQFGRWYVAQALELNYLIYWLTMLIFPQFGRWYVAQALELNYLNHLKISNLGSQGILKHFVRFLPGVFALLVPFSAHLRFFLVFSLF

SEQ ID NO: 142376 - protein, 51 aa, Heterodera glycines
MCGAKKVVFGVGFFGIADHESDIHFNQIPKTGPELLQKNLKFKLSNFGFLV

SEQ ID NO: 142377 - protein, 142 aa, Heterodera glycines
YIDHSVIKFLRSKKRFFDKSGTKLEVFVHSIDTDVQPIWDVFTREILPIFATNVRHLCFPNANHFYNLRRHTSPTLLTDLDQLNSIDSGALLPDGISDDGPKATAGQALSKWLHTPSKNGKANELYCCAYFCEITWINTFKE

SEQ ID NO: 142378 - protein, 166 aa, Heterodera glycines
MAFVILIFVLIFIINSTDKCLCVHKLSDLNGKTRPTFVEIFGQGWEIDQNSNWQNDQNELNLEDSIGNDQNNEQFNDQQKREIVHKFHVIKEKIKKRGKYSAKVRTKIEQKIAVKLGISRKKIYKWKKEFNLKKIKKNDKNYYEKKKQEFIERIDEIYRRWNSVFE

SEQ ID NO: 142379 - protein, 82 aa, Heterodera glycines
MKLLVEQSWWKVGMQKTESENCLLSKISLFGTPGLETCVYKKDAKINGTFVPGIWMSEDNNRALVFDKNSKKAEACGEKLRK

SEQ ID NO: 142380 - protein, 147 aa, Heterodera glycines
MDFDFHVLILMLLLIISSTDKKFVFKKNGKTRPTFAEIFGQGWEIDQNSNWQNDQNELNSEDSIDNDQNNDQFNDQQKCEMVHKFDAIKEGIKNRGKYSPKIWNRIEQKIAKNRAFFQKSPLFLFIRCFIDEFLDFGSVWKIYGSNK

SEQ ID NO: 142381 - protein, 87 aa, Heterodera glycines
NLKSPPLTEPKSSVRRPPIRNTSDVRLTPKNTCLPRRLSIAMLFLPPKILPRRALAHRHVTVKAETLNGRHRDERIRCHQRHTANAA

SEQ ID NO: 142382 - protein, 33 aa, Heterodera glycines
KRARSARLRPRSCLNSPTNLETGAKRPYKPNKI

SEQ ID NO: 142383 - protein, 281 aa, Heterodera glycines
SALFNNGLDQIDFWRPPPFVNSSGDVMVDVLHGRHFLDFLRKFQVEFKVLVDDLSKLIEEKEIGPLIEEKEIGPSPYATKNGPILRDTFDRFEGFGLRMGDYHSFADLLAFMQNVQNAMPSRAQLRTIGWTAEGRPLQGIQFGKSDKSRPVVWIDAGIHAREWTAVHTAAYFIFYFANQVHTAAYFIFYFANQIRLGNDQRLLKCLERVDILVLPCLNPDGYEFTRSEPRNPAVRMWRKNRSKERCATSEGRPNALLSENWGGNKGKSQEMEENEGKARTI

SEQ ID NO: 142384 - protein, 74 aa, Heterodera glycines
MMGIECVRSTAPRPWDSESERFHQVHHSSDGYGRDGIGTHPPMSGVALQFDRFEVQAFYQNIPFIVWVEEITFH

SEQ ID NO: 142385 - protein, 39 aa, Heterodera glycines
MKLELAKNNTVFSSKLSPFGRKMVEHYNIEFNNVEKDAN

SEQ ID NO: 142386 - protein, 74 aa, Heterodera glycines
SIKKGSGRKKFFLIFWLYCFCFGGGAGTSGIMRTRPIWQVKQRLLTSQKVRCRDETNQHCLPRGTRHGPPKEWI

SEQ ID NO: 142387 - protein, 189 aa, Heterodera glycines
MRPIAFVAVVVSTVAVIASVVTLPMLYNYVQSFQSHLMVETDYCKARARDMWLEMTALQIGKGHVNRIKRGWLFGQWVPESGADAYAAGKHSTDEPSLGFFGPKGQPGPDGQSFEGPPGPPGDAGRPGREGRPGGTVSVFTRFSPNQTPKGPSGPPGQDGEKGSCDHCPEPRTPPGYFVEAGKSGGHYH

SEQ ID NO: 142388 - protein, 69 aa, Heterodera glycines
AEEEDEEEADEEDEEEADEEDEEEADEEEEADEEDVFMHFFCIFCVKKEDEEKLSASAEEEEADQSNGN

SEQ ID NO: 142389 - protein, 159 aa, Heterodera glycines
MRRDLADRPAKVELTKGMSVLLRRGGEDEDGEVVDTTPRPPAPPPPPPPPGRRPPRGPPPPPTGRRPPSGPTTPRPSPPGSPPPRPERPQRPSRASRRGGRLEKWRKGRYNIQQRQPVVRDLLAEAAAAPLPESDDEDDYMLESGFALPAPSQYYGDLP

SEQ ID NO: 142390 - protein, 55 aa, Heterodera glycines
MMHKTDTLLVQLDKMRDDLRHASAAMAGSVSDMVSLSPKSLPKIVLIKCERSFSS

SEQ ID NO: 142391 - protein, 261 aa, Heterodera glycines
MPTVRQNIMPKSASSATTTTMSTIAVRAEPHSTIVVAIVRVEELLGRAEKLVTEQTEPDDILIYEAMADGLATAWKSLSRQLSIRGYILTDTQHLYEIALKHEELAKLANSRLCKNGAIQSPDELQRIIDELAELTREGLEIGSTVIAQIRILGALTDNEERPREVLNACLAIEKIMLRIAQSWELIENNWRIQRDGGQVVAIESAKKEKPAPPKTVGSFSANNLVAAEQWLLTAAQRFDRVRDCEEDEELELAILITDIK

SEQ ID NO: 142392 - protein, 134 aa, Heterodera glycines
MAKMLHLLATIALTAGPIDEGRDSKAERGEEEEEAACWSSTDLLVTHIKPQREGKAHPSAPSLFFFSSRHQTLFLERVGLLRPRQYGGLLINMEIEANLERALNRQTGRADRQAADKQRQRQSIGFIFYCCCGD

SEQ ID NO: 142393 - protein, 155 aa, Heterodera glycines
RDPLNSRFKFGYILDGIVCNVMLICSLNTFWDDNLSIPPLLLFVECPPMAKMLHLLATIALTAGPIDEGRDSKAERGEEEEEAACWSSTDLLVTHIKPQREGKAHPSAPSLFFFSSRHQTLFLERVGLLRPRQYGGLLINMEIEANLERALNRQT

SEQ ID NO: 142394 - protein, 16 aa, Heterodera glycines
EAIPEGFGLPINLGAS

SEQ ID NO: 142395 - protein, 47 aa, Heterodera glycines
QSHVTHSQPISNNHFYVNCCNNIPVCRRLRPLAVSIAAGCGKLCTFL

SEQ ID NO: 142396 - protein, 30 aa, Heterodera glycines
MKALSLPNFYITKLWTKGFLIEIFTKQEKN

SEQ ID NO: 142397 - protein, 152 aa, Heterodera glycines
MLAHSHNYTKASLQHVQRNLMKNNVAPDLFQNLELNMQLAMSDFSGSSTKRRKKTTNIWPSFSSSNNWTRRVRRSVRLPKGGHGQNVRDEMPGQKADQTQAGQVTSTNQTFIRTFTGETLALNENSRQIVLHFGFDERRRFALPSLPARRIQ

SEQ ID NO: 142398 - protein, 88 aa, Heterodera glycines
MMKLIRRFMFFDFLKEPFWVFEDRPKIGLNFVTRPKQRNTREQFGMNVTNKQLGYMDTVFGQKPGPGIARPKKAGFESKFLNRARVSG

SEQ ID NO: 142399 - protein, 125 aa, Heterodera glycines
MRRGATVIRRGATVIRRGATVIRRGATVIRRGATVIRRGATVIRRGATVIRRGATVIRRGATVIRRGATVIRRGATVIRRGATVIRRGTKVIKRGTMIRRGATVIRRGATVIRRGETVIRRGISD

SEQ ID NO: 142400 - protein, 212 aa, Heterodera glycines
GAAAVFCDAVPSVDVPPAGAAAVFCDAVPSVDVPPAGAAAVFCDAVPSADAPPAGAAAVFCDAVPSADAPPAGAAAVFCAAVPSVDVPPAGAAAVFCDAVPSADAPPAGAAAVFCAAVPSADVPPAGAAAVFCDAVPSADAPPAGAAAVFCAAVPSADVPPAGAAAVFCAAVPSADVPPAEHGRAANAGRTGRGGGQRQTDGTERSTWWNFR

SEQ ID NO: 142401 - protein, 193 aa, Heterodera glycines
APAGGTSALGTAAQKTAAAPAGGTSALGTAAQKTAAAPAGGASALGTASQKTAAAPAGGTSALGTAAQKTAAAPAGGASALGTASQKTAAAPAGGTSTLGTAAQKTAAAPAGGASALGTASQKTAAAPAGGASALGTASQKTAAAPAGGTSTLGTASQKTAAAPAGGTSTLGTASQKTAAAPAGGTSTLGTAS

SEQ ID NO: 142402 - protein, 754 aa, Heterodera glycines
AADFKMQAPDWGNYDTNGTDYDYIYNNSDERDNWNSEQAGVFRHLVTQLGTTQTLQNLALPTFVLERRSLLEMYADFFAHPDELIAGAYENTAEKRSRLVDDNAFESTIFQIPCRPQILLELLLSCTQNRRREEAVQSDPGRSVPLPLDPAWRAVVRKPNRRWTVPGLSNQPGPMTFIGEQVSHHPPISAFYVEHPESGVTCTSHIYTESHFAGLTSLGVRNIGRATVRLQNHNETYMATFPDAFARNVFGRPWFELAGKVGPFRSILLFQQTKFFHTGAAHVLRKCAPNSWPSLPQGGGGDATERRLARRNCPEAKCPQSLRTLYKCAGEVRRDKGMCQGAGPEEQRKPKIVASSHRCSVLQRHKNGEPSQALHRATPAGRGQATQRTTETPVEAAPFSTRWDWYADRRLEIPRRAGMNVMAIRAHLRCCLMKPLSPNDLADLLRRHPVPVDGSITNPSYVPMQENQSIKFVLAFLIFDSQLTNFIKLIPTAKVTHLAASPAPQFAAQQQEERTKRPMAMPRAESAKKNGGGTEDISLRCPTSQAPTSFLSRQIFRCPSPNSAVPPLSDLATRLCRLPCRRPTSPPSLLACPQPIAWPMDRTAPADGTAECARAAATRGCEMRRLFSPNVCPAEKRRLRRLFLRYRFPYRCAACRSAPLVQCFSPFTHFAALSAPSGAAQNAEGQRGAAGAATAAQPTDDEAMTAQKETMQMIPLASALSTHCLAALSQIPILFPLSVCPLSALPLCLPFLSI

SEQ ID NO: 142403 - protein, 235 aa, Heterodera glycines
MPCSSSSSPSSSSAASFSSVFPVPFPASHPWNPFASAAPFVIAIGSGSVCVKNGECRQYNQLKRHYHESAPVAAEVPSVDEGMNATDKRRKKRGPSALATLSALLLLGVALIVSLAFVAWTIHRMVNEKKRPNDARESGKIELQNEQHKECAEAMKTQAERIEVLESAVTKQKRTEEKETEEPNDNGKKSHDRRQFSQRKQPKELTGNGGRDFVIFMKGRPISGRHFMAQGKKAK

SEQ ID NO: 142404 - protein, 98 aa, Heterodera glycines
MCAQQEVQFNRIWHYDNAKNIHFGRGRNVTNLKWTNGNFEEENGQKKWQKLGEGGENDNGEAFRKNENGRKHQQHQTVFPAEPIPPKRTARERTEEYV

SEQ ID NO: 142405 - protein, 143 aa, Heterodera glycines
MKKAKEEREDEEKEEEKKKEEEEVDEKEEQKVKEEQREDEEKKDEGKGKEEQKEEEEKKEEEEEENVEEEREDYNEEEEEKKEEGKGKEEQKEEEEKKEEEEEEREDYNEQEEEKKEEGKWKEEVEHTADQMGEEEEAEKGRD

SEQ ID NO: 142406 - protein, 113 aa, Heterodera glycines
MSEKVGPVSFDTPEPGEMAFDKPYSEATAQLIDQEVRDMVSAALRRTRELLMSKVEQIERVRETVALRLLEKEILAREDMIELLGPRPFAEKHTYEEFVAGTGSMDEDTTLPK

SEQ ID NO: 142407 - protein, 146 aa, Heterodera glycines
MHFIVRLAQHSLAHGVARTFFDFVQCLPKTEEELQQKWTRTGFRGRNSWCLSEDTDCTEYIERFGTVATVDAVLSALLGESVPASIADELQTNPKFGQVLAKLDDIEDEFILRTTQYNILFAKELMESAEGQGIIEEEAHKCTFLI

SEQ ID NO: 142408 - protein, 129 aa, Heterodera glycines
TCSTVVKYLNRVVQNADKCGIKDCVDGGNLRVILAELGDNFYATILAHALSFAYNLAGAMLLLCDVSTYKKPFSDMTFYGSSALPNGTKGPNADDFLYANGTDSIAASTAELSKDEMFVEDLLHAHEAK

SEQ ID NO: 142409 - protein, 34 aa, Heterodera glycines
EKKRVPAWCDRILYWVKDKNVGIEQVTYESAHQG

SEQ ID NO: 142410 - protein, 45 aa, Heterodera glycines; identical to SEQ ID NO: 124527

SEQ ID NO: 142411 - protein, 32 aa, Heterodera glycines
ILVKNFPKHFLSKKGIKKFIYIIILFLFLLIF

SEQ ID NO: 142412 - protein, 101 aa, Heterodera glycines
MDVTPTLQCAFECFVFKVSAVRTNYRSWLRSSSIHEPSDPPIRLEFILQQNTERYTTAPTYGSTPKAWLVRQLPRNVGQRPQVISNDLCPSADGGIWLCQR

SEQ ID NO: 142413 - protein, 71 aa, Heterodera glycines
  unsure (1)..(71): unsure at all Xaa locations
VVNRNHLGNDPAAGSPTATLLRLLPGSSXLRLNRFQSAYRPKPEXNRPRISRNGSVPGSDGRCVQRAGTYS

SEQ ID NO: 142414 - protein, 55 aa, Heterodera glycines
MAADGKKIEDSERPFVVWQRLDPSDKLGAPKPAPVPSKVKPSSGQSPSPSGIERR

SEQ ID NO: 142415 - protein, 93 aa, Heterodera glycines
MIGVLGLGAVVVSLWDKFNDKRYRPFRATIFSLMGLSGIIPTIHFVYTDGFRQLVAETSFYWLVAMAVLYLFGALLYATRTPERFFRMRNKKF

SEQ ID NO: 142416 - protein, 45 aa, Heterodera glycines
MFFFCCVSILGYPTYVMLNLDNVRPFKQTHFNDELNEKLEERRRL

SEQ ID NO: 142417 - protein, 174 aa, Heterodera glycines
MNTAISKLFELRPDPYDNSQRKYLRLCLFLNVENASDLADLVKVMDIALIRAELVLEPFILLVAANRALFQAAHNQLSTRSLSAELIYCLSPNRNIRESLATFGIAGTTRALLVAIFDDAKGKKMREAAKHIKGTPVTLEKLRENADEALIRQVINQTVAYYFGELPMLIYHWM

SEQ ID NO: 142418 - protein, 97 aa, Heterodera glycines
CDVKKAVPQNKRNGGAGAASFIRGGNLIMRNAYIGGGAAAHHASIGMGGGGGSMRGSSHHHPQQQMPMYSNASAAAYAQWYYNAAAAAAYGAGGYLS

SEQ ID NO: 142419 - protein, 24 aa, Heterodera glycines
RTLSTAVRQRSSKIYSMPQILWAG

SEQ ID NO: 142420 - protein, 55 aa, Heterodera glycines
MQYNAFKPRREAGQFQNFVPHFTVESPSTLLDNYVSMSTVAFGQLWNGKMGISDG

SEQ ID NO: 142421 - protein, 76 aa, Heterodera glycines; identical to SEQ ID NO: 131927

SEQ ID NO: 142422 - protein, 69 aa, Heterodera glycines
LLIMQYNAFKPRREAGQFQNFVPHFTVESPSTLLDNYVSMSTVAFGQLWNGKMGISDGVRSYLKIPLFV

SEQ ID NO: 142423 - protein, 185 aa, Heterodera glycines
MSQNESLDNAQHQQQKQQQNPNTEAELALQQAQVGLNLFWLIQQAAAMQQQQQQVEEGQGTAPTSSLTERTQCAGGRHHFGVLSKQTHAPGEWQGEGANSPKAFRVQVKVIKARQPRRFAKLAKREKKWDKKEEEEQQRNGKRKGGNEIGEPKEKEGDEEKGGEAKEEAEMGGMAGEALIEYSQN

SEQ ID NO: 142424 - protein, 95 aa, Heterodera glycines
LIHLNDPCPSIAFHLSFNGAVSGYDGGPFSVGGGTSAAADGGRPWRQHQKPTPPLMVAQQNAVVQQQGNADHWQMPTTNGPEMEWKGGEAAANSD

SEQ ID NO: 142425 - protein, 199 aa, Heterodera glycines
MVLIIILIFFATFNGIFGVGEGGEENDLFSDLWKNCFNAKNVQKANVGRNGGQKVTNRVKMEERDGGVEMGAVGIRMPPKLAQMLIKTEPTAAAAVFDQLLKNVKHEPKEEEFEQLDIGKMGVVGIRMPPKLAHSVIKDEPPFDQQREHQQKQANKEPNHLDYGIERMEATENSLESNGKISQKSAKKGAKKKSQWQKE

SEQ ID NO: 142426 - protein, 25 aa, Heterodera glycines
MKLGQNFIFLSNKLCFCQINSECLN

SEQ ID NO: 142427 - protein, 185 aa, Heterodera glycines
MSMCEKEKEKKRDTVVRKGREKRMGDRRNEGKVREQWRKILGGQSKTKRGRTEIKRAREGCEVVALYFSAHWCPPCRNFTPVLKKFYDELKKSPETAHFEIVFVSFDRSADDLSNYLRESHGDWLYIPLGSEHIETLSKKFGISGIPALVVLKQDGTLVTKDGRADVQVEDNLLFFDDFSNKIGQ

SEQ ID NO: 142428 - protein, 18 aa, Heterodera glycines
YREATPEGFVSPHKSGRI

SEQ ID NO: 142429 - protein, 158 aa, Heterodera glycines
MDIDDDVILVNSQSSHAEERPVLKKRGRKSRWEKLLEDVNNAKKSNPAEVEVTDVDERKAANVFDYPTIFWKLARPKYGVFTFMCNECRNENFKRGDKRFILNTGSGQEKLEFTQTFCQDCAKLNFDCTDLIMKHQKKDDGPSAQKNVGRNTYFKMEK

SEQ ID NO: 142430 - protein, 18 aa, Heterodera glycines
YREAIPEGFGLPINLGAS

SEQ ID NO: 142431 - protein, 173 aa, Heterodera glycines
MEPGAKKRRKRKNAENTDGEAMECEEEEDAVDEDAENNWMLGYEEAGEKPESVTTYAYAHAGSRYDHVLIYGEMLRMGVRPELIRQGNHLLEMKARKTGVYTTTVFRDSYKLIPIKLANFVKTFGLEIEGVENKKYFPHKFNKAENYGTVLDTLPPIENYYLRWTLPGRARKV

SEQ ID NO: 142432 - protein, 660 aa, Heterodera glycines
MSFSPNSTIAEFTSDQAPYQNESLTPTEELQQMRITEMERIQKMSLHGGYDSGHKMGMAKPDTLADRMKLLLSTAKGVDAHFLLVHAHKAILIASSNVFEAMFQTDKENSNGTNAGKISANCSVVEEVPDVEPAAFKVMLSFIYTDDLSELNGDNAMAVLNAAKKYNIPGLIRPSLQIPISELRNVFLAYDQALIFELEALRWADEKCRQNGIECSSGNRRSVLGPALFKIRFPNIHEEDFAKCVVPSGVLTVEEVLGVYQFNSHPFLYLRGVPGLYSSKFPSHGRIFNWNKAKGNRRGTLSMEIEKMSEFARESVGRSRFSDAVYINGFPWKIEAEIRKKTEDTDEKKYLGFYLLCDAKEGPILINIKNIIIIKIGGPWNCVISATYRIVSEKTEAENSIWTLCDRVINRSNIGRGFGFLITFAELMDSNKCFYNKAEDKLALAIDVITVDEPKMEKFISDPNKSNGTLSMEIEKVSEFAREIIGSQRKSETVHIKGMPWKIVAQIEKKDESTDNEKWLGICLLCDAPKEAENWSCKCSANFRIVSLKSGVKDFRRKLDDDVFDNKTYSWGYANYISFAELMDQSNGFYNREEDKVTLAIDVTVKDDKKEKCISDPDKSNGIISMEIEKVSEFAREIDRSERKSESVTYINGLPWKILA

SEQ ID NO: 142433 - protein, 104 aa, Heterodera glycines
MPSSMDRMKHLLSTGEHSDVHFLVLPAHQLILKSASDVFEAMFRFDAKKERPENAPANCPADVEVPDIEPSAFKLMLSFIYTNDLSELNGDNAMAVLYAGGFII

SEQ ID NO: 142434 - protein, 159 aa, Heterodera glycines
TFGCICGRILTKDKEICGKIEQIALESKGKAAKIEQLIVENRITLEKKTAKEKQKEFFVLWENGPEDVTLLKALKICAEESFDEMHKMDRIKNYESKKKALRNFAESIGVTFIICMSKNLKRKTKKDKFLSRMHFEKISQLIDNQSKGDEFKELFSKNG

SEQ ID NO: 142435 - protein, 180 aa, Heterodera glycines
MTLEGERGGLDALLTARLDEDEQFIATINYLNDNLRLDAETTEQKLRMVLEDRELELNQQYLEQLEKMNDRVQGFVQQIRSMNSICCELTERIQTNKEKTRELLKRTAVLQTEKRELGAKNAFLDEFFAKYSLNEEEETALALPNQQGSPSDAFFSALRRLLEVEKNVTEQLALEPNSLA

SEQ ID NO: 142436 - protein, 256 aa, Heterodera glycines
VRGALQCHRDPSKHQNVEVRVIDRDGWGPLKVLDPDDMMGVSFTEQDGTFQLDGCGNDMNFLPGVPNLPDPFVRILHFCNSEEGETIELPEFRIFVVILKLFVLKLAFPLQPDTYDLGILVLDQKTLPNSTVNFPVPENPRRRLQQAKRPTEVGTLDESNGKKGAEDGFVTVDAPKSHNAKGLDDLLPPGKTVTKTNGDLLWETQSVEMEEVPAEYDTSIRQSQQHNWEEESKGDGNERKNWTKKKQPTKEEKKRK

SEQ ID NO: 142437 - protein, 90 aa, Heterodera glycines
GGRCAIDLLFLREFLNLYSIPEKWLSLFLRNFIHIQKLLSMRGRAVRNRHFIFERIFIFRLYPRKMAISFFDKFYTHTNALEHDREGGAQ

SEQ ID NO: 142438 - protein, 121 aa, Heterodera glycines
FGDAQLLINYSDALFHDGTTLIHVIGTLSAQLSVWIRWMDSELMEKQNSMRIVDRKIYEKIWANARLEFEVKKGVLLELFAKNKNTKLNCTNIENFANIMILIIRAAKNICKNGQTMYINM

SEQ ID NO: 142439 - protein, 49 aa, Heterodera glycines
MNVCVNLVEFCGHDNNNTTSADLQLIGQFISTNCMRISGEFNIDGHLLV

SEQ ID NO: 142440 - protein, 1004 aa, Heterodera glycines
MDPESVEKTAFVTEFGLHEFNVLPFGLCNAVATFQRFMTRLFEGMINDSVFVYIDDVLIASESWSEHLKHLREVFKRIDEAGLKLKISKCRFAVKEIPFLGHILTREGVKMDMDKVKPVIELPTPTSKKELHSLLGFLTYYRKYIFGFGSLAAPLFRLLKKDVKFEIKEVELGAIKALKKSILDHAMLYFPDFKAAVDDQKRQFVMLTDASKIGLAAILCQPDENGNLRPIYFASRQCNRHEARYCPTELEALAIRFGTKKYAQFITMIPTRVITDHRALVSMFKSKNETGNSRVDKWLMAMNSRFILQVEYQPGKKNILADLLSRSKTLLNATENVESENSKAEIPISKEIFRIGQIRENQVAEQAEDLSDEQRKDWVEKTKESELAFVYEFLEKRVLPHDVRDRQKLLSSLHNFSLINGLLFRNENDGKLQLFVPKEFREMMIRERHSGICAGHLSGKKIFRQLSELYFWPNMYGECIRAALRCRVCAHARKPRSNEPPLNIVETKEPLELVCIDILSIGPAASSNRYILVAVDHFSKYLVACAIPNKNAETIAKNVVKNFICILGTPKKLHSDKGKEFVNETLEEISKTLKIKRTTTSGYDPQANGVTERVNQTILGMLRKSTYSAWEWDERLPFVVFAYNSTPSEVTGISPHHLMFGKPANFPLEHELKFAVNPLYTIDQNTYIQLFRESLMQLVDEARKNSQISRAKMKEHFDAQAKVTENKFQIGDRVMVIFPGSHIRSPHKKILWNHFGPFRITELNKSTATVIPSDNPYGNPMTVPLERLVRVPKELQNICTMPKGKNPYKNVLNGLISVAGLICQENIKLYGEEKLNSKPDGIIGQLRSIAFLGGEEEHMETEQTDDKEAETNESENEENVEEKMDGKEVDANGSEKEANLEEEDQISVVQEEEEPKTLSWTLACAGDEHKCCSDVVVADLDAVLDRSGIGLTKIENPLKALLTMFLLKSEAVASASAAKKLISQILDTDADWELATYCSAREDD

SEQ ID NO: 142441 - protein, 344 aa, Heterodera glycines
SPCVDYRGLNSVTVKDAFPLPNIDSTLLALGGKKFFSVIDFMSGYWQIRMDPESVEKTAFVTEFGLHEFNVLPFGLCNAVATFQRFMTRLFEGMINDSVFVYIDDVLIASESWSEHLKHLREVFKRIDEAGLKLKISKCRFAVKEIPFLGHILTREGVKMDMDKVKPVIELPTPTSKKELHSLLGFLTYYRKYIFGFGSLAAPKEHWTTQCFISRISKQQLTTKRQFVMLTDASKIGLAAILCQPDETIYFASRQCNRHEARYCPTELEALAIRFGTKKYAQFITMIPTRVITDHRALVSMFKSKNETGNSRVDKWMAMNSPFILQSEYQPGKKNILADLLSRA

SEQ ID NO: 142442 - protein, 108 aa, Heterodera glycines
MIEPGKSVNLLCKLKCSSCLNFKYEEEKDGQNGKYGQNVTDGQNETDKSKQPNKLLLTKTSYIKKEETENEIKIDFELKSAIFNGNAAEIVRKEDITKGNEFTAKYLD

SEQ ID NO: 142443 - protein, 94 aa, Heterodera glycines
PKYSYLFFLIFLPQTWYQQLPSLVWPYQTILRYLKRKQKKFLTKKWLSLFSHFFTANLVPTVAFSCLALSNNLTIFETQTKKILDQKIAISFFS

SEQ ID NO: 142444 - protein, 196 aa, Heterodera glycines
MHPQDHYPESEDCSKAEQIGQHYIESAASPMLFSCKYGPLKPNRNYSATVWAENKAGSSIAVSIGSQCVMDYAEPEHIEPPSVASRPNISSFGLRFEHEPNQENGPIVCYYLAILPLPLNVSIEMLPMPANVTMDNYDKALKNNQNQHAITNKQFFAYIAESYLQYPRQTVVGDRETSAGTDACTVPYMTRHTPSD

SEQ ID NO: 142445 - protein, 66 aa, Heterodera glycines
MSFGLGRAESVTRLSAFEPRPNPSMDNHWFDKFYYFSPIFKGTQPYKCHVARRALPPGGTVISLPL

SEQ ID NO: 142446 - protein, 82 aa, Heterodera glycines
MTLLSKESSGEGEEKGMEEQRKRKADQRHKSGEKQKQKTKSMEKAKAWRKSSCQMGGGEADQTDQSIKRKQKAFINSLIILQ

SEQ ID NO: 142447 - protein, 77 aa, Heterodera glycines
MSPVFFRATVSQLSVRVVAITTNSIKVQWYPITAGQIDNKKIVKYKLHYKCTSPDHQWSETDAYEVKFEERLYFDFV

SEQ ID NO: 142448 - protein, 706 aa, Heterodera glycines
MQPDLENLFFKIELQMDLIAWSESATDKAAKKAHKREIMSLRSDKDKLFPEEAQVIVIEKGEENRSNLLATEISLLTMHDEIMEGLIENEQHFLDKVKTIFINEQRLQKMIPRMTLAYQILMENAKGSKQQRNENENNGKEDDEEKGKGRGEIVEEKGEERGGANGEVEGGGEKVGENSEGRKVTKEDEKTRKREEKGDEKEERDKKEKGEERGGAVEEKGEEGKSGEINEEGNEKGREKEPAGEKRKAEEKEEERGGAVEEKGGREEKGRGEQNGVENSEGREEKGEKRGGADGEKGEEEKSEEINEVGDKKGREKGSESGRAENERCVDSDADSDLISCYQHLMLADRPISSRDKKLLEVNTVYYQLKSLINQLLSIIKQIKKGVAIEIEIMAQKTLLLGKPENFDEKIVKICYLKSFWAYVISNRNLYNESESWRTYFTYNFAGKLNAPFPTEGEQKWDNSICEEMKNVLEIFQGFLKSPTFEGTQEFVLNNLLEKNKKFVDFINYNFGKMPIFKKYARFDDVHEMDLFYLALFSSTDSDTTFQAEIFLGIKLMESIIYQTEKVVINPANFTEIIRTRAKLRAMVAVQLHFWHAEKFRIICYQIAYVTYLVNKRNFPSTDWQSPTECFLNTREETLSSMRTVLQSSHWDFVVNRVTGTVRNGISDTVRHKRGAIALLEKLIGGTAMVKLWENKEARAKLMEAN

SEQ ID NO: 142449 - protein, 218 aa, Heterodera glycines
MAIFVMSNSFGKMKLKGRKGHETMKKIYPEIRKIWSEKFCEICAQIKTNVQENSFEKIYKFWHKLADLYNKIPILEKHEKILIIYDEFALQRTDELLWRAKDQLMVEHSEIVTQLTVCQSAECQNALSRFLAHSIGQMKGAKHRLRTFFTSPLKGTAILDNLLQGNASFAQVFRSDLTTDEISQLQVKYYLNYMDSDSETDVHTRALFMANFLAFYHW

SEQ ID NO: 142450 - protein, 135 aa, Heterodera glycines
MQTRYASSVRFHLIGFTSSLTLSSKCFATFPHGTCSLSDSWPYLVLDEVYHLIWAAIPNNPTPRHVKMGRHRQLDRSCTFSGAPVKGNLNKRANPSSRSIRYTSQPQRSCDSALDSSQFTRPYYGISLVSFPPLM

SEQ ID NO: 142451 - protein, 41 aa, Heterodera glycines; identical to SEQ ID NO: 140664

SEQ ID NO: 142452 - protein, 68 aa, Heterodera glycines
MKMPGRPNIPHKNPYHYKVQQQNRNQVQYKQQKTIEETIQEQEKGRSSVLGKKLRHGGRGNPVHALNY

SEQ ID NO: 142453 - protein, 237 aa, Heterodera glycines
MDSFGTVAWILRPTAQTTGTAVGSMEYEEEENGTGKLVHSDTATVTTPTTAEFRLEKEAPSSEKDGAEEGSGGHGTLLFIESDDGEEEEEDIEDTPVATDSPSATTATVVDDSSNTVKGVEQRSSEHSDMTNGTGGGGGSEGAKLLGGGEEEEPVRMPLLNYLCAFNDCSMKELQLLFHSVHARQRMVAHLQQHCRLHTAHLKPAERNIALHCHDLSVQNANRTFACGGYLELTVSR

SEQ ID NO: 142454 - protein, 107 aa, Heterodera glycines
MPDAEQRVPVPCTRFVRTKRAEVFTRRGTKLYQPVYTKGLVVALDEREAGGGAGNAYFTRPFGWYDDDDDADRDNAEEEEAEDGELLDESDTDDDDDDDEIDFLVLG

SEQ ID NO: 142455 - protein, 95 aa, Heterodera glycines; identical to SEQ ID NO: 124528

SEQ ID NO: 142456 - protein, 74 aa, Heterodera glycines
MNFGTKNGMTFNSFLTQFKLLIRRNLSYFLSTKCQTIEKKRRRKKWQKQSSSPPTGGCVCSICFRLSHLGLELR

SEQ ID NO: 142457 - protein, 77 aa, Heterodera glycines
MQPFYPLICSKKQQQQSLQVHCLRGKRRVQPKRRNFERTKAPFWEAWHLKAAETDWHMKISNLKLRISEIGCRSKCN

SEQ ID NO: 142458 - protein, 26 aa, Heterodera glycines
MGWAVLLHFINGVGVVQAQPAILIAV

SEQ ID NO: 142459 - protein, 35 aa, Heterodera glycines
MILFLFTFLTHLCFITINANNVKITNVLGDGNCLF

SEQ ID NO: 142460 - protein, 297 aa, Heterodera glycines
MVDAHFAGCAHIKSEYVVLRSETQRQEGGNKPPNESNPLEGNSHEGILPRNVRARGMDRQREQKMAKARAENRQKIVRICPSVLFESEGRKCKYGEKCDAEHSLTKYWAKKPPDIGEFWHPTPNTIFLWKGLPSELSLMKRHPSEKIFGVQLAGGYPDSLGKAVQLITDNFNVDFIDLNLGCPLDSVNEKGAGCSLANKSNKLVSVLQCMQKSATGVPVSVKMRYGVKEGERTAHYTMGTIAERSPPQLLTLHPRSREQRYTKAAEWDYVLECEQRINGRFPFFVCGDVMDYEEYYQ

SEQ ID NO: 142461 - protein, 131 aa, Heterodera glycines
MCQSERNAMNSDEMKRQIQKLTTNGPLILSDMKAAEKELQKSKEQNENEQFRHNFADLATKLCSKTLPGGHFKNAVIEFLQRKKGQMLWPSDLAQFLLTKMNVVRANNANENLEIIIKYIHKVARPTVQMA

SEQ ID NO: 142462 - protein, 554 aa, Heterodera glycines
MLYGRKFTLLTDHKPLLAIFGSKKGIPIYSASRLQRWALILSNYEFDIKYVNTKAFGNADVLSRLIANYPRPSEDILIANICNDTDCCVNFVFEAKIEQLPITAKIIAEETAKDEILQQISAFTKQGWPQKLNDIKLSPFLPKKGQISEIEGCLAYGERIIIPSSLRNNILKSLHFAHPGIVRMKAIARNHVYWPGIDSEIERVVKQCEECHSAAKNPTKATLQPWKAANGVFERIHIDFAGPCADGQTYLVLVDAYSKWPEVWQMERTSSQLTISMLKSFVHRLGIPKEIVSDNGSQFRSAEFAQFCKEFDIKHTFTPPFHPMSNGAAERFVDIFKRSMKKCRQEGKDWLQKVLLAYRTTPNTALNGHSPDELFLGRRMRTRIALVHPEKQKLQPPNLENFQQFQGQYIKKMENQFNIKHGAKSAIFQNEEPIYFWNLKYNKATWLPGKIIEKLGTSPTYRILAPTLGRAIHRHANQIRRRFPIELEDNDQVVENDQTQAQNPQQSPIAHKPQTNRQQSPAQPVLLRRSGRVKQAPQRLVLDPTKPKYGLIRS

SEQ ID NO: 142463 - protein, 151 aa, Heterodera glycines
MLVSAPLIQQQQQQQVFQQQRPSTSASSADAVLLPHATEASAPTPYQQQQTEDQLELPTSVPSAADSQRQHRATQQPQRFFKSGSKSKKMFYGVFEVADHETGLRPALPFICPVNCTSTNTCASGAPYEQHDHKIFDNFNALYKHQNYTLL

SEQ ID NO: 142464 - protein, 56 aa, Heterodera glycines
MPRLLKLLVNFLTTVNDILNKLKFADIIGIFDASYSLLASWLTGQSPDQTVPLVIG

SEQ ID NO: 142465 - protein, 256 aa, Heterodera glycines
MEDFYIVLPSNTPGPGNTASNFTVRLPHTLELDSKWSVALSAIIYPYSFPSISVDEDDSISVKLVNPNYREDAGNSDEESQKFINLSVKIPNVQFQKCLRYKIGGSSLNDGTPNKRAKRQTELSESGAGVIEVENFFTRNPFDYWQQIGELRKKHYQLRERVEKMTKEYNSTADGERKTFLSTELGVFQGRETFLKKHLHLIEEEAKRRDGEQQESNEQRLIDRFFARYPANYREQLDEWRSSYLRDVLDLQTKMG

SEQ ID NO: 142466 - protein, 34 aa, Heterodera glycines
MALWPTCLDFISIVQLNRDELLHQLEKALLIFIF

SEQ ID NO: 142467 - protein, 95 aa, Heterodera glycines; identical to SEQ ID NO: 124528

SEQ ID NO: 142468 - protein, 133 aa, Heterodera glycines
MVESVSSETNIVEMEAKSDAKTPGLPDWAHGFFSALDKNLLIQTANVANFLSATQFVEHLANFIALKSHSRDFDSLIPPIVILFLAFFERKYNFAFHHAQCREMDSSAEIMEFLNVGTDDLEGEELRKELYNH

SEQ ID NO: 142469 - protein, 35 aa, Heterodera glycines
DICGQRNAKLSFLFQINYTKYFYLTHSPIILFNDL

SEQ ID NO: 142470 - protein, 69 aa, Heterodera glycines
MNRKKIENLQKCRKRKFLDNNDSENETLSADHREQNENNNDRDDDFEEHAIVNFELGETKRGGVCIWFN

SEQ ID NO: 142471 - protein, 118 aa, Heterodera glycines
MDDDYDNYVPQISTMDYSLLQPGGSGGGGATGGGGTAGMGGSGGQPQQQHFLYDAGGGGCGTVMPPGAVTASGGRAGLPPGSGGGHPQFGGHFGAAEFGGAMPGQVNMPNCKAKDGLY

SEQ ID NO: 142472 - protein, 143 aa, Heterodera glycines
MAPPPHMQQMMAHRQQQQQQLMGGGQPQFDPRYGGGSAAVVPKMSAAAAQMMSQHQQSTAASGTKAGKSGGSKKGGKKASAAAAAAAAAAAAEAAGGGAVTVMDHGGNQAPCAAVGKGKAVICRLPSASFCLMRHFVHQAKSS

SEQ ID NO: 142473 - protein, 150 aa, Heterodera glycines
MLIVSLFFVFCQILLLLTVKGDGNYSRQSDYGAEKTVDEFLSKFEALSARTDSDDVGVLMAQLSQNISSFFELALPVGSLIAGALQISDKVIHNYHSTEYTPESEQYKAMEKLHDKFDAKLKELDTKIVRSWQKIDVSTRIFNSYEDVIS

SEQ ID NO: 142474 - protein, 165 aa, Heterodera glycines
MISKCNGVCRLSIGYDYNALEPAISAQIMQLHHQKHHATYVNVLNTAEEKTQEALSKGDFRTAIQLQPMLKFNGGGHINHSIFWTVLAKDGGEPSGDLLKTIERDFGSVQKMQEKVSTKAVGVQGSGWSWLGYNKELKRLQVAACMSQDPLEETTGEHSHTNILG

SEQ ID NO: 142475 - protein, 69 aa, Heterodera glycines
MVTQFLRTIPQFPPALDKNGTVLLGTVGIDRMPSPSPHAANAPATNPLKWVPAAERAAREGELRRSKRK

SEQ ID NO: 142476 - protein, 132 aa, Heterodera glycines
MFVKERFVPLSKFVQQSPVISRQFLGEFCTNQHGSAIAKLNGFDKIIAFLWHGFLEEPTDEFLFLGLKYEKDQPTDLLGKARLVEKLDEGRTRDNSEGGGHEKAQRAEGPRNAEEQRLILSILWHLKHQKGQ

SEQ ID NO: 142477 - protein, 143 aa, Heterodera glycines
MKCRDRTGPGPVPVFTGPGNRNRKTALPIVYQRVRHKIKDELKESAFITLTTDCWSGSTCNLLWYIITLFINHHGFYCSLTAHSISKWKSMSRVLAITEFSESHTGKNIALKIEDLLLKWGIPKERVHAIISDSAANMKRVII

SEQ ID NO: 142478 - protein, 33 aa, Heterodera glycines
MAEVKKEPIFTEVKKEPIFAAETPAAEPRRDSA

SEQ ID NO: 142479 - protein, 54 aa, Heterodera glycines
KKKGNETSGQLSASPVNNLFEGVELPPFTDNQMNVWFKYLSCINSRIREITEDA

SEQ ID NO: 142480 - protein, 118 aa, Heterodera glycines
MPNTVSVQSPATICGDIHGQFYDLMKLFQIGGDILETNYVFLVSHQYGFYDECQQKYGNSVVWSWCCRVFDVLPIAAVVDNQIFCVHGGLSPELPTLDSIMCLQRNVEVPANGPLCDL

SEQ ID NO: 142481 - protein, 38 aa, Heterodera glycines; identical to SEQ ID NO: 130624

SEQ ID NO: 142482 - protein, 121 aa, Heterodera glycines
MSEFESECSGTAKLNQLGPVEINADTLYTTLVVHAVEHHDGGDQEMPSKNKNNANTDGTTIDGGGQRRQIVDEEEELKEEPMDVRRGQTQTMEADEEGGQCCNEAEKSGGTASSLDKTSDG

SEQ ID NO: 142483 - protein, 147 aa, Heterodera glycines
MQRPIIVNIIALANLGTGIKLNSLTITECEFKYNPRKFNAAVIKCISPIKATALLWESGKMICLGTKSLIDCENAIKKFIEIIKCSGCPGASYTGHTIENIVSTFKFGHEIELNEFRKNRRAFYEPEIFCGLNFKRGKSMTALIFWT

SEQ ID NO: 142484 - protein, 238 aa, Heterodera glycines
DHFHLLAIGCCSVALFSVLALAIGVPILYSQIDSERSNILAKSQKFKADSNRVWAVLHFPTFTEADSNRVWAVLHFPTFTEAKALFLSRTWRPKCLRLRSCSMLSCPQGPPGPPGLPGPDSPPGQAGSPGESGVDGLDIVVESELDLPCTVCPGGPPGQRFVHGIRGHQGERGMSGIAGLRGEEGIEGGQRFVHGIRGHQGERGMSGIAGLRGEEGIEGREGSPGPRGSVGPRGNLPK

SEQ ID NO: 142485 - protein, 148 aa, Heterodera glycines
MTTKEGITLWCTRVDKTQFIPFDVVYDLPGHCFFRVKNKARVFNVPYSDLSSDTISTTTTTTKTTTSTQGTQTEEQELKRKAKVALDLVEAGLLADAMQDGARWKKAKTAINVLGNLLLAESLSNNNNNNKADKKDEPPVNGPSTQPI

SEQ ID NO: 142486 - protein, 127 aa, Heterodera glycines
MGQVKKPQQHVKIGQLIKDNSNWLCALARTKSQKKCKKLILKANTEQLLALVEICLNLVASRFQLTTRQTKRLMPYVHTVRRMSRARSERGARRAIVQKGAGFGGLFAALLTPVLIELAKSVVSKNA

SEQ ID NO: 142487 - protein, 340 aa, Heterodera glycines
PPRPPAPPPPPPPRGPRPPAPPRPPPPGRHPPRGPSPPAPGPSPPTSPPPRPERPPRPTPRLPSPPRSKEKTEPRPPAPRPTAKREKQQAKLDWKKTEHPTPAPRAKREPELKLDPRPSTSRQAGYFPPTPKIKPKYEHQPTKRPVPYRIPEREPKIERTPQQQQPPPPTAVVEEMPYVPPPRRGTKRPHPKTPVTPSVTTPAPPTTAKPPVTVPSPTTKPITPPTPTTTTPTPTTKSTTSPPPTTTVPPAITKPSTSPPPTTTVPPPITKPSTGPPSTEKPITTVPAPPKTTTTTSTPAISAVPSPSVKPTIPVPPSCWYYGRVGGAEHWATRAGASRE

SEQ ID NO: 142488 - protein, 35 aa, Heterodera glycines
MFGFFLAYQNFIEPGSFYSLSNRPQIFFYSLTRPY

SEQ ID NO: 142489 - protein, 176 aa, Heterodera glycines
MVVAFVKGQQEIPFSEYSKQKYEANLGIVYFMINNWHCDKIDEKFKEYERTECQKYRKYLDILYEYLYREYVGIPTAKPKFVFQNQIEIDGPIIYAVNCLTKISQFYLIKSVGQKYEYKLNKMFYLVDNFEPKLLNEKRFNYKFKLKDVSKMPINEMILQLAIETANEWQTNESLN

SEQ ID NO: 142490 - protein, 130 aa, Heterodera glycines
PYPAGYWHELTMKFHFSRRAGCMDFFCARYTGHSGPNNARNLPKVSYVKAIDIWLLSCMTFVFFSLLELAWVGYLSRKEADSREAAKEAQDAVAAVVQQVTVPPPRYGSVDAQSVGASYQQLNMQQRLIK

SEQ ID NO: 142491 - protein, 84 aa, Heterodera glycines
MESDVTDGLWDKMVLCLRSIVALPPNLDRQSVYPNSSSSIGLALIVSNFRFEDRDNRDGTNVDEQNLRSKSIPTFFKWFSIFDL

SEQ ID NO: 142492 - protein, 82 aa, Heterodera glycines
MSEIGIPCHPCCGSLGQSPLMQAAMSDNLEACCLLVEEWVAEVNQPNIEGEFTALICAASRGYLGRKCRNGGHMLEEFGKTK

SEQ ID NO: 142493 - protein, 144 aa, Heterodera glycines
MGVTLARKVIQGGSAHIGGDGGDEKSASPNKCHLGNPIRHRVHTLVGIAGANYGLCLCTANLAVLSSPACNKETGFWTHSDGCAAAMTYKHHQMERRRLEEKRHCDDGKSVGTECQSKEEEEEQYSTVLRELNAPDKAKDAIFV

SEQ ID NO: 142494 - protein, 46 aa, Heterodera glycines
MNKWSALVLLIALISALDSAVVRQQRAADADASKPEPNNEKPGKLK

SEQ ID NO: 142495 - protein, 56 aa, Heterodera glycines
MENTHARNWEEFIGKIKQKLGVTERTIEKWAKKITNIKIFQKAEGLHNCRKMELNK

SEQ ID NO: 142496 - protein, 92 aa, Heterodera glycines
MYWLRGTENQKADELGTLAKIIQDEVGPITAMPAYHSFVFLRVSALSERNANLPVGLSNTMYMGQTGYSMLEVYMHHWLPKNEEHFKLLLFL

SEQ ID NO: 142497 - protein, 343 aa, Heterodera glycines
GEPGAPPLGPPYHHISSSNANNINNGTATCYQPCRDGLPGRDGVPGAKGEPGVPGMAPSMLAHVGGGTNTLLQGPPGPSGPKGEKGDLGPPGLPGQPGKKGRKQHHHHHKQHHKNQKQLLAGAAIQEQELPYSKERQAQYGDDINYQRQQHALVQQLLPMLKEQLLRNLSSQAQHPFGIHTVPGPPGPRGLPGLQGLPGHGGEKGERGDIGLPGLPGQPAPPATPTVFTGNGQPKMVIPGPRGPPGLPGLPGPPGPPGPLGPQGTLGLPGLPGPMGLRGPPGVDGRSGLPGPKGDTGPLGPPGTKGDRGPKGDQGLPGLDAPCPPGPDGLPLPYCGDPAPLPE

SEQ ID NO: 142498 - protein, 41 aa, Heterodera glycines
MVWIQVPRSLDFSWTWIFLDFCPGNPGPDPGPGFFKMSISS

SEQ ID NO: 142499 - protein, 30 aa, Heterodera glycines
LCFFVHLFQSASALRFCVLTLLFFPFISIG

SEQ ID NO: 142500 - protein, 51 aa, Heterodera glycines
MPHTFRTFTSAKSNHWDFDNTCCPAPLSLQIKEKVDIYTFIARALGLKWTE

SEQ ID NO: 142501 - protein, 413 aa, Heterodera glycines
RFQWVHVPRFLVPGGLFKLYFYWDTYWILKGLYFSNLVELYFSNLVETARGMLENFAHLLRFRGFIPNSGNVQLSRRSQPPLFTQMIADLSRRSQPPLFTQMIADYYEVTKNKSFLAEYLPMAENELAWWEANRTVEVQPDQSADQSAAFKAITDCPRPENFLEDYQLGMESDDATFFWSSTASACESGLDFSSSSTASACESGLDFSSRWYKWHRIESNAKDCHRTSEVLPVDLNVFMALNYQTLAKLYDEELKEQKARKNKEIAEAITKARKNKEIAEAITAHIDRTFWDDEEGVWFDFDLTEKKLRKKFYPSNIYPMLLKNDGKGTGEKCQKVVEYLKRSGAIGFKGGVPSSLERNSNEQWDFPNGWAPQQHLVVLSLLKCQNVSGEAAGIARKIAEAFLTTTYNGLFTP

SEQ ID NO: 142502 - protein, 168 aa, Heterodera glycines
MKLNGKLEGKKKKCQKIIAKHLGTNIRNIYYWKKQLKSGKLVQNQKNDEQKREIVEKYFKIKIKFMQNRKHSRKEWEEFRAKIKQMFGIYYRTIEKWAKKIGVFENVSKKRKILTIGEKMELATQYYQIKKENPKIKEYEIAKIFNIPKNSLRKYKAKFGIKPKNKLH

SEQ ID NO: 142503 - protein, 179 aa, Heterodera glycines
MPRHCFFFQLLISLLPLFSSGGNGSTFFFHKVWPLFFRRMAFGKMPIPRQKWLAFFTDVQKDSDVFTRDHVKVNCSEPICIGHYREIYCEGAIMWAAWYFGLQNECPGNRMRFEAEVILKNFDSSFDQQGRLYREDFRRFCKENFDDRPYLEEAQVKDWTADLEFLDRITSPKMKSNCI

SEQ ID NO: 142504 - protein, 38 aa, Heterodera glycines; identical to SEQ ID NO: 125263

SEQ ID NO: 142505 - protein, 64 aa, Heterodera glycines
MCIRTAMQTGAMPTVVIPDNDWFRYQEAIKKFTIKSDDNPELTSEPAIQFIEKLLQGAPGDEKK

SEQ ID NO: 142506 - protein, 158 aa, Heterodera glycines
MCVLDKQKILAGVSDGDGAVAQHAPDITLGEGAKPLLDEEGEENIKLDGYNGAIPPGSAGRAKDDLEVQPAKKERSVLQAKLTRLAIQIGYAGSFVAACTVLILGIRFCIQHYLIDQKPFVVADFRYFVNFLIIGVTVLVVAVPEGLPLAVTLSLAYS

SEQ ID NO: 142507 - protein, 95 aa, Heterodera glycines
LFEYPKRTLEKIDFFVFGAVPPNRCAQIYGETEFFGNSFPIVCTLIQRWIFAPHNCLSTPNGHLKKSIFLFSGQSPRTDAPRFMGRPNPSGIASL

SEQ ID NO: 142508 - protein, 25 aa, Heterodera glycines
QITNTNVYQRHVTHNCVTLNSNNEH

SEQ ID NO: 142509 - protein, 107 aa, Heterodera glycines
MPSAVLASQQWWWLTAMAANPNGTSNSSELCRPKMLPRINDELGPAFLFYWEQLICDGWEQLICDGWKLSVMNWVQLFVVNWDLWDQIYDVGSVFYDEMVTIHCDKL

SEQ ID NO: 142510 - protein, 49 aa, Heterodera glycines
MVEKETDIAAAVPNNAANIGHVEAVDPSASKSAKEVPNNTEKHSAEDLM

SEQ ID NO: 142511 - protein, 64 aa, Heterodera glycines
MTLKCLPPELLFELMPFVPAENAVPDAISSCRLFHCLLFKRVLNWKKNLITKDLEVVFKLYLKR

SEQ ID NO: 142512 - protein, 118 aa, Heterodera glycines
MSEEYGGYEIEEYCCGGAKQYALKMRNNQTGEIEYVMKIRGITFDVDNRKTLHYDTFREMVLNYGKGEVDPAFFVYKNDFGPTRDSKVVTREKHKMYRPVCQKGIIDEELNVMPFGFC

SEQ ID NO: 142513 - protein, 127 aa, Heterodera glycines
RRKHMMNSHEIEIFLSKHPTTRKYFIGVFASDKMPKLKDRHFPYCFVANTDRAGTIGEHWVACFVNSPTEIEYFDSLGDYPNEDLSSYLNLFERILFNERIVQHQFSDACGQFCIYFLTQRCSGILY

SEQ ID NO: 142514 - protein, 82 aa, Heterodera glycines
NQFCDLNKTFLYLSTSIERKDKSNWIPITKDSEADQHVEDVKKGLCEASCYYVDDVDQDDYTNSGFKNRASRFADGAKCETM

SEQ ID NO: 142515 - protein, 71 aa, Heterodera glycines
MMRNAMLLPVVFAMLFYFSALLQFGYALKCRALYTTENATANELIKQITNPGDFKCTRNEKNCGVTFCSAG

SEQ ID NO: 142516 - protein, 21 aa, Heterodera glycines
SVWGTQTIMGSKNPRRIKYRL

SEQ ID NO: 142517 - protein, 38 aa, Heterodera glycines
MHLGFEMALAKTLPQMEKKKELLKMLIYVENALILVKV

SEQ ID NO: 142518 - protein, 29 aa, Heterodera glycines
MNFTRYSLIYPQLRTYRGPLELSNYTKNV

SEQ ID NO: 142519 - protein, 24 aa, Heterodera glycines
MEKACKIWRDYIDFSALELLELAS

SEQ ID NO: 142520 - protein, 54 aa, Heterodera glycines
MCCHCDFIHIGQTEVVTRTMSQQWEVQHDMYDYDHYPKDDGPKEKGSKNCCTIM

SEQ ID NO: 142521 - protein, 18 aa, Heterodera glycines
YREAIPEGFGLPINLGAS

SEQ ID NO: 142522 - protein, 118 aa, Heterodera glycines
MEEKQKFIHQFDKIIGKKEQQSVGRKDKLEIAERVGINLRTIDKWKSEMGLKVTKESQRIALVKEYYRIKKEDPKVPTKEIAKSFNASKATLFYWKKQFDKNNYESSSSPDGPEQLSW

SEQ ID NO: 142523 - protein, 44 aa, Heterodera glycines
MKLVPRKILGFNGLPLLGLSHANFSILSTGESFRFCLLKAFDEN

SEQ ID NO: 142524 - protein, 37 aa, Heterodera glycines
MNANNKLNIRSSSLPASYKTVLVNTIILNESKWMSAK

SEQ ID NO: 142525 - protein, 43 aa, Heterodera glycines
MPMPSPTPDHRQRRPLPWATNWSPLRWTPTGHTLRWWPRQENK

SEQ ID NO: 142526 - protein, 44 aa, Heterodera glycines; identical to SEQ ID NO: 126591

SEQ ID NO: 142527 - protein, 146 aa, Heterodera glycines
WPFLVRGAICLVYSDNERDSSLLNSWLIASVGTLLRGISVFSRTKLSNTGSVMPLDVRGCTRATLAKSACLPSPKGVGKPVKICRDWDRTLQLLSVNEEFLVGASHQLALNTSLPFVHTARRCPGLSHFEKFGDGCSGRSVCRLEP

SEQ ID NO: 142528 - protein, 92 aa, Heterodera glycines
LFEYPKRTLEKIDFFVFGAVPPNRCAQIYGEIESFRNSFPIACTLILRWIFAPHNCLSTPNGHLKKSIYFCFRGSPPEPMRPDLWGDRIPRE

SEQ ID NO: 142529 - protein, 77 aa, Heterodera glycines
NIYVTGVVGAENIANAEAAGRRKRRWSQPLDETGIVFGQLQIPTAIVTLPKLGRICYSDAGLEAKIECADMDGNRRQ

SEQ ID NO: 142530 - protein, 181 aa, Heterodera glycines
MAAKRNGTSQQSGPSTKKWDFRSIGNNFIEEMETFKLMDYRSTICEKFGFTKNIAEFTINPDVGRPDEAMRDAIDTMIKAAFKTTEERMKRKVRMFGVVITGAGLAFPVWVPYRAFPQNNADVIMQEINKLGQSGDGDENKKMLLLSEQITMKITCVTMPGGEGPRNVHKFDFGFKEHQRI

SEQ ID NO: 142531 - protein, 15 aa, Heterodera glycines
MYMNLPPKLKGHSRI

SEQ ID NO: 142532 - protein, 67 aa, Heterodera glycines
MSNQSAAQIADEYERHFKDCPPPLLILWQVEHKHGHPEGDTRRIVDNAVKGEEKRKEKERTTSQSSK

SEQ ID NO: 142533 - protein, 110 aa, Heterodera glycines
MRSMNSTGAQPSQDTPNDRELERLREFTQQLPDRRDFEKAANPPILPPHLLQVILNKDTPVQCDPNVLPEPNHVMLNHLYALSIKDGVMVLSATHRHRKKYVTTLLYKPI

SEQ ID NO: 142534 - protein, 794 aa, Heterodera glycines
ASQSANTFRSNAPLVTGVSPHQGPPGTLITIRGERFGEDANDLVALVICGTDCLATAKWKSSVALVICGTDCLATAKWKSSSKIVARLGGQAKRGPGDIVMVTRSGGRGQSAVQFRVFIEQIGPLQESAVWVDEAKTVPGRNLIRNVQEGGDPEDALGLGIDQSKTDIASLIKLFPDGTGSRKMENFDQSKTDIASLIKLFPDGTGSRKMENFSPEWYLLENYKLASVSDLKRGMANLEKQIAHEEECSKNVHKANLFLLISCVDALTSLHSKIQSKSTSEDWPISAKLAEKVEKAAKTADRLFRDVLTRKDHADSTRNALSMLTRFRFIFFLAESIETNMAKGEFSTILNGEFSTILNDYARAKALFKDTEVNLFKEVMAVLDEMAVLDENIGKLRECIRSKLMDISTPFEEQNRLIKFLKILDPESDPAWDCMMSYNGWLENILWELQIHFHGWDCMMSYNGWLENILWELQIHFHGKCKCWLSFGFSFLYFNALAMEAHQRNFRHAFVIDLLGLFRHAFVIDLLGLLTEKLQTFWKISQNFAVTGPTTSAAVSALTLQLQQMLTNTINVGSWLLLNALVPDALPESVNKQYKDRFVQWPRLSPNQWDVMFPSIKTLRASIKTASIKTLTELSRSHLQPLVELCTTVRLKCLGMLVERGKEAVVLLLGAQENWRVDLMADPPRTALPDLFETEVNELVADVKVILSSNNFPGEIDLFLKERWRQMIIDLFAVLLLGVRDCYDHLLKRQMIIDLFAVLLLGVRDCYDHLLKLRRENKRPNTLLDNVSLEVLMR

SEQ ID NO: 142535 - protein, 99 aa, Heterodera glycines
MHAFRARAIYHRACQSKAKQQRCCFERIKGIGYFEEVSKKHAAISLQNLISGKYMSIEFIFRKCQHTFGKIYLQFINNFEKKCPHTFGKIYLQFINNFE

SEQ ID NO: 142536 - protein, 16 aa, Heterodera glycines
MAIVPGPPSRYASAFV

SEQ ID NO: 142537 - protein, 292 aa, Heterodera glycines
SINGTQPTNIPITGTQPSSIPITGTQSTNILIIGTQSTNIPFNGTQPTSIPITGTQSTNIPITGTQFSYISITGTQPTNIPIIGTQSTNIPINGTQPTNIPINGTKPTNIPINGTQPTNIPIIGTQSTSIPITGTQFSYISITGTQSTNIPITGTQFSYISITGTQPTNIPIIGTQSTNIPINGTQPTNISLGLNPPTFQSLGLNPPTFQSTGLNPPTFQSLGLNPPAFQSLALNSPTFQSLGLNPPTFHSTVTPPTTNPFTATQFSDNPITATQPTNIPYHMDSTPPPFQS

SEQ ID NO: 142538 - protein, 303 aa, Heterodera glycines
GMLGIESQLEWWRIESTVIGMVVVLSPCDKEVGGLSRSDWIVGELCSRNGLVVGGVTVEWNVGGLSPNDWNVGELSASDWNAGGLSPNDWNVGGFSPVDWNVGGLSPSDWNVGGLSPSNVGGLSPVDWNVGGLSPNDWNVGGLSPSDNVGELSASDWNVGGLSPSDNVGELSASDWNAGGLSPNDWNVGGLSPVDWNVGGFSPVDWNVGGLSPVDWNVGGLSPNDWNVGGLSPSDNVGELSASDWNVGGLSPSDWNAGGLSPVEWNVGGLSPNDNVGGLSPSDWNAGGLSPSDWNVGGLSPID

SEQ ID NO: 142539 - protein, 28 aa, Heterodera glycines
IFFVCVSNIVRLFDRARQEKATVGTKFA

SEQ ID NO: 142540 - protein, 108 aa, Heterodera glycines
MLCFKDIFSIFAKIPLVCSHFVYLSVAFLHFGNRKGAALGLNLSLITHILGILSSVFVSVRPSVGRFGSLSVRLSILSNVHIRNVYWHPALLLRSPTPLLLLPFDALR

SEQ ID NO: 142541 - protein, 50 aa, Heterodera glycines; identical to SEQ ID NO: 135818

SEQ ID NO: 142542 - protein, 43 aa, Heterodera glycines
MARKDFRFPTFLGSEFRLPKFLMKSRKFLKFLFQKTSKFCTIS

SEQ ID NO: 142543 - protein, 157 aa, Heterodera glycines
MEELLRGMNMYKIGFTEPKGTVNGVPPIKRCRPDIKECARVVMETIRNGEESEPFSDELAAAMKRLWADPALNTATYSRRLEFHLHDSAKHFLDSLDRISNPSYRPSQQDILLTRIKTTGIVEIQFLIKGVPFRVFDVGGQRSERKKWIHCFEDVNS

SEQ ID NO: 142544 - protein, 310 aa, Heterodera glycines
VQNDVDTELDRLIELGVLKKVDYSRWAAPIVAVRKANGKVRICFDFSTGLNAALEPHHHPLPRPEKLFAQLNGAKIFSQIDFKDAYLQISVDEQSRQLLGVNTHKGLYQCQRLAFGIKSAPGIFQWTMDQLASGIPGVVGYMDDFIIASSTVNEHFSTIFKFFKRIQEFGFRIQMDKCKFLVKEIKFLGQIVSSDGIRPDQNRTRALQEMPPPTDITTLRSFLGAINYCGKYIKNIHQIRAPLDELLKQGVEWQWNEKHREAFDQAKAILLSDLALTHYDPHLPIIVTADASNKGIGATISHRFPDGKEK

SEQ ID NO: 142545 - protein, 88 aa, Heterodera glycines; identical to SEQ ID NO: 124691

SEQ ID NO: 142546 - protein, 19 aa, Heterodera glycines
TFAFSSLALLNTHTIFEML

SEQ ID NO: 142547 - protein, 19 aa, Heterodera glycines
TFAFSSLALPNTHTIFEML

SEQ ID NO: 142548 - protein, 19 aa, Heterodera glycines
TFSFSSLALPNTHTIFEML

SEQ ID NO: 142549 - protein, 19 aa, Heterodera glycines
TFAFSSLALPNTHTIFEML

SEQ ID NO: 142550 - protein, 19 aa, Heterodera glycines
TFAFSSLALPNTHTIFEML

SEQ ID NO: 142551 - protein, 19 aa, Heterodera glycines
TFAFSSLALPNTHTIFEML

SEQ ID NO: 142552 - protein, 87 aa, Heterodera glycines; identical to SEQ ID NO: 129152

SEQ ID NO: 142553 - protein, 73 aa, Heterodera glycines
MEIEKVSEFALEKVGSERLSKAMNIWGFSWKIMAEIRTKDENNEKWLGFFLYNYGTEKEIFIFYYLIIFIYEI

SEQ ID NO: 142554 - protein, 89 aa, Heterodera glycines
MQFVFPLAPSFEALLSSPGYAIFIIFLFLIARFLKLTSFDEKPKITLRKNKRRNSSQKCSHLMEEGSQCATGPFVELAELFVQCSILQE

SEQ ID NO: 142555 - protein, 40 aa, Heterodera glycines
MKKLGFLLLLAITFPTRPPLLYFVQKSFWLTTYCFFAGEI

SEQ ID NO: 142556 - protein, 71 aa, Heterodera glycines
MQIERPFFTEIEKVSEFAQEIFWSQRISETVHIKGFSWKILAQIRKNLLGTDNEKWMGFYLLCDAPKEGAN

SEQ ID NO: 142557 - protein, 216 aa, Heterodera glycines
MFRFDSKNAKSENATTDYPVEVPDVEAAAFKVMLSFIYTGELAELNGDNAMAVLYAAKKYNIPGLVDASLQVPVSSLRNVFVAYVQAELYELEALRWADAKCRQNCIERSAKNRRAVLGPALFKIRFPLIPNEEFSKKIVPSEVLSEDEVIDIYQFHALPNCHGISDGFFPMPFPTNGRISDRKKGRILMDIKKMLEFAREGIKSSRYSEKIYING

SEQ ID NO: 142558 - protein, 98 aa, Heterodera glycines
MFRFDSKNAKSENATTDYPVEVPDVEAAAFKVMLSFIYTGELAELNGDNEMAVLYAAKKYNIPGLVDASLQVPVSSLRNVFVAYVQAELYELEVGWTE

SEQ ID NO: 142559 - protein, 95 aa, Heterodera glycines
MVRISRYLIIDHDNLPVRPPSLDEINLRWIYKQNSEEILQFLAYHGLIKNQMECKKCFNKMSLTKKTNTKDGFLVMHIGMSKICTKIDQNMYINM

SEQ ID NO: 142560 - protein, 219 aa, Heterodera glycines
MPTKTDSSDDESDEENSAAAESPGNKWMKLMLSTGKYADVHFLVGDGDAKMRVPAHKLILEEASDVFKAMFRFDAKKEKAENDSANCPADVEIPDVEAAAFKVMLSFIYAGDLSELNGDNAMAVLYTAKKYIIPGLVERSLQIPISELRNVFFAYAQARLFDFEDYCNDCLDYIDGNADALLKSDGFLQIDQKLLCEILGRQLQIHEEFSIWEAVIFLI

SEQ ID NO: 142561 - protein, 16 aa, Heterodera glycines
MRWEKVTQMRMNFWTK

SEQ ID NO: 142562 - protein, 42 aa, Heterodera glycines
MEALTMRNGWAFTLCVNKKELMDPSKGFYNKSEDKVTLAIDP

SEQ ID NO: 142563 - protein, 39 aa, Heterodera glycines
MTMFLTINRTTGDTITFQLLSMFTIFGLGFIALILLGFT

SEQ ID NO: 142564 - protein, 380 aa, Heterodera glycines
MGGRRGTRLDPTADGPFGTWKFVTCSEDGTVCLWDSIDGRVIDSVKSNFIHRTIKPYVRVTALLANRCLTLKNGAQNVLFCIGDYADVIVLHPYDLNVLFTLGSKIEPEWTASIALATPMDVLVGTSLSGIVKLWSLHNVDPKDCGASVSFECESKVLATGADGVKSIVCSPKNLRMMLIIIDPSTLDQLIVSECAIEALDGVIVDIDKVAIAFADSTIVLFQLPRKKLCGRQIREKFGENPTNVFNIEQAFVFALLKGTLSTPLKPSLTPVQFFFDESRNSDKKVVVAYRVDEQGAISMWHIPNNLDFLVNEFIRHRRPIVYEPTIKQHISEAWARLVPPPPTLVDTEDDERIVTATIYVGTQGKLFHGRDDGSIMVSF

SEQ ID NO: 142565 - protein, 87 aa, Heterodera glycines
MGPVKSMITQQQQQNQEVQAVQQQQQILMGNEMKMDNSKNGETREEEGNSIGEGGETEEKERKRKNSAQKGGENEAEKRKEQQQIGT

SEQ ID NO: 142566 - protein, 15 aa, Heterodera glycines
MRIHARFSGKKLNMA

SEQ ID NO: 142567 - protein, 70 aa, Heterodera glycines
MKERQQLQLQQEDMEADWYMRQARGDEVGGDRMAWDVDQDAILFMDTDPGLHSQNRIAMTRLQPQKPAAP

SEQ ID NO: 142568 - protein, 50 aa, Heterodera glycines
MIRRGTAVIRRGSTVIRSSTTVIRRGTTVIRRDTTVIRSSTNLIRRELLE

SEQ ID NO: 142569 - protein, 168 aa, Heterodera glycines
DRQLRQFVSHWTVGDPEDVSVACQIAGIDPSFGFARVCDETSARRVFQEAMVRRTVMHNNNANIASIVRAKRRDGAAALSPRPPSAPSPPSLTADNGQHFAQQMVVEMRGRCFNATLAVRAHLSRCPWCPDPNVHIHVDGSEGSAQQQLIRKPEKGEGRIGILSVINC

SEQ ID NO: 142570 - protein, 234 aa, Heterodera glycines
SLIGIHSFFYSIKINFVLGAFLFAVLLNFKHIFLYYSPAFVAFYLFRFFFLTTKFFLLPSNRATKVKIECFFQIYKLFFSFKFSDGFFALRHILARLFPFKRGLTHACWAPNFWALYNFADLFAHKIVAKIHISFLHAPLYLSLWQEYEHAVLPNISFLRNSENRRTNAFFRTFSAFAFFFGWHVHEKVLCHYLKTIIMCVIKKGRNHFCLGFALIKGKFLIRCYYSSRSKTIE

SEQ ID NO: 142571 - protein, 95 aa, Heterodera glycines; identical to SEQ ID NO: 124528

SEQ ID NO: 142572 - protein, 56 aa, Heterodera glycines
RKFPGLQYQSWFKIRDTVPVFRVPLSPYKSLSRRVDTVLGGFVRSAILANFSTKMA

SEQ ID NO: 142573 - protein, 336 aa, Heterodera glycines
TILWHIGRVASFIKEKFPQVTILAWQVTILAWHDMLVQVQMTEKELADYQMTDKLEPVLWSYAEDLDMFLPFSHWMALKPFRNVWGASAFKGADGPMRFHSNPMHYVRNHESWVNQMTRVYKEFDRFQGLIITGWSRYDHLAILCELFPVGIPALSMSIETIAMGIETIAMGRPLNGKYEKTRELLKCQPPSEPGYSGCQFPGKRYELINECFYELRQFRKYFTSDFDLNGWVSAFAERETFSSPFYIAKVLPNIDLYLAILERIEHDLRIEFDLRIEFQKHFFTELADEFVLTYMAPEMASLRAKKAVAQSILKAKTFARRPFVKFPPMSTKDNE

SEQ ID NO: 142574 - protein, 166 aa, Heterodera glycines
MHDLFNSFIIGQLSAANGTNGSMSQPSDPMTHNQNRLVETNFAKFSRETNQANNHRGGTSKQQTKSMSSKSEEKIPWPSTNQPNGVPLDMDKVRLFSNAIAFIAMEFVASSSESRAELYTCKCLSDNEMEKKIFGPNGAILSHLNASFLNSAQKKRQFLKLLFSFG

SEQ ID NO: 142575 - protein, 303 aa, Heterodera glycines
ECKTSNIAREAAITAGFPDSIPCNTVTLACISSGVSIQNISLMISTGYLKAGIAGGVELLSDFPIRYNRKVRLSLIDLQKAKSFGERFKHLKTVASNWFSPELPAVSEFTTGEVMGNSGDRLAAAFCVSRREQDEFAIRSHTLADKAFRENKLKDVAFIKPHGSVTAGNSSYLTDGASAALLASEEFAREKGYRPKVFIRETLFVAQDPKDQLLLGPAYVIPKLLDKNYMKRKAKFGLLPLEKVNMWGGSLSLGHPFGATGVRLLAHAANRLQAEGGRFAVIAACAAGGHGMGMLVENYESKQ

SEQ ID NO: 142576 - protein, 143 aa, Heterodera glycines
MLCNFDNFNCSSSRHFSLASVLLQQQKFAAVSSPPNKNWNAVLIEAMRLKSTSIVQDDAITEHGHDDHGHGHHAKVYKELKQKFITYLAMSFVFFMFCCYVGYSTDVLGHSAWKLPGSYRNRKAINARLDAEEAKAKAGEGEQ

SEQ ID NO: 142577 - protein, 73 aa, Heterodera glycines
MSPFLRRFLLLYPYASPSVPCPPHHRDQMCRALSVQRAVPSHFDDDKSFAHALLWSKDLPKDNLRAQLTPKLT

SEQ ID NO: 142578 - protein, 31 aa, Heterodera glycines
TITVHGQTICHRRSVKGLHVELREHDTFDPD

SEQ ID NO: 142579 - protein, 76 aa, Heterodera glycines
MLGLFRPLETTTATQSTTTKEASILDRFMPKIPNIFNSFVGGRTTMATTTATTPPTLFPFLSFFTEKPTTTKAFCF

SEQ ID NO: 142580 - protein, 194 aa, Heterodera glycines
VVADPFLHTLTIRHEDGNTYEVNLLEEQAADPEAAAYISEFCSMLYIDKKYACPHWSQGNASTERTFRTFHNILAKYISKTQPDFDEFLDAANFCYNTSVHASTGETPFFLMFGRDPIFCVDQIIDPKVRDPIAISDRNEFKQKLVVAIRHAWHAAADEYAKAQRKMKEQYDRKARPQQITIGDRVLIRNYDGR

SEQ ID NO: 142581 - protein, 407 aa, Heterodera glycines
RIGCLECKREKLKPYTYPEAPNLPKERVNETRPFNNTGIDYFGPLKVKRGLETVKVYVALFTCLAIRAIHLEVAEDYSAEAFLRVFRRFAARRGVPRVILSDQGTNFIAGAKVIKENWTTDLLTLEVQEQLAHQGITWNFNTAHAPWKGGTWERLIGITKNALRKSIGRRLLTFDEFGTLVVEIEAIVNHRPLTFESDREPDPVLRPVNFLIPYGSTETNFPSMATDPEDPEYTPNPNKLKTMLQKADSRLNSFWEIWRSDYLLSLRERANQRLNNERQTPNEGDIVLVEEEANPRSVWSLARVLKVQIGRDNKSRSALISHKGKEKWRAVNQLYNLEIQPEFPEIHSTAFVMSNLDNDIDSVSLAGSEDEMPQPKNKFRIPKRKRAFLRPIPQQHSPLQGPRRKRR

SEQ ID NO: 142582 - protein, 34 aa, Heterodera glycines
HDREGGAQSTFLFLREFLNLYSIPEKWLSLFLIN

SEQ ID NO: 142583 - protein, 56 aa, Heterodera glycines
SEKTYIDLSDFAFRLRPIDRSSAYPSPPLPHQIIPSIHTHSHLILFCMLRLPNYVN

SEQ ID NO: 142584 - protein, 271 aa, Heterodera glycines
IMVHRSLRHRFLRLNHQIFDKRGINYILCIPSPHNTDGQRIWDIIVREIWPIFSTNIRCLGFTGGDHLDHLRRLTSPTILTDLNQLNSIHSYGLLPEAIDDDFNGTNATISAGQILYKWLHIPRKDGQPKRLRCDDYNTQANTDWINNFKEHFRRANAISSVSYEIHFSVRVPSMQMVPFELVNEWTKEKLTLAKAKGWNNRWIMKRCKIIGETAAVQQQKKEENWDNNWDNVFIWLYICNNSIGQLSPPPEEVEEEAAQNITKGPSSDNE

SEQ ID NO: 142585 - protein, 73 aa, Heterodera glycines
MSAHAELIDSKILRQDLVHLSPVCPQGFFCQFSAIHKTSHGDSGSPLLREIGGSLYAIGIVRGHESKKSKSGN

SEQ ID NO: 142586 - protein, 88 aa, Heterodera glycines
MHDFVLPVKASEMQVTVGSKDITKGTVHEVARIKRHEFYRLTSSANDITLLELKDVLECGPQITEFVFQINNHGVERQQQSSAGERQN

SEQ ID NO: 142587 - protein, 89 aa, Heterodera glycines
MCRIGIVIVIGIAINRILGHNRNRIIVIGFALKSDYYTPKNCELWAKTACQTKTDPLTKLASTKTAQTKNRQTKLTQSVQDHHLMPCST

SEQ ID NO: 142588 - protein, 209 aa, Heterodera glycines
WICNDVWMDIFPSFDRPQLGLKLALLSPRFNALVDKHFNGKSELAIWRRIEIRRKDKGPETKLSVQIGDKLVEFPLPDRPLPSKIRFKHLQIEYIDHSVIAFLRSNHQIFDKRGTNLYLWIPSPHNTNGQLIWDVFVREIWPIFSTNIRHLGFNDGDHLDNLLRRTSPTILTDLNQLNSIYSHRLSPAAIGDGFDGPNSTISAGQVLSK

SEQ ID NO: 142589 - protein, 224 aa, Heterodera glycines
MRSPQWSGAQLDLSDSHGRPAAMHGIEAGHSSTVALLLERGSALFARDSHGNTMLHLLGRHPNKCLIYRLSEDGLSLEDKNKEDLRPIEVAIRAGQLVAVDTFLRRGARLRSLTWQIALSSHPPLVLVLLRKLLDDAQILLRRKRTAEAQHRLSYALQKCDELLEKAEAEDNEALRRMGPQLRRVKVGEGNEIFKKQMEKWTRERERGEDEGEEREERNGTGIG

SEQ ID NO: 142590 - protein, 61 aa, Heterodera glycines
MERMEEQQIGRTFHFDASTEWWNLYVQNLTVPMMDDICHKVLDSIAPANGEDAPMANGTKN

SEQ ID NO: 142591 - protein, 80 aa, Heterodera glycines
FLPGGTQFFTLTTPALFFFNYFFHFITQRSRLIRSSPNFAGKLLRTLQMLINFLRIFCLEEHSSSHLPHQHYFFLIIFCI

SEQ ID NO: 142592 - protein, 87 aa, Heterodera glycines; identical to SEQ ID NO: 132477

SEQ ID NO: 142593 - protein, 84 aa, Heterodera glycines
MFLAVPVVERQLQNDLAVNGKVWPRGALAVVAPILIHHNEQVYPNHWHFDPDNFLPEKMAKRNAFDYIPFSWGPRNCIGNYWII

SEQ ID NO: 142594 - protein, 55 aa, Heterodera glycines
MIPSMLNLDASGKSYGVDQKLIIFMVINFQPSLSQDFFGALYFSRKTVTCLGNIK

SEQ ID NO: 142595 - protein, 45 aa, Heterodera glycines
MAFFTIFLSIGIIFLANIISRAFPCDNKVVYVPGERCCHGTDNFK

SEQ ID NO: 142596 - protein, 182 aa, Heterodera glycines
MARCVTSLAFLPIGDLTPGIIALDMALPDELTPVLDWFIMNYTGRLKNDGSRTRPRFDPNTWSVYTRTMQGDDRTNNHSEAANRRLQCSFACSHPSIWRFIDLLRKDQKLSDDDFAKCSTGQEPPQKAKKYREADRRILTMVQNYLPLNNGDTNIFPIHQPFNHHFIITFLIGISRNYEMRP

SEQ ID NO: 142597 - protein, 223 aa, Heterodera glycines
MRNRKWKRKWKRNRKWKRNRKWKRNRKRKRRRGTESGRETESGRERVRGTESGRESVRGTESGRESGSGRGTERGRESGRGTESGRESERGTESGRGTESGRERERGTESGREIGREEEEQKVEEKVEDEQKVEEEQKVEDEQKVEEEQKVEEEQKAEEKVEEEQKVEEEQKAEEKQKWKRNRKCKRRRGTESGRETESGRGTESAREEEEQKVEEKQKEEEK

SEQ ID NO: 142598 - protein, 124 aa, Heterodera glycines
MSTTDNQQQQQQTVIELTPEEEPFGKLGGQSAKNGGNEVTRKRRSSANANDGDANEMREGAMSESSSLKSNVSQSKMRKMVEDPLNEIRSGLMEAMNANDGDGSEVADSGRTSAETLAGEGPQK

SEQ ID NO: 142599 - protein, 43 aa, Heterodera glycines
HPGGWVPKIGIRQIYKREYPKFLRSFSKYVLDKANGTALALPL

SEQ ID NO: 142600 - protein, 514 aa, Heterodera glycines
HLWSLESIGIRDPLDSNDDELASDLFRDSVKFEGRYEVGWPWRPGGKIKLSNNFFLAYSRLSGLSQKLRSNSFREKYQATIMEQFKKGIIEPAVRTGGNEHFIPHHAVVTKKLRIVYDASAHEKGKASLNEMLIPGPNLVPELAGVLLRFRSSAFPVLGDIQKAFLAVGLRDEDREVAKFLWLKDPSLPLTHENLVVYRFKRIAFGVNSSPFLLASVLQHHLTLNGDPLGKRNFYVDNLLLCSETATEAAKAVHIARQVMTRAGMHLHEFVAADPRVTSPPKKFWWAMYKEFWGFVGTQEKIFFEFPAKSNFPTTRRGVLSTIASLFDPLGLCSPCLVKAKMFFQSLWDSAKGWDSIGPKLEKNWVAIISEWDCPPVTFARYTPCGQASLQLHVFSDAGPNSFASAVYLRSALNGSVRVSLLFAKSRLRPKKFKNDGFTIPRLELLGLITAIRAKNFVVSNLDFSFENIYFWADSQIVLSWLASTASQPIFIANRLAEIRKEKGAFFKFVRSTD

SEQ ID NO: 142601 - protein, 30 aa, Heterodera glycines
FLTVAIKEKLPTEIKAQLYDKEMEEGGPWT

SEQ ID NO: 142602 - protein, 87 aa, Heterodera glycines
IKIGAGAGHGPYFAGPRKAIPNCLVKLRDYRQESDPTFLPTRGNSYTNIRTRLFFVVLPNQKVHIPHQHPCTANASSDPTICQRPTF

SEQ ID NO: 142603 - protein, 53 aa, Heterodera glycines
LFFENFFVFFSAGTASDNVFYLFRKIIFFFLLIYFNYISSLNFLINIFKLSPY

SEQ ID NO: 142604 - protein, 53 aa, Heterodera glycines
LFSKYFLSFFSAGTASDNVFYLFRKINFFFLLIYFNYISSLNFLINIFKLSPY

SEQ ID NO: 142605 - protein, 101 aa, Heterodera glycines
MPLEMEKAASKVAECLGSIELREPRVNVYSNFTGKCHTRRLTQMRTDIARQVNNPVKWEQIMQILFNKTKTKNSLRILRLAPAANWAQFCTKLAKKLQEHM

SEQ ID NO: 142606 - protein, 25 aa, Heterodera glycines
MDQRLDDPQALEENGRDNFFNILLH

SEQ ID NO: 142607 - protein, 51 aa, Heterodera glycines
MWTNLFLGSSDDDGYVVDGFLANWITSNGDRVQRNLGIDGELLAEDEFVNS

SEQ ID NO: 142608 - protein, 136 aa, Heterodera glycines
MATEDLKNGNLSTKTKSEMAYPSANERNEVISPAIAVVQITQHHLCTTHRVENAFNACIIASCNSLSLVKLAFPVASIRTDNFANKSLRFIWQNASPLFESEEFLQIDQNLLGEILGLDQLVINSEFAIWQVVILN

SEQ ID NO: 142609 - protein, 86 aa, Heterodera glycines
KEWQQNYAEICEKIGVSHSAIRKWRKQFGMSKSLTEKEKMEKMKIYWQIKGEMPKMSDKEIGKMMKITSRTIAYWKKQFGEGIVDE

SEQ ID NO: 142610 - protein, 72 aa, Heterodera glycines
MVNKMGVAANKSNLIMQPLEYKYENVHMEIMHSCAGGEPKKISIHIPTIDKFEKNMMINDHVMQKKYEEFLG

SEQ ID NO: 142611 - protein, 19 aa, Heterodera glycines
TFSFSSLALPNTHTIFEML

SEQ ID NO: 142612 - protein, 19 aa, Heterodera glycines
TFAFSSLALPNTHTIFEML

SEQ ID NO: 142613 - protein, 19 aa, Heterodera glycines
TFSFSSLALPNTHTIFEML

SEQ ID NO: 142614 - protein, 19 aa, Heterodera glycines
TFAFSSLALPNTHTIFEML

SEQ ID NO: 142615 - protein, 19 aa, Heterodera glycines
TFAFSSLALPNTHTIFEML

SEQ ID NO: 142616 - protein, 19 aa, Heterodera glycines
TFAFSSLALPNTHTIFEML

SEQ ID NO: 142617 - protein, 63 aa, Heterodera glycines
QLMSLFGFFFKQFSVIAHQLLGVQQRRHLHPMQLFTGSLTLFLFFFYLFSERSYNNFSQQFCI

SEQ ID NO: 142618 - protein, 117 aa, Heterodera glycines
MTQRVNELKLEEGQATVGHGRGEWAKQLVEERKTKAEQMQQRNEYGNSEGSGLNCTSANAMRIPLSSVFEGISTEGQKIDNEEKERTNEEETKKRKKGQEIVEERKGEKQQHNVEKE

SEQ ID NO: 142619 - protein, 291 aa, Heterodera glycines
MEHTKQPLDEYMAQFKNVCWIEPLLDRIHKNASTVVCPVIDVIDDNTFEYHSSKAFFTNVGGFDWSLQFNWHPIPERDRKNRRHIDPVPSPTMAGGLFSIDRAYFEKLGTYDPGFDIWGGENLELSFKIWMCGGRLEIVPCSHVGHIFRKRSPYKWRTGVNVLKRNSIRLAEVWLDDYKKYYYERINDQLAPTPMQILQMVFEQHFPGAVHPWRCCSEGRGIPTFIHSFIRSFICQIANGAMVKHQRLCLDCAIKKRDKLKPVGLWPCHGQDSQWVCAAGRLGHRVLCGQR

SEQ ID NO: 142620 - protein, 286 aa, Heterodera glycines
MSNSFFVFLPSNVSDYPDNQPNKFRVRLPKPLHFNGSWVCGLHSISYPYSWSTIGTLDAQWIDIHFTDRRATDEDRQRVIRVPVPKASHSRVEQLRDFLAVTLRNRSGAKLLPTPREVEANRNRTKLLDSPPPLKREKRDVSSPPVFDASGKRLQDSPPLYNINEDERLEESPPPFEETKISAAPPPPVTSPVKPTTTVKTPAAPAAAPSATAKPATQSTVTKQAPQSPKPTAKPTTATPVKSTTAPPPTVKTTTAPPPTVKATTAPPPTVKATTAPPPTVKTTTE

SEQ ID NO: 142621 - protein, 75 aa, Heterodera glycines; identical to SEQ ID NO: 138893

SEQ ID NO: 142622 - protein, 75 aa, Heterodera glycines
MIGRAVRNLPFIFEGIFKFILYPRKMAISFFEKFYTSQKRLRMRRRAVHNRHFISQRIFIFRGYPRKMAISFFDK

SEQ ID NO: 142623 - protein, 27 aa, Heterodera glycines
MRGAKAPLEAAKRPKTALNAIQNLFTS

SEQ ID NO: 142624 - protein, 67 aa, Heterodera glycines
VNTHPVYDCAYTDERVKPGHCYYYRVVAVNEAGLDKPSDQSELAWAKPKFEASRFELDDINGKEVID

SEQ ID NO: 142625 - protein, 501 aa, Heterodera glycines
MVDELISSTKIDTNKNSYGIEDLIVIQNYFDTKFPNRFLIVAFSKEHGLKPIFKGQGHREHLICVFNENGHWDGLKSIKQFFNVKYKYCVYCEQTFQSTTKHSIKCIIKCSRCGSWGEKICKVCKTKHTKTESCYIRKIKVPNKLPKYRIICYDVECSTDNRIKEGKYFGFYEHKINFISARYTCSMCEGVNINCQICGPKGNRHKKWCTNETQKPMIEFLKWVLSFKQFNTYCYAHYAGRYDAHFVLKELTNLGYAPQLIISDLKIYQIKIDKIYFRDFWLLSQIKLADLPKTFGMNCAPKLYFPYKYNSEKNYEEQLEIYCGQDTEILLQAVLHMRRIFLEITTDNESPNGFDIIKDVTTIAGAAMRIFRAKFLKELHLPIVPENGFEKRDTQSVIATKYFEWFMYKNAVKGRHAGNGGEIEISGCPKCFKSFHVCPNGNTAEENFLKTGNRMQKLRKVALEYKLKVEEVWECEIKIKLNPKNKSYDKEMKNFFDNCPD

SEQ ID NO: 142626 - protein, 97 aa, Heterodera glycines
MQKLRKVALEYKLKVEEVWECEIKIKLNPKNKSYDKEMKNFFDNCPDKALELGYVIDKFYRAYHFEEFDSDLFKGYVRKFLKIKIVSFTNIPWAKLL

SEQ ID NO: 142627 - protein, 31 aa, Heterodera glycines
MPSNFIKYQSFLSGNKNEVLTIKELIDCRLK

SEQ ID NO: 142628 - protein, 73 aa, Heterodera glycines
MTQEKLNYNNTMLLLLGLLFVVIGQCLAENLPTIVAKKNFDATIEAEKLSAAIREMNTSNIIAIICSINNNQV

SEQ ID NO: 142629 - protein, 223 aa, Heterodera glycines
MKLCLLFFSIVFLIIKIEIGAEKEKAEQKTFEEIFGEKWEEKENEQKKREIIQKYYQIKERIKQKGRKYSSKEWNKIELKIAKKLGTKRHKIYKWIKELGIYKWHNKSKTDVQKIEIVQKFNAMKNEYKQNGRKYSTKEWKRNYAEIGKKIGVSYVTIQKWKKQFGMGEGMTEKEKMDKMKMYWKMKRENPKMSDEKISKILKINQRTIFKWRKQFEEELNED

SEQ ID NO: 142630 - protein, 128 aa, Heterodera glycines
MAKGEGRTDAVEEDELAKGKTKMHPKWAAGRSEADEGEEDEAEDEAEIRTNWTGGERRREAEENGEEKWTNKVRRTEAEEREGDETSTESAKLRSESAATEETEEAEEGRRSEGGRRSRRTKPKPDIV

SEQ ID NO: 142631 - protein, 70 aa, Heterodera glycines
MCGKKEMIDRQNPIDILISDGEYGDVIVDYFDFALSNDTKKIGFVRTWKKLLYKNPGLSIDWTHKGRLDR

SEQ ID NO: 142632 - protein, 51 aa, Heterodera glycines
MKSDEKRRQKRMDNNNNNNGVRTDSNHIFFICDFVFDDILFPRMSLCFFQF

SEQ ID NO: 142633 - protein, 159 aa, Heterodera glycines
MPPSENLFNISLNVNDLEARPLPEPQQPEQQQQPQQQQAELLIQIGDVEDALLLNVHEGEERGEEAEQEEEEHNVEQIEELMRLHADYFIFVKYPMRQKSSPRKIVNPDNNNNNNNNNNVASSYSDRLKKFANDEVKKALIEIEEERNKKKQKQRQEKQ

SEQ ID NO: 142634 - protein, 853 aa, Heterodera glycines
MFHDLQEGQCVFNDYVARQRFHGPEASHLLRRAGIDVNKYMYTLEDVGRLQQWVDEHYGEGQIRLTVFEKEQQYRIVFKGYCVDCERRVTRKYHPQECKVVCRLCLRFGVDYPCQQQQFPDGSNSKRQCLQCQFVFPNLDCYNYHLLNRAPATLDGRSGRRFSPICEWRRICRICGGIIYATFEHICLRGIRQQQQQQQQCLQCWGEHGQAEPCFIQPLDEFRAPRRSNQQLQQQQHEQRQERTIENDVDADEDEDDSECDDSEENNRGPINGRRSRKLKPIRYCFFDAETSQDQPLQLRTQVAQKHVPLLIIAEVICERCIAAGITVHAGVGQKANGCVCGTPTGPRGRQWCSPPFRNAPGDNTEMPIHITYNQRRLFFHCFDDATKNPVDQLLDFLISTGPRKSHTICLSHNGGKYDMHLVLEALHQRNLPPKRICTTGLKIYSMTLKGNLQRQVTFKDTLNFFFCELDALPRTFSLPNNIATSKPFFPYLYIRHQNLNVRLQGLPGIEFYQPDHMKTAKREQFLRWYAVERTAAKFQLREQLITYCANDVAILRESVLKFRELIMENTRGLDPFVIASTGAGLALATFRRCFLARNKLVNTPEGGYLRGRRASAESARYIRMYELMNPGVHVQSAQWSVGEAHVDDTGYRLDGLHVRSPPQRNVAIEYMGCYYHGCPKCYPNERQRHLAGGRTAEELYEQTQRRLWELEHTHGLELHVIWGCELKKNLRTNPMLRQLYNDAFVPRPLDPREDALRGGRTEPFTLQHVCTQNEEIILIDIVWHYDAWDGEMFRGYMNTFVGMKVQASGWPAGCENEQQRAEYIVDFERVEGFRLAREKIGNNPGLRMVAVS

SEQ ID NO: 142635 - protein, 258 aa, Heterodera glycines
MLFSFFLFQFYSVVCSIASKRSPEPWGDTLKSIDDNARDFKWPDRHEKGTWAAVAATGEGSRAKAETGVNREEGSGMEEEEDSHIVRAEALSEREGGVAVAAANKGQTQKTSDDDNDYHDGAHQQVVVMARGGEDARAKAEASGGPRSVVETRISDNQRGGERLALGSAIIHRQGRRRGGGGGGRNRNRQRGKEEQGRGRRPIANDKFHPRPPQYMELNNRQKGNEQVTLNNNVHTMSPVSYPYLLRKQVGRECFCTC

SEQ ID NO: 142636 - protein, 225 aa, Heterodera glycines
MATDWIHNAYPEYEQSGGGGGGGEENNESNDAAIADGINWLRVIDEEDEEEQNKRRNGNTMKSDEEAAAPETNNSNSTSNKCHCGRSGPYSQQQQQHEAQEIEMPLIEHLCERYKCSAKELQVLLQNLKTRRQILQYMRFNVRLRTNYLRPAIRNFVVQCSDLSTLSATDAFAMRGYLGITVRIYYYVKHGLRLRHPNLPCVVRLGGGEHYDLFPLECLNVVKQN

SEQ ID NO: 142637 - protein, 152 aa, Heterodera glycines
MGSIGGVPVNTHAGAPGEEIVKQKARDVGGKLLMVLDDLMIGIGQNFLDTIFTRGSHNWGVSVVLVTQHMFTKELRIARNNSHYLVLMRNPAGALQVRTLATQLFPGRAEHFMEAYRDATGKQFGYLVVDMHPENTTTNVTGGDKRTIIMFC

SEQ ID NO: 142638 - protein, 1031 aa, Heterodera glycines
MRMFLVPEDLFNSVINSSKAPADGTALGLVRQRLHQIERNRNMDENERLANYHQEFKRLNKIVREQEERPMDVRLQNINEIMSAIPPPPSPNLSGPLQTFHPPQNTGTKTKSVASTKPFRIVNKRKSIKEKLLRKKAKKSYFNTKNGDENEDDDDGEDDEWGRNSAEKEDQTMRQQQQTSSSAFPYKLRSGSAAEGEEPQKGTKKSKNAPNQKLVAILEHIKKNAEALGVTADGKILRRVSTTIIMVLEKKKRTILDHLYKDINSPVSYTSMVPLLNEARKTNSSIKRRDVEEYLAEQPSYTLHRQAIRRFKRLPTLASGLHTDWQADLAVFDRLAPQNKGFRYLLVCVDTLSRQLFVEPVKSKKSEDMVHAFDRLFAHSKYIPWKLVTDQGLEFTAKRMQTYFDSKNVKHFCMYTSPQFHAGIAERANRTIKERLFRYFTARQTQRWLDVIQDIVNGINHSYNSSIQMRPVDVTFRNADTLREKLANEAAMSRPKRLPRFHKGYVGRFTSEIFKVDSADEGRSPVTYRIRDADNELIKGRFYASDLCRVRKNTHQDGEKLYDIEKVLRKKKKDGVEYAYVKWKELEWKTGNVVTIPVPSSNIIRPYELSKSLYSLLDISSEHLSNQVHDAQQSYKRAMNAARKHAQREYLNMKSDLDRARPKRSKISAGDDAIPLLTSLLVAVDTIADALIYNEDGTANSMLTADALLDREKRAATSNVPLRRDSDSDEEYQKKLDNYFMKIRDTDDLQLYRELVAKHLELELNKLTKDQLSLNNSIKDLGMDAWIQAYRKVSSVLQFIFDVQQNRFTLSINTKFIKRVKLSEQLAYILGFAPQTEFKRSKNPAKFMPDMSGGVSTLHVYVPDLIVPMMIGNVIAPIMRITTIRGNPDEMVEEQFYSIQYHPDKIMFSPRSSLLPQCFVANIDTSDMIGTHWVAFYCDRIGRIEYYDSSGVWPPISEHISNFLSKFPSVRYNRVPLQSPYARSCGKHVIFFLHHRCLQCSFDEIVQQLWLAKQSPDTIVNTFAREKIFRI

SEQ ID NO: 142639 - protein, 198 aa, Heterodera glycines
MTSLYACGGLHYTRRRISLYTCGGLHSTLAEDFTLRLRRTSLYAAEDFTLRGGGLHSTRRRTSLYATEDFTLRGGGLHSTRRRTSLYAAEDFTLRGGGLHSTRRRTSLYACGGLHSTLAEDFTLRLRRTSLYAAEDFVFTLRQRRYFSLSLSRRGGGLSLYACGGVSACPGIELPLTKSLSNTLHGPLTNCNANNIST

SEQ ID NO: 142640 - protein, 253 aa, Heterodera glycines
MPAQLQPVSVQQAMPAQLQPVSVQQAMPAQLQPVSVQQAMPAQLQPVSVQQAMPAQLQPVSVQQTMPTQLQPVSVQQEQPTQQQATQQQQIQLQPPVQPAVQQQTLPMNVQMPTAQFESFLVQMPQAPPPVLQTQQGQPAQQPDDMFRLIGENEEAAPGILSTSGRSGGGGGGGGGGVNGLDPSMMGNRHLARSPPPPPPPPGLTRTELTQIFPVVEVDEAIAEEICTICQEHLVATSLEATVTPCGHYFHFD

SEQ ID NO: 142641 - protein, 193 aa, Heterodera glycines; identical to SEQ ID NO: 134779

SEQ ID NO: 142642 - protein, 286 aa, Heterodera glycines
MAQRVGFTQIKYTRTPAEFHQLLDDPTLDKLDFVHVSEHMDRVVVRKRPEFAKAPLTNCLPVAIYVTSYARLHLYSYMEKVIALEGAELLYCDTDSIYYVNKMGGRCVPEGEALGQMKREHVDRRIVEFVAGGPKNYGIRHTARDGTDERANLKIRSFRLSYATQQLLNFEAMKDLTLATYNIDGPIDDVIDNDDLYVYGGGGAHRCIRVTFPQIDRNVRSDVYTCEAHKDYRPFYAKGRVRPGMQTRPFGYVEDVSHPPIQPTAERRKRTLIDPDPTRPGYSGWF

SEQ ID NO: 142643 - protein, 683 aa, Heterodera glycines
MYTLEDVAQLQQYINNENGVGQIRLVIFEKEQEYRIVFKGEGTAAQFNLCILLERGHFNYIGRIAQLFKVPGYCIDCERRADARYHAIGCKAACRLCFRFGGGYPCQRERLSDGQISSRKCTECGFIFPNDNCYEYHLANDAPAPIDGRGHRQRRSLCQWRRFCPTCGRVAYFGIHQCPSIRRAIGPVDCFRCKGPHMLDEPCYIQPIGVAPPLPMLGPVHNNDDNNNNNNNNNNNEDENDIDFIINNLGGEGDEDEDDVENGDDINDDDDDERDELLPLRLCFFDAETSQERPLQLNNQVAHKHVPLLIVAEFICEPCIRAGININDGQGQRAPGCVCLCGRVRGQQMRQWMSPPFVNAPGDNTPQPEGAPVFNNRRLFFHSFDNEASDPVDQFLDFLIHHGSRKAHTICIAHNGGKYDFHLVLEALHRRSYPPKRLCTSGLKIYSMKLRGMNQRRITFKDSINYFFCELDALVKSFDLPQHLATVKPFFPYLYIKRQHLHQRLDGLPPIEFYSPNTMKADKREKFLRWHCNNNGDARFQLREQLIMYCINDVAILRESVLRFRKLIGEHTQGLDPFLVSSTAAGLALSTLRRCFLPFNRLVHSPEGGYLRGRRASAESRRYIRFFELENPGAQVQCADWSVGEANIEDTGYRVDGLWRREPPLRPLAIEWMGCYYHGVLSS

SEQ ID NO: 142644 - protein, 168 aa, Heterodera glycines
MRNTLRNTRGEVCEIRFLPLEDNERPDLVMEILIQHLLDRVLEGHPSPILVGLQLQPPGFDRPYVIRLRPPEQNNAAALAAAIERLNEQSAAGIDLLSGTTVTKVLAVWPLESVRVDAQRGGACDLDNEHHLSHNVQSIVRVVNPNDRYCLARAVLLGLCDRETQMPN

SEQ ID NO: 142645 - protein, 56 aa, Heterodera glycines
MPETDVERISRLFVDHVIQFLDPITKLGALREKYRLHFVITNEQLALLRDFGDYLR

SEQ ID NO: 142646 - protein, 167 aa, Heterodera glycines
MKRSTRNASKRENKKSRSSDSLRQEKHQEKSQNCIKKIDEYTTSSKKFQLLRSKSKFVVQNIDQCDNPTKELEECIKSSINEAIEDAKRTLGGADKAGVVISSEMLDQGDIIVPITPISSNVADAVFNQFIKVEQSVVRKSLNIYGTPFVITVTVLNINGLRKKNKE

SEQ ID NO: 142647 - protein, 1016 aa, Heterodera glycines
LYHNNNHFDGIKTLSKFFNKRYYCLSCESVYERKSQHSMNCSSLCHGCNYPCEPQQGYFKKCLHCNNYFYNNDCYEPPPQGFCTKFQRCEDCGVIYNVKVHGNVGHQCGERFCLHLKEEDGENPCKSCFIQPLKPHKLKPYRIIAYDFEATQDKNEHEVNFAAATVICTECSTTTTGTNLYKEIPAKFVAYRTITFAHFGGRYDMTMIIKEVLAQGIHNPDIIKQGNRLYELNQGQTLPTHIMPIKLSGLIKSFGLHIKDKQHFPHMFNKSSNYDNILSHLPPREEYCPDQMKIPDQQKFDKWYNNNYNQPFNLKEKLPEYCCNDVQILTHALVELRREFKQLTQRNGKHGGIDILWQAMTIASACVKNFALNHLKPNSLAIVPEKGYTPQQQSALAIKYLDWYSHINNVNIQTAHSRYGEYVFKREGQVYQVDGYIKDGKRDKIIEVNGCLWHGCEECFEDLDEETKMRKTLGQLRERGVRKHEILRRYVDLEVWEHEINEQLKKDKQMREFFDNWKDHSPIKIRDAFHGGRTGPMKLLHTAKPGQKISYKDFTSLYPWTNFTTDYPLSHPKIISFRLNEQTPYKGLLKVLLLPPNNNINVTVMPIKFDERLTPYKGLLKVLLLPPNNNINVTVMPIKFDERLLFPLCEKCAKHITNEHPCPHFNPNDRAFVSTCPHFNPNDRAFVSTCTHLELNAALEVGYTVRKLFHVLQYDQWSDNIFKSYVSEMMALKIHATGFPSWCESEEEKKEYIEENRQRFGILLDNEKMKAEPGKRYIAKLCLNSLWGRFSMRNLLSKAIINNDPCVLRQYTDDKKIELVDLEMIDDDIFMLTYKPKEEFVDENKYSNVVISLFTTSAARLYLYEVLKKVADKILYFDTDSIIYVHPEENDPLPTGKGHLGELTDENPDHNILEFISAGCKNYGMAATQGHRCLKIRGFTLDAQTVQKIHYDTVKDQILRYGSEDPPDPIIVTYPHFIRPNLIQGKVYTHSLTKHYQPIFTKGIINDSFQVLEFGY

SEQ ID NO: 142648 - protein, 123 aa, Heterodera glycines
MSSTSSKKTLQSVVEQVIQQDAEIKSSEKPLKQNELEKSERKSTHTVYNLLDHKRSFWKLARPKFAVINFLCPGCRRINYKHKDQFKLMGEDEFHFTQVMCPGCVKYNMMQTDIYNKHTKNPH

SEQ ID NO: 142649 - protein, 277 aa, Heterodera glycines
MLWTLMSMTTDQPNLKLSRSPCTIKARAQFAVRLGYGTTLGTAPSIAKFAPTGASTFILKMKAGFSLGRLLTFVSIYANENGQLNVQKARRVVFARAGEQDFALQGLIDGQCVPLERLADVPPAPAAVPPAAAIAPPAVVLPAPAEVPPADVEIELDIDGEQLTNFPAQQHPQQLFPAQQQQPQQLFPAQHQQQLLLPPRPLISQIVDRAVSVLQMHFHNMSPLRPAFPPFFINSPFPRLQGALELPPLQFGQQQNQHAFAPALQIAPVDDAPTPQP

SEQ ID NO: 142650 - protein, 284 aa, Heterodera glycines
MQQNRRPSNSFWPRRSTGANNCPQCSIEGTKGTKKCANHCRSSPSYGNGHCVPLPTVIVLETVQHPSKMPSELHFMVWQQQGGALQKGLNTTMDTFTQKELDHGFVRFEIDEAKGVPDTKMGFHFLLNDGRHQLDPEFFLLQFDEILPSKKEDGTMPTQSTLSSTPTIHLPVPSVAIGPKIERNAKLGTAPGVPAVIGPNLLKATGGGKIPVEKVIFHLTKQPMHGRLVNGFPRTARDCCPLLFSCSTAPWGVSHIYPKYSNQINTFGHFRRFAAVPTIHSIGH

SEQ ID NO: 142651 - protein, 268 aa, Heterodera glycines
CRYLGCVANRWLSVRLEFIGNCIVLFAALFAAITRGSTSAGILGLSVSYSLNITFALNFAVRQISKLETSIVSVERVKEYADVIPEAKWKIPGREPPVGWPNHGEIHFDHYSTRYRSGLDLVLYDIHATIRPAERVGIVGRTGAGKSSLTLALFRMVEPTGGRIFIDGVDITQLGLHDLRSRLTIIPQAFVDSQLVIIRPLFILGSRPLLRSYPGHNTAEVQQLHHFYNCSPSRDHYGLRPRDRFAQRANPGIRHTSKFAGPSKFNLR

SEQ ID NO: 142652 - protein, 18 aa, Heterodera glycines
YREAIPEGFGLPINLGAS

SEQ ID NO: 142653 - protein, 62 aa, Heterodera glycines
FEYPKRTLEKIDFFVFGAVPPSRCAQIYGETESFRNSFPIACTLILRWIFAPHNLLSTQTDT

SEQ ID NO: 142654 - protein, 120 aa, Heterodera glycines
PKNSYLFFLIFLPQTWYQQLPSLVWPYQTILRYLKRKQKKFLTKNGYLFFLIFLPQTWYQQLPSLVWPYQTILRYLKRKQKKFLTKKWLSLFCHFFTANLVPTVAFSCLALSNNLTIFET

SEQ ID NO: 142655 - protein, 50 aa, Heterodera glycines
MWLTEFLEGYGNINHNVVDRISGRLRYSQGDSWSCHSLDLIFKNGRDFHV

SEQ ID NO: 142656 - protein, 54 aa, Heterodera glycines
MDDLLEFKYTLDSDFSADFDNLFPFVSLKEFTDEIEANFGPNFKFERSALSVEE

SEQ ID NO: 142657 - protein, 39 aa, Heterodera glycines
MLFAGVNCSTNIRFATLCVEVSPCVHNDAGNEGSPLVMK

SEQ ID NO: 142658 - protein, 65 aa, Heterodera glycines
MYVKSISAIRVLLEKSPSLLHERDPTNGNTVALKILIFFSVPFWHSSFKPIYSSTVCFFDQNYLI

SEQ ID NO: 142659 - protein, 101 aa, Heterodera glycines
LFEYPKRTLEKIDFFVFGAVPPNRCAQIYGETESFGNSFPIACTLILRWIFAPHNCLSTPNGPLKKSIFLFSGQKARSDAPRFMGRPLTTAILPYSLYFNS

SEQ ID NO: 142660 - protein, 188 aa, Heterodera glycines
IYEISFQIVHANIACCGLAVSARINRRHLDGINPEDLKLGSLVTVVVANIPQDSLVSMGYILPDSSPFKLGTERRAETPEFFGAVACIRPHLLEWPNLNANMTPKVYPCSAELTKHHVVAMEHVVGAALQIEMEREVDMMIEARFEGRARKFDGADCLIVLGSRSKKEVNELAKVWEPESQVKVFKEI

SEQ ID NO: 142661 - protein, 106 aa, Heterodera glycines
MHAFCARAIYHRACQSKAKQQRWCFERIKGIESVNRLLEKYICNLSTILRKSVHRLLEKYICNLSTILRKSVNRLLEKYICNLSTILRSELEMIIFAIQTNFRCSN

SEQ ID NO: 142662 - protein, 187 aa, Heterodera glycines
AEISVVTSGSSTRKENAEEVEKEDNDLRILHQKSKEKALVTEGTENNASSHAIAGMPIPTIPSSPSTAVIKKPLIQNHQQHTSPPPLMAITVPPPSLHVPPPSLALTAVPPPPLIMPSQLAMAATTTNASVAGGAAAIQKHGGPQQQQMHTHSPTAAAVDRPIGSGILHRIQCEPSSVCDRRSLRIN

SEQ ID NO: 142663 - protein, 88 aa, Heterodera glycines
EYALATFLDVRFKDKVLTENSATFRARVTVWIKNELKEWEIDNDLDGLQQNEFVRPVMSPQPENPPAKRRMSFFERLKHITGANTVNR

SEQ ID NO: 142664 - protein, 196 aa, Heterodera glycines
MSSIWQIAQLSFDKKILHFLVTKNISFGAVDDQTFHSLFPHQKVKSEWFYSLTAHSISKWKSLSRVLAITEFSESHTGKNIALKIEDLLLKWGIPKECVHIIMSDSAANMKRAFVERDENENRILPIPNGPCAAHLLNLAVQEAFKRDESISSLLAKTRHIVGRFKHSNTAFSELKKIQKLLDAPSHTLLQVKVKY

SEQ ID NO: 142665 - protein, 123 aa, Heterodera glycines
MRSEQLKSGNYIEFANSKDTSRDMQHSDRNGKCLRTDSRPRLLCQLFRPFVRQDIRPLRVLLLGPAVAGCVRRHGPTYDGVDRRGPTLLCDVPNLVKLLNLKMPKNGTPNGANRFYNEKLASD

SEQ ID NO: 142666 - protein, 18 aa, Heterodera glycines
MRTRPIWQVKQRLLTSQK

SEQ ID NO: 142667 - protein, 191 aa, Heterodera glycines
MNLDRVFVNDRSNDNEQNLEYAYVFDNDYEVVESSYDILEEHNYSKRSRMDVVGGESQVSLNSDIGIAGPSRMSDSQFEERRRTEYLKRKRERERMRRENESQNQRVLRLEQMRDRNNSQRTEENANERRLRLEQMRNRNNSQRSEENAYERQLRLEQQRIRQRVIRQGEINVYAAGSYVNAHEHGLGLMN

SEQ ID NO: 142668 - protein, 87 aa, Heterodera glycines
LRSKSFSNNFSASIPSTIAFIHPIMSAKIIRVPKIACDLSLEKNGLSKNRNYAQKASQTILALPIPSTIAFIHPIMNAKIIRVPKIA

SEQ ID NO: 142669 - protein, 76 aa, Heterodera glycines
IHPIMNAKIIRVPKIACDLSLAKNGLSKNRNYAQKASQTILALPIPSTIAFIHPIMSAKIIRVPKIACDLSLEKMV

SEQ ID NO: 142670 - protein, 30 aa, Heterodera glycines
MYVKSISAIRVLLEKSPSLLHERDPTNGNT

SEQ ID NO: 142671 - protein, 113 aa, Heterodera glycines
MPIIFNFHFLLFNWIHFLAEEKQQKESVGQQNKNTEQKLDGKYAVVDKNNVLVALVTSSGDHSPSAVVSAKVAKEVPNSQQQNDWDAKVCHKDIEIIGEKQLTINCKGNRFGI

SEQ ID NO: 142672 - protein, 116 aa, Heterodera glycines
MKVFKLESFAAIGFATKEVPLDGSIGQILNSYGYRSDGSFGCNGINRPCKMPMSLFGSSFSPVAMQSADVEMAYKSSEFSTGDVVGCGIFLDTRLIFLTKNGQRMGGPIKMKKQIN

SEQ ID NO: 142673 - protein, 18 aa, Heterodera glycines
MELVLKITKLELKNKGLQ

SEQ ID NO: 142674 - protein, 153 aa, Heterodera glycines
MLNSIDSYGLLPEAIAIGDDLAHTEKRWPTQAIVLHTFERQVYFDWVNNFKKQFLRANAISSVSYQIHFTVHAPSIVTFELVNEWTKEKLTLAKAKELDNRWIMQRCKIGEAVTVQQQKNDENWDNNCNNVFFLLLVALIASGSSEKSLTKMQ

SEQ ID NO: 142675 - protein, 172 aa, Heterodera glycines
KIKQKGRKYSTKEWNKIERKIAKKLGTNRTKIYKWIKELGLQQQIQKSYNSKSDEEKIEIVQKFIELTKEYKQKRKYSPKEWKQNYAEICKEIGVSHFIINKWKKQFGIRYMRITEKEKMEKMKIYSQIKRENPKMSDNAIAKTVNTSHQNIFNWKKQFGEEMFQRTTEEEA

SEQ ID NO: 142676 - protein, 118 aa, Heterodera glycines
PKNSYLFFLIFLPQTWYQQLPFLVWPYQTILRYLKRKQKKFLTKKWLSLFCHFFTANLVPTVAFSCLALSNNLTIFETQTKKILDQKMAISFFSFFYRKLGTNSCLLLSGPIKQSYDI

SEQ ID NO: 142677 - protein, 25 aa, Heterodera glycines
TCTCGVVVKLSTFHNFSPGFNSPLG

SEQ ID NO: 142678 - protein, 110 aa, Heterodera glycines
AFSNASSRVTSVIILTLRATLVGSFLPFELINEATGEQLALEQYDTDELSSSVVQLDGFGKIGKMSGKNCVLLDRNGWTFGSETADLTRVFSTPLLPGQVVSNNEAAEMN

SEQ ID NO: 142679 - protein, 226 aa, Heterodera glycines
MQWIKFNCTLCPIGLQCFYPRKYAKLVLCAHPSVRNITDFLSTGQLDEAATTTTTSVLPTTAETAAAAECAPPPAHLTAWIAVCTALMALLVIAQVVNFGHLSTKSIFLNLACARRIQSAQIFEGPRLQKGDAEPTSSANECRPSQLPTGERADSAYFAGNVGRRFSAPDGRQFDGGPAARQRRADGAIEEGEEPVYDEVPLDSDIVVEMRDEMGRRMRKKMTMIF

SEQ ID NO: 142680 - protein, 100 aa, Heterodera glycines
MRLFSNFVIKCRTYQYERPDMKYGLPSPQYKHVIVTGAEEHGLPTNYIQWLRENFEDNGYDGPVEVNLKALETMPRPTKKRKLSHKKEGEAESSNMALNN

SEQ ID NO: 142681 - protein, 18 aa, Heterodera glycines
PGSRSRILKSSGSGPGRA

SEQ ID NO: 142682 - protein, 117 aa, Heterodera glycines
MIGFRLPQNGGNCDGGKFFLLPVYESAMQRAFLCHLRQNGDIFLKDYAELWLLEFDMVRIMKQQGEIKLLVSRSCNCTMEELVMQSLTNWTCFGMTNGNFPNKMIFVCFYVFKAACI

SEQ ID NO: 142683 - protein, 91 aa, Heterodera glycines
IHPIMSAKIIRVPKIACDLSLAKNGVSKNRNYAQKAPQTILALPIPSTIAFIHPIMSAKIIRVPKIACDLSLEKNGVSKIVITLKKLFKQF

SEQ ID NO: 142684 - protein, 72 aa, Heterodera glycines
EIGPSYTEYGILPHIYFMGFIFPSMSPQNNSIFGLQMTSDRHKITSLSFKLLVITVFFFSEFFFNNVLEFIS

SEQ ID NO: 142685 - protein, 34 aa, Heterodera glycines
MFGFFWLTKTSSNLVLSILFQIAPNFFYSLTRPY

SEQ ID NO: 142686 - protein, 73 aa, Heterodera glycines
MKLELTNKNYDEYFGHLKNQRTTAQPADEATKETETEAKADDERTNGSPVDHFLTMNALNSTALKGVQLKMKI

SEQ ID NO: 142687 - protein, 79 aa, Heterodera glycines
MKSPKGKNNTAQAVEANGNLKRNGNSGANDGKKLNGEAKAEGKVVEAEEEDEEFEGEAEQQEGGGEGVKSDQNIAMGME

SEQ ID NO: 142688 - protein, 39 aa, Heterodera glycines
MYGKRANVATGGRNASSSTTQTEEKRGLTFIVAKKCQNN

SEQ ID NO: 142689 - protein, 203 aa, Heterodera glycines
MTPPPFTALQFALFGYMILLNAFVPSDTNLSSKPKSDAVEQVDHEHDHRNSKNETDQEVNKEQQFNDRDLDHENDEDNDREKNKKEKDSHENGNGQTSDEEQNGEKDGKSYKNRHSKKYLTERQRILDRLEKLDKSIVKQPAEHNENRSNFANHGSHQKTTDQEGNNEEHDDQNEKSDQEKKQNDEDDVEQKEKKGGEKSNSH

SEQ ID NO: 142690 - protein, 93 aa, Heterodera glycines
MGGLNYALPIISDGMLMETLVIGFAVNHPAGGFGMDSDQKNGNGSNGTSDTGSDAASDNGNGANGHKPQKKPQVFEKSVPSVVGNFSSEKFLS

SEQ ID NO: 142691 - protein, 26 aa, Heterodera glycines
FAILVFWLLFVGNQLNGYLIIFIICP

SEQ ID NO: 142692 - protein, 172 aa, Heterodera glycines
HGQAANPQQFKCELCSKTFSAHYNLTRHMPVHTGARVHTGARPFQCKVCGKAFRQASTLCRHKIIHTEDPFQCKVCGKAFRQASTLCRHKIIHTEDKPHRCKICGKCFNRCKICGKCFNRSSTLNTHLRIHTGFKPYTCEYCGKGFHQNGNYKNHKLTHQQEKRYKCEVCAK

SEQ ID NO: 142693 - protein, 65 aa, Heterodera glycines
MSANVPTDICFSFTGLVQRGGRTGPHKDGWGITFYEGNGCRTFKDPQPSFNSPIARLVQDYPIKS

SEQ ID NO: 142694 - protein, 96 aa, Heterodera glycines
  unsure (1)..(96): unsure at all Xaa locations
LFEYPKRTLEKIDFFVFGAVPPNRCAQIYGETESFGNSFPIACTLILRWIFAPHNCLSTPNGHLKKSIFLFHKYFSESALKRTKIYLQVNXSTLMX

SEQ ID NO: 142695 - protein, 118 aa, Heterodera glycines
MHFFEDDQRATVALSRARHAVFIIGDLVSINAGQVWKRFIEMAITRTSVVRAEYVLALLGRTLTTGPSDQAGPSGSGGQQRGAPTLAPQYGRGQGRRGPDNQWMHYGGNPKRQKGGRR

SEQ ID NO: 142696 - protein, 90 aa, Heterodera glycines
NRNYAQKALQTILALPIPSTIAFIHPIMSAKIIRVPKIACDLSLAKNGVSKNRNYAQKAPQTILALPIPSTIAFIHPIMSAKIIRVPKIA

SEQ ID NO: 142697 - protein, 63 aa, Heterodera glycines
NRNYAQKAFQTILALPIPSTIAFIHPIMSSKIIRVPKIACDLSLEKNGVSKIVITLKKLFKQF

SEQ ID NO: 142698 - protein, 233 aa, Heterodera glycines
IRRVIRRGQKVIRSGTKVIRRGTTVIRSGTKVIRRVIRRGTTAIRRVNRRGSTVIRRVIRRGSTVIRSGTTAIRRVIRSGTTVIRRGTTAIRRVIRSGTTVIRRGTTAIRRGTTAIRRGTTEIRRGTTVIRRGTTVIRRGTTVNRRGTTVIRRGTTVNRRGTTVIKRGTKVIKRGTKVIKRGTKVIKRGTKVIKRGTKMIKRGTTVIKRGTKMIRRGTTVIRRGTTVIKEVQK

SEQ ID NO: 142699 - protein, 43 aa, Heterodera glycines
CFAVPRTGRQWMALNLQEIRLAISGCKKLLGMELFFEVSQTPY

SEQ ID NO: 142700 - protein, 117 aa, Heterodera glycines
FIILFLIFVLFSNSVSDCRNAHSQNCGHKIREEKAYCLTRQTQNGKDAFIVEKSCVTTRQFYQQFPEELEKHSADEVPIGCDATYDGFVNYCLCDEQMCNRNSLSEQAERNGKRREI

SEQ ID NO: 142701 - protein, 154 aa, Heterodera glycines
MRNKTRTDKEEKHGKSSEEKKRPLFVPSAADLTPIINMRPIKSSAELANQKETGSFGDDPSPPNWLSNWPSSDAPNWPTSAASPILVPATTPPSNLTEQNDRLKKWKQNSERAKRPFESDGGEESSDGKRTILSMGIGIVHAILTLFASLYLML

SEQ ID NO: 142702 - protein, 42 aa, Heterodera glycines
MRGLQIPANLHNLSERYQTSSNFEEKCIENFGKISSKSLLLQ

SEQ ID NO: 142703 - protein, 343 aa, Heterodera glycines
MGMALLFFGHSFHGTLSLKAFRVNTDSAWNELMEVQITVTPPAKPRENPFVSIFRSKRQLPGHCQCAGVQQPQCPPGPPGPAGAPGQPGYPGQAGEPGQPGVPGQPVEKREYFATKKKDYLIIKGAPCPDVPHVCQHCPAGPPGKPGDQGPAGQAGQPGRPGQPGQSGGVGPPGPPGPQGQAGSPGRPGGSGQPGQPGPKWRLRPFLDRRDNPGQPGAPGQPGAPGRPGKPGDQGQPGAPGHPGQPGQPGAPGQPGHPGAAGAPGKDASYCACPPRSGGGYGVSGGGGGGAKVEHAPLPAEQAPVPEQPAESVGVAPAPAEVASNAAGGQGEAEAAKGYRKKM

SEQ ID NO: 142704 - protein, 123 aa, Heterodera glycines
MKVHTATFLASSISGISLLGCLLLIANIYNDVQQIWQELDQQIFLFRSETDDLWRDMMKLGQKARTRRAAAGYEGGSASSHANGGASPGVPPGSVNPPSVPPSIQTGTAGGAGCSEYYQYGTR

SEQ ID NO: 142705 - protein, 97 aa, Heterodera glycines
MKAWKEWTQQKNQWESGGTAQGGKRFFENTLKSAVISANETRAIPPEGMSWKRHVSSFQTAPPGPGFKRRYHDVSPIRRMDNTGQVTSAASGTEEKI

SEQ ID NO: 142706 - protein, 16 aa, Heterodera glycines
EAIPEGFGLPINLGAS

SEQ ID NO: 142707 - protein, 309 aa, Heterodera glycines
MQKPTPLNRPNSSVSKTLACGLEKIVNLSGNEPLSVPVLADRSDPLGLKSVQPDAVPMESAEGTKEVEIMEVDEMSGGKGKRDEMGKEKVKSGGMEEEEESEGSESELLGEGGFGSIQLNPSLRAGNKAVEKEDKGKPYLIAQVRGDGVIAARMKLFWDFPELVFVPFSLFDNAQPIEIGDTFRLHKCEWTKSETGWEERGDWLYEVTGRLNYQATATDVSRLRQRLPTRAVGILVDVQRARDRHVKVALVSAPELSCVMRAYRRHFPAEFTETDIRYRSVVRLQLRQINSPPWVLYSQQFAYVLPSDF

SEQ ID NO: 142708 - protein, 295 aa, Heterodera glycines
MASLIQKGITFTLKALDNARTTTALSLHPDADLSNWENAVKLEAQCTRVNREVQTIEAQLDNLRDLSNNWIDLLNRLEGTEKDKGEKEYVKFDTYEKIAERHDAATTKLRDLRDLEATLSADAKLYRGRAEREARADQQANPPPQTATPPIAAPTFTAPLYQFQPIQLDKFFGQKRKWPEFYESFKSAIGSQSISKAQKLNLLRNLLGGEARELIAGFRLEDQNYETVLQLLKDTYGAPEEHIRALHFELANLKTCRSLRDTKDFLLQLERLTRELNNAGEDIEGPQVFLMLEKW

SEQ ID NO: 142709 - protein, 24 aa, Heterodera glycines
MEKACKIWRDYIDFSALELLELAS

SEQ ID NO: 142710 - protein, 247 aa, Heterodera glycines
MFEQLEKEFDEDGLTEIIKHKLYGFISDGASVMRGTRDYEADFLCATDGKRYEHAQYMLRQQAHTRSTAEENLVVGISPPIPEFNKALREKLINNIVAEIKQYFPFGTLMDEIDLLDPSNLPNRSADINQYANKLKKLANYYNYVGHLIYQEFSNVLSLILNDNRLCSLKNSLTPQRFWKLVIEKLGDTFGEELKNFVHHMLIFGLGSADAERAFSVLFHVRGKRLFYFFGCYNFPKLDLQGLRRLI

SEQ ID NO: 142711 - protein, 50 aa, Heterodera glycines
RMKASFGRWADRMKECFGDGTFSLAPPMFYQINCFHFFILLIIIFNEKFH

SEQ ID NO: 142712 - protein, 120 aa, Heterodera glycines
MKRQNVRTLSLIVCTLTYLMVGSAVFDALESEAELRQRQQVEAVKSRLVAKYNITETDYALLESIIVRAIPHKAGHQWKFSGAFYFSTTVITTFGYGHSCWVTMGGKILCMFYALVGFRL

SEQ ID NO: 142713 - protein, 18 aa, Heterodera glycines
YREAIPEGFGLPINLGAS

SEQ ID NO: 142714 - protein, 128 aa, Heterodera glycines; identical to SEQ ID NO: 125618

SEQ ID NO: 142715 - protein, 91 aa, Heterodera glycines
VEEEQRRREEQRENFLMSEKKLNIVLSERDELVVRREQMERDKQRVEAEVQEERARKTELQMDNSQLSAARRQVDNDLQLTKAKNIKIKFE

SEQ ID NO: 142716 - protein, 173 aa, Heterodera glycines
MPSLLLLPTFCFFAFAVVVAHSQMTFSDGWGKRSAVAPFALLADRHMAGNKRHEKPRAAANLFISPTDEDALAMSPAMEACQVGYAQRLMQLHEQMLVRPMDQSLTVGSKMFRPSLLDFVQHVPTMSDKSDDDGDEESVENDERKKGTKSKTKPKAKRHQRKSQCHSKVIHCV

SEQ ID NO: 142717 - protein, 316 aa, Heterodera glycines
MQLHEQMLVRPMDQSLTIGGKTFRPSLLDFVQHVPTMSDKSDDDGDEESVERTTRERKGRKAKRSQKRKDTKGKASVTQNKMPRGKEKLTGKCPGKGSVRPASQSRRKCCLVLTDKRLDATHPNGKEIQPIPNWTTFVRSKQSTQFERTTPCCKSIRASGEVPRRTFGQAKCEGVENEEEGNSEGGCILKTKQTNLEPSAGHCHPLPNFLQTLQNAATFVATTDIETDHHQRMSVFSAQFSEVFGRGQCVRLHPIDQNGRLSDDHWGAAVGGVLRPKKRHGAAALDEGGEFAGTKGQRTARVPNDLLSLNVVGHSS

SEQ ID NO: 142718 - protein, 125 aa, Heterodera glycines
MCFLNIVSTKYEKRRAPLLDHVNIIINDAVRVQILGVMCEGIVSTEQDDYKFHRLQIREYDRLTKNTALAMSAWVEADLDSAWPDVILSHTKLALETDRNDDISEAEFEKFALLIQQIADERGKQ

SEQ ID NO: 142719 - protein, 174 aa, Heterodera glycines
MNAKIIRVPKIACDLSLAKNGVSKNRNYAQKASQTILTLPIPSTIAFIHPIMSAKIIRVPKIACDLSLAKNGVSKNRNYAQKAPQTILALPIPSTIAFIHPIMNAKIIRVPKIACDLRLEKNGVSKNRNYAQKASQTILAHPIPSTIAFIHPIMSAKIIRVPKIACDLSLAKNG

SEQ ID NO: 142720 - protein, 100 aa, Heterodera glycines
SKPRKNGLSKNRNYAQKASQTILALPIPSTIAFIHPIMNAKIIRVPKIACDLSLAKNGVSKNRNYAQKASQTILTLPIPSTIAFIHPIMSAKIIRVPKIA

SEQ ID NO: 142721 - protein, 243 aa, Heterodera glycines
VYRPSTTKCLNPLFLSYAGLLLATGLGKTNLSHDGLNPAHVPYWWVNNPTLGEFCFAMIGRADIEGSKSDVAMDAWPPQASYPCGNFSDTSCWKLYTLKDRATLSRSVFVLKIRIKAFAFLLYERFPSSLSSLGHLRYALTDVPPQSNSPPDTVIGAGRRARVARLNTKMDTRRTPVLPIKGIDESSGISLAPCGSHLCYTSHDSSQSQTRVKLNRVFFPAKFAKPVPLAVVSLDSRGQWESR

SEQ ID NO: 142722 - protein, 533 aa, Heterodera glycines
MTSKRNGTLQKGGPSTKKWDFRAIGNNFTEEMENYKLIDERSTICEKFGFTKNITEFRINSDVRRPDEAMRDAIDTMIKAAFKTTEERMKRKVRMFGVAITGAGLASPVWLPYRAYPQNNADVIMQEINKLGQSGDGDENKKTLLLSEPIMMKITCVTVPSGEGPRNVHKFDFGFKEHQRIRISNVDKICLFYALVASKLYLEVHRNIFNRFMNNIMRQREAAVELLRNCGIDINEYSYGVEHLSNVQNYWDEIYPGKFRIVEFEKSADPRKSIRVLWKGPMGREMVVPIFLENTHWDGLKNYVCFFNRGRKFCVDCECFYSRDIYHTLECRARCYYCNRVGGVPCGKESGVKIECPKCRRYFYNWECYNYHQGHQTCKLWKRCVICDKTYLFNPKKDHECGETYCQLCSVSHDPKRGCYIMPIEEKEDKDVYRIVVWDSETSQDSIYKGDQKEHVINYISVRVTCTECCDDKNRTNCKICGEVRTKDWSEAEGHEPMKDFVEWILTAFTSYDTYIFAHNAGRFDGHFVFNYL

SEQ ID NO: 142723 - protein, 94 aa, Heterodera glycines
APPVGQVLHLLWSPGQGKLEQAGQPKLTVYTLHLATPEELRFSAGLFPVHSPLLRESSLVSFPPLTDMLKFSGCSRLSSGRKIQAGMPVIQVLR

SEQ ID NO: 142724 - protein, 51 aa, Heterodera glycines
MVSVWGRTEFIKSSTNSHLQFLLISTIIFRGEEAPHSKNINGISVGEGPNL

SEQ ID NO: 142725 - protein, 347 aa, Heterodera glycines
PKSRVPKRIPKCRVPKCRDPQMSGPQMSGSPKSRVPKCRDPQMSGPQMSGSPNVVIPKSQVPKSRVPKCRDPKSRVPKSRVPKSRVPKCRVPKCRVPKCRAPKLVPKCRVPVSGLQSSPKVGSPNVGFLKCRAPKLLVPKSRVLVPKSRVPVSGLQSSPNVGSPNVGIPKSRVPKSGSPKVGSPNVGIPKSRVPKCRDPQKSGPQMSGSPKVGFPNVGIPKSRVPKRVPKCRVPKCRDPQMSGPKSQVPKSRVPKCRDPKSRVPKSRVPKSRVPKCRVPKCRVPVSGSKVSPQKSVVPKSRVPVSGLLSSPNVGFPKSRVPKCRDPQMSGSPKVRSPKVGSPKCRDP

SEQ ID NO: 142726 - protein, 86 aa, Heterodera glycines
MRTPFYWRTLTLRTLAVASEERFEIHLHFYIFKIKHVGRSILQRRVNFRGQQQGEDFDQDQDSEDGGNSRPFSEFESILDNTYEFW

SEQ ID NO: 142727 - protein, 32 aa, Heterodera glycines
MNGPSIKQLSTHFAQVQFRIQQIAKAPDEQRN

SEQ ID NO: 142728 - protein, 166 aa, Heterodera glycines
PPPLIDIQLHSDAFCLVMTTKFLRSMLYNGSEVIGLEWCIFDEVHYINDAERGHVWEEVLIMLPAHVKIVMLSATVPNCMEFADWVGRIKNRKIRIKNRKIFVIQTLKRPVPLEHYLYTGQDGKYLYTGQDGKTKKDMFLILDKRGDFLTSGYNIAKNKKNLSYQK

SEQ ID NO: 142729 - protein, 106 aa, Heterodera glycines
MQKNLARILPCPSAHLLRTSTKQMGEDGDDDGGNQQQIENVGRTRPWKGANKKKAAAWKGGAGGGRVEKRRQRREAKRERRKGGDWHRDGQQKRQTEENDGEEMEQ

SEQ ID NO: 142730 - protein, 87 aa, Heterodera glycines
IIFIQKIFFWVFGAVPLNRCAQIYGETESFGNSFPIACTLILRWIFAPHNCLSTPNGHLKKSIYFCFRGSPPEPMRPDLWGDRILRE

SEQ ID NO: 142731 - protein, 56 aa, Heterodera glycines
IFLEFFAWRNTVLHTYHTSIIFFKLFFAFDHPTFYTDQKLTKFCRETAENPSNAYK

SEQ ID NO: 142732 - protein, 53 aa, Heterodera glycines
MVHNITSFLSTPPHIPNESAPASLSSGSVLQLLIVLQIFIILLTAELCQMVNE

SEQ ID NO: 142733 - protein, 99 aa, Heterodera glycines
MSSPSKFSPTKSSPVKKENNVGKAEFVVPSLKAPTRKQSSKNVGMNGDDWNKLYNNKQRVLRKDDGRFAVNFELCEECTWVNARATDLIAPPKAKKRTE

SEQ ID NO: 142734 - protein, 229 aa, Heterodera glycines
MAINMSDKRGLLRQILGEAEITVTTSGLTISGPRLSTPRFLPFDECGRCRSCKATEVEVDTMVTKEGVTIWCTRIDKVQFVPFDMVYELPGHCFFRLKNKSRVFNLPYGDLPSESCEIPLIQHADDERDLKRKAKAALELVEAGLIADSTVQDGARLKKAKTAMKVISDILLSEPEGDDHKKTVEVADVDKQAQEQQPAPVQQKTASVPAVEQSTVEENTEEDTKDDLD

SEQ ID NO: 142735 - protein, 121 aa, Heterodera glycines
MSNEKAHFHVTKYNCKMSNEKAHFRHNNSVHHCEKKTGNFCANSVRALAVPSRHTSRSSISVNGSSVSVDLPPPVVADDLVAVPSSSDVVDALEQMEYGLVTLSSPPTPLSFKLICGCAKI

SEQ ID NO: 142736 - protein, 43 aa, Heterodera glycines; identical to SEQ ID NO: 131356

SEQ ID NO: 142737 - protein, 19 aa, Heterodera glycines
TFAFSSLALPNTHTIFEML

SEQ ID NO: 142738 - protein, 19 aa, Heterodera glycines
TFSFSSLALPNTHTIFEML

SEQ ID NO: 142739 - protein, 19 aa, Heterodera glycines
TFAFSSLALPNTHTIFEML

SEQ ID NO: 142740 - protein, 19 aa, Heterodera glycines
TFAFSSLALPNTHTIFEML

SEQ ID NO: 142741 - protein, 19 aa, Heterodera glycines
TFAFSSLALPNTHTIFEML

SEQ ID NO: 142742 - protein, 19 aa, Heterodera glycines
TFAFSSLALPNTHTIFEML

SEQ ID NO: 142743 - protein, 19 aa, Heterodera glycines
TFAFSSLALPNTHTIFEML

SEQ ID NO: 142744 - protein, 60 aa, Heterodera glycines
MSISSGISFWQNVTKPVPFENEKFLDILTADKFPEAEAKQWVDGRFPLTIQLPKSTLNSL

SEQ ID NO: 142745 - protein, 77 aa, Heterodera glycines
MAPPSASAVGSHIGELANEAPLADQKDGDEEDNDGGGGEAAKNIQSAEGITGTDDGEEDEETEEDEEEEEEEEKEEK

SEQ ID NO: 142746 - protein, 562 aa, Heterodera glycines
MPSSNSFYVIVPSNTNVEGNRTNSFRVRLPRKLQFNSEWDVGLGVIIYPHSWPSLGTSEDQFVQIEWKIGENVQIPIPSSNVTNPVELWKSLYKLLEEGNKPFAVKVEGVQKKFTEAANTARQLGRAEYINKQQQQQQRDKRNVNDDDDDDDDENEEQLLNALLAGVDTLLDLYGATSGGLLEREKRAATSKVPLRNWDDTEEEYQEKLDKYFLRLRGRNLEHLEGLITEKLNAEIALMDDEERKILDQTKELGMTAWIKVFQSAYSACFLHFDSATNRFSLKLDDRYVQKIKISDQLAYILGFNSTDFTEKETIAKFMPDMSGGVASFHVYAPDLIEPMMIGDVIAPVLRIVTIRGKPDEIIEEQFLSVQYHRVLVKEISEIFIEIRTSGGNLMPFQYEVVVQYGGYNVFREVPYQRGSGIGSVFRSLLRYLIPIGKEIGTAIGRQGLESGNRVLSNVLEGRDLKESLVSEGKTGLKNLLEKAANNINAQKSQGFDFKRYTKRNDTREGGAIGKAKKGINKLQSRLGPHDFLPANTPAGRKKKHTKQKSVKRLRTDILGTY

SEQ ID NO: 142747 - protein, 18 aa, Heterodera glycines
MRTRPIWQVKQRLLTSQK

SEQ ID NO: 142748 - protein, 132 aa, Heterodera glycines
  unsure (1)..(132): unsure at all Xaa locations
VPPEPDAXRFMGRPIAXXNSFPIACTXILRWIFAPHNCLSTPNGTLEKIDFFVFGAVPPSRCAQIYGETESFRNSFPIACTLILRWIFAPHNCLSTPNGHLKKSIFLFSGQSPRADAPRFMGRPNPSGIASL

SEQ ID NO: 142749 - protein, 104 aa, Heterodera glycines
NGVSKNRNYAQKASQTILALPIPSTIAFIHPIMSAKIIRVPKIACDLSLEKNGLSKNRNYAQKASQTILALPIPSTIAFIHPIMSAKIIRVPKIACDLSLEKMV

SEQ ID NO: 142750 - protein, 104 aa, Heterodera glycines; identical to SEQ ID NO: 142103

SEQ ID NO: 142751 - protein, 95 aa, Heterodera glycines; identical to SEQ ID NO: 137696

SEQ ID NO: 142752 - protein, 126 aa, Heterodera glycines
MSSSNIILCLFSNHCKILNMMGSMAFGLVLLMNPLHVYLPFIRHFGSLAELMPAFMALCTSVMVMINFWFLMLGAFTYVLIRDKRSLFVYKEEYFNNGYTDEEKMNVKLAMIRRSSSAPISRMYSG

SEQ ID NO: 142753 - protein, 87 aa, Heterodera glycines
ALEELHRMRVPPLLYAQRLLCKDGKLLIRKNEIKSGILTPVDKPALEELHRMRVPPLLYAQRLLCKDGKLLIRKNEIKSGILTPVDK

SEQ ID NO: 142754 - protein, 73 aa, Heterodera glycines
  unsure (1)..(73): unsure at all Xaa locations
IFRLCTAPIERTXXAATRIRCSSQRALQTYFCFFSXSSLNGVITTVVNCFAFNKPIIKIIIGTEVQAYADFVS

SEQ ID NO: 142755 - protein, 260 aa, Heterodera glycines
PKILFLLLLLPNILCWINENRRIEEEILRNYDRRHRPVKRESTVTQVQPVKRESTVTQVQLFLTINHIEKVDQSEGTMLLHGVLWTSWTDEYLQWNPSEHNYTYVVSLETWKIWQPTFALYNSARSTNWFVYMNGVSATVANDGKVIAAGTFTFHVTCQFDFSAFPNDVQECPIVLADWIFDNSKVNLSGMVPRSIGGINVDWIFDNSKVNLSGMVPRSIGGINVKPAVRLSFDPLSETVKKHVSGGYSNLFFHIFKYFN

SEQ ID NO: 142756 - protein, 47 aa, Heterodera glycines; identical to SEQ ID NO: 127360

SEQ ID NO: 142757 - protein, 20 aa, Heterodera glycines
MPMPDKALPSKVIGFKSIMI

SEQ ID NO: 142758 - protein, 174 aa, Heterodera glycines
MPSFNSGLVAGAALGSAIGYYLGSQTSNDNLVIQAEHNHPPVNPRGRGEAQEDVFNEVREALRGQGVHQPTIEQQVETVVALSDFIRRELGGVGNTEQVSNVGETFQTEPASNVGEMFQTEPASNVGETFKTEPASNVNVGETNHVVDRVAYEVYNLLTFIIKAGNEATGNGGE

SEQ ID NO: 142759 - protein, 120 aa, Heterodera glycines
MVPFRDPKTVAEKRFNTALCKGRSVIEHAFGIFKRRFSIAKTSCRLKLRRIATAILAAAVLHNIAIEMRLPEPPATEDLNENDDLNEINNENENRNAILNDRQSRQAGIEKRQELVARFT

SEQ ID NO: 142760 - protein, 92 aa, Heterodera glycines
MIGRAVRNRLFIFEGIFKFILYPRKMAISFFEKFYTSQKRLRMRRRAVHNRHFISQRIFIFRGYPRKMAISFFDKFYTHTNALEHDREGGAQ

SEQ ID NO: 142761 - protein, 92 aa, Heterodera glycines; identical to SEQ ID NO: 125147

SEQ ID NO: 142762 - protein, 33 aa, Heterodera glycines
  unsure (1)..(33): unsure at all Xaa locations
AISFFDKFYTHTNALEHDRGGRCAIDLLXLREF

SEQ ID NO: 142763 - protein, 87 aa, Heterodera glycines
FLPGGTQFFTLTTPALFFLNYFFHFITQRSRLIRSSPNFAGKLLRTLQMLINFLRIFCLEEHSSSHLPHQHYFFLIIFFILSPNVLD

SEQ ID NO: 142764 - protein, 239 aa, Heterodera glycines
MLVQHKHRPAIIPELQAQITAELEVAEKHKNIRRLFARTLKGCETENNQSGIPIYDFEERECEYLDVKRALEEDRETEKNRDKRPKKETPAYEIYDLNVIYKRNNNPKWPNGEALDKYLTAIIEMYTEKNKDNRRETIARSLEHAKRQLLDAVHFDGMVQLEDGASQSAAVSNAPSVTVTPVVEKRQTVQTKAPTEKTKEASTPLRCTGGIIYCLSIFIFAINRGRSDSNGDCRANQCG

SEQ ID NO: 142765 - protein, 117 aa, Heterodera glycines
MSEKSHHLLNCFIGLLAMMLFISGGKAQEQTTPIRLTGGDTSMFSIPIATVDQCMPHEEWNTFGIEFRLPKQGGHCDEGMLICYPSTLAYHDVNTVHTVDEFAVRSELYNLRNMVNK

SEQ ID NO: 142766 - protein, 137 aa, Heterodera glycines
MKIRPMEKQWNAYTFPSLCSLLRYHNTIPIRQQLLLPQFQFVNSFDEFQGHLTLPGRIERRAGRRAQWAGAVATKTDATGAATTTTNAATNTDATGAATTAKTTTTTDGAAATTTTNANNNTTHGNATRSASNSDSD

SEQ ID NO: 142767 - protein, 76 aa, Heterodera glycines
MVRATTARTRASAARARSIKINRRNAKKARAAIGRAGHTRNAMAREKCMMCLGKVSSMTRVTMGCVHEFHRRWRRG

SEQ ID NO: 142768 - protein, 362 aa, Heterodera glycines
MAVRKRPPYENGGTKTALRIPASVFCIPIRLQFGRNDCGHRHAGHHPNSDQDKDEEDCFTPSRVNSSAFGEPSLALVLAPASVPLFCCNYFRVSFYALPAVVQRARRRQQGASTNNRRTAPVRGRSSARARVSAAVRRASRRQGNNNDGDGTRTRKKRGSAMRRPLKLKPLLGRPKGSRKSRAAPRTAGQKRGRGRPRTVKKGRARRGKNAAQQQTTTTADAATNTDATGAATVTTDAATTATTPPTTTTADGATVTNANEPGATTATNTEAPAATTPATTTNADGATVTNANEPGATTTTMAATTNTEATAATTTTAIADGAVATNTDPTGAATTPTTNAATNTEAPAATTPATTADVALD

SEQ ID NO: 142769 - protein, 17 aa, Heterodera glycines
MEKACKIWRDYIDFSAL

SEQ ID NO: 142770 - protein, 49 aa, Heterodera glycines
LNLKKCQRLLFLKFFKILTFSLLIYYFAKLIHKYFFRTCSETHQMLIKS

SEQ ID NO: 142771 - protein, 15 aa, Heterodera glycines
LKAIHCLPVLGTAKH

SEQ ID NO: 142772 - protein, 77 aa, Heterodera glycines
FEYPKRTLEKIDFFVFGAVPPNRCAQIYGETESFGSSFPIACTLILRWIFAPHNCLSTPNGHLKNRFFCFRGSPPET

SEQ ID NO: 142773 - protein, 71 aa, Heterodera glycines
KNRFIFVFGAVPPNRCAQIYGETESFGNSFPIACTLILRWIFAPHKCLSTPNGHLKKSIFLFHKYFFQKVL

SEQ ID NO: 142774 - protein, 53 aa, Heterodera glycines
MVMIHVLIQNHDLRVNLRSFIIHVSIYGLNHVSIHAHYSHVNLRVKSRVNSRS

SEQ ID NO: 142775 - protein, 33 aa, Heterodera glycines
CAKCMGHKFNLAKETEQYGKEDEEEEEEEEQED

SEQ ID NO: 142776 - protein, 80 aa, Heterodera glycines
MRNALRNNAQNRWTTEKDETDGKFVIPYRITGNFTQKELAVIFGAMEEIERNTCIKFRTKRSSGGGDKDFVDIQNEYGEG

SEQ ID NO: 142777 - protein, 130 aa, Heterodera glycines
MDQRDFGTFMPKVTKLMLKELPADLAALLPSKVVADINALLANKSLDCAQKLEKIDELMKTVPDEVMEKLPMPPHLAQLPEEVQAQIKKLCLETKHKSVEEKKEAFKAYAGTLPAEQRAIICKEKPSCGK

SEQ ID NO: 142778 - protein, 74 aa, Heterodera glycines
MNPSLRHSFSIENILTKSVNFETFSEPLLPHHFLGRCFDKVPTFVLEPPPKAFPTEFSSAFFERNNGEREGVRS

SEQ ID NO: 142779 - protein, 198 aa, Heterodera glycines
MASQAEMANLFRQLTDALQNIATQTNPNPNKQNSDLFTTINSQLSEFVYNPETDSTFDIWHDRFGAFIEKDGQQMPDDMKTRLLLGKMSSQDYARYSESILPQKPTSRTKNVAIKFEAIVEECRTILSLRSAAAALEQPGQSFNANAIALKPQQAKERHSRHQKFSPSSRRENSGNQSRSPSLNIRRSSNSRPPFPCK

SEQ ID NO: 142780 - protein, 245 aa, Heterodera glycines
LRTARSDRVALRKRRFIGDLIDIGKFAFDTGCKLFHTVICDLGKKRKREAAYGKDEPAPNPAAVNEFKVLQSTPIDELVEKVKKQLREVAEKPGFKDLSPVDQEDTLLDAISADDQFMKDLVRESIDDSVVQLRKVTDDFVTYSHANLEGRKAMKKVFDAYENTYKTPKQKLDKVKQLQAEMSDELRNSLKMTTDPEVLKEASFAFGDVPTFTGITKRVSALPPKYLSIKGHEQCVDKYVVYGWH

SEQ ID NO: 142781 - protein, 80 aa, Heterodera glycines
MAKLILLALAFLSMFGIVCSLEEPSVCCHQCGKEFLECQSTCKPEDRAGNVECPEYCNFGLEDCSRDKCRKPCPRPKEEH

SEQ ID NO: 142782 - protein, 142 aa, Heterodera glycines
MPTVLIYPIDAHQKLDEQVKCLLKRASGDVSSTTKKLKAQIFARFRRDEAGRAFSAAAQLELSDTAMPSSFASVWKHWANFLGNLYLANQLNELITDVQQRRGNAMAEILKRVGLLQPQEVFCALRVELGPSHVGRYIQQCS

SEQ ID NO: 142783 - protein, 32 aa, Heterodera glycines
KPKLFGLFKKELKIFKNFIHLPFDKKASESLI

SEQ ID NO: 142784 - protein, 23 aa, Heterodera glycines
KKELKIFKNFIHLPLIEKASESL

SEQ ID NO: 142785 - protein, 465 aa, Heterodera glycines
MTQFLNDGLAATYLAYLATISQRKVVVVDPMVWSNGLDRVMPYKNMTFGYDPNVPAEVILLPVHFPGHWTLIVHDVQCGTHFADSLPTQYGRLDVQLTDKIRKIISDILPSTLLTGIVDVQNLTAQHDGNSCGYFVCLYAESWLMNNRTFVLPDLSINYEKKRILWHINELYGSDNVPYHPREGVPTPYPIVYRHADEAQSTSKAAEPMEIDEEDDIMIIGPQMSGQAVNAILTQAQVAGENQADTLGLVSESCAPQEPIAQADDAIFVRPKTPPRRSSRIGRRQSASISRSPSPAPRRSLLAKAVEKVTAFTQRCYLAHKGWCCAAAAAKHYPGYSNSGKLGDKKCSHCGALLFPHEDSRVCCRQGRVVLPKLNPHPKELEELIVCDKQPREGKEFVRNMSRYNNLLQFASVSAGNKPCPAGGPMAVILNGEFHRRISSMQAGTTQIVPIVLLERTASVLVKSA

SEQ ID NO: 142786 - protein, 25 aa, Heterodera glycines
TCTCGVVVKLSIFHNFSPGFNSPLG

SEQ ID NO: 142787 - protein, 372 aa, Heterodera glycines
FLTKQNVIPIHILPFSYVCATFIFESMAIAFRRAPPREQLQEGAFVVEDDVPSNFEIERRIEISEMAHLSEMAHLFLGQSGTILSYLLLTIYLFGDLAVYSSTVPKSLMNVICSSLNVSAVSISPFSPCHSHPNDLFHSLSRFAVYRICIFAFLLCLPMILMGITRTKWLILMGITRTKWLQLATTLSRWTAFLLMIVLAIAQLAHNGPKGSPAPVNFHGFGSLFGVAVYAFMCHHSLPALITPIRNKHHLSAKLTSVYSLVNKHHLSAKLTSVYSLVFLFYCALSLSGAFTFAHVQDIYTINFLHDEQTGGLLRLTDYFHDEQTGGLLRLTDYFLALFPVFMLTSSYVIVAITLCNNIRVLGTLLCPPKLA

SEQ ID NO: 142788 - protein, 104 aa, Heterodera glycines
GHHVQPSAHQRFGAVLSPTPPPSAYPSAGVVISSKVPSFFRSVPPASPFVCPAPPSVVLSQPPPMGSPLPQRAQLSREQLLSRHSRDVEARKVTVKLYHLQRTI

SEQ ID NO: 142789 - protein, 39 aa, Heterodera glycines
DLPFPLFLQVFCLKTAKIWSFLMKKCSCYPAVEKKLLVK

SEQ ID NO: 142790 - protein, 228 aa, Heterodera glycines
MKVCLLISSFAFLITILISNNYVGSEKKKMEQKTFDEIFGEKWEEKRNEEQKKREIIGKFNKIKEKIKQKGRKYARKEWSKIEGKIAKKLGTNRQYIYEWIKELGLNQKNCYKSKTEEEKIEIINKFIEMQNEFKQKRKYSRKEWNKNYEEICKKIGVSLFIIKKWMKQFGISRKITEKEKMEKMKIYWHIKKEKPKMSDKEIGKMLKIHQNTIGNWKKQFVHGLMED

SEQ ID NO: 142791 - protein, 346 aa, Heterodera glycines
MHQGTPNVPTVSNNGTSFGRIAPPGISDGTMHQGIPNVPTVSNNGTSFGRVAPPGISDGTMNQGIPNVPTVSNNGTSFGRITPQGISDGIMHQGTPNVPTVSNNGTSFGRITPQGISDGIMHQGTPNVPTVSNNGTSFGRVAPPGISDGTMNQGIPNVPTVSNNGTSFGRITPQGISDGIMHQGTPNVPTVSNNGTSFGRVAPQGISDGTMHQGTPNVPTLSNNGTSFGRITPQGISDGIMHQGIPNVPTLSNNGTSFGRITPQGISHGIMHQGIPNVPTVSNNGTSFGRVAPPGISDGTMNQGIPNVPTLSNNGTSFGRVAPPGISDGTMNQGTPNVPTLSNNGT

SEQ ID NO: 142792 - protein, 27 aa, Heterodera glycines
MNQGIPNVPTLSNNGTSFGRVAPPGIS

SEQ ID NO: 142793 - protein, 59 aa, Heterodera glycines
MCTYQRMYLEKGKQKPKTETKQYGRQPLSFCINLEISLSIFLTVLERDREFSVRVPPLS

SEQ ID NO: 142794 - protein, 54 aa, Heterodera glycines
MSSTNSNNNGRAVQQQQQNNGRESAGGAIKQRDGAAKEPTAQLQQQQQKIIRIL

SEQ ID NO: 142795 - protein, 130 aa, Heterodera glycines
ALTLPITVEQLRIFANSPIDVAEEERLDQEKSRKVLELYRGKTVKQLEALLFQQQQQNGNGGAAINCNCANELTNGENGTGAVTVNQHHHHQPNCAAIATTKTSPTVATEAVVVETLAQAVHRLTQRHEE

SEQ ID NO: 142796 - protein, 23 aa, Heterodera glycines
MRNCSTVMGKNKVTKFVGKTPSM

SEQ ID NO: 142797 - protein, 32 aa, Heterodera glycines
GQVSPVPGSMPIKFGTILLLIERARAEENFLI

SEQ ID NO: 142798 - protein, 223 aa, Heterodera glycines
MGAKKIGHHLKRVFLFGKIFAYFCEWSKGEKYEESHEKLWKIFVNNLSDLNKNSNEKQLNFIKMMENLLNYLRNQSPQISADAQRNSKELLANCVNQFLLLCESNAEFFENFRELSKSRAVFKEILDFASKGMEEMLPNRLMNWFNDHNKNQKDLENFGVGRSFADRIFEKSNIKKSYDECPKENMTNKELIRADQKAQSNDPEAYYLMTSYIDFLQTSADDR

SEQ ID NO: 142799 - protein, 132 aa, Heterodera glycines
MPKQNEIVLKYSFLDLTWFLDIEAVFYAISKTKKCLVVKTIFHISLHNFVSSARIETGIRPLKRAARALQEVKKLFEFLQFCFHNFRKLFGIIMPKQNEIVLKYSFLDLTWFLDIEAVFYAISKTVIPNPRL

SEQ ID NO: 142800 - protein, 102 aa, Heterodera glycines
KVINDNDKAEGSTGPSAANHQQNVSEQYLTKLELEKRLLKAELKQREMMEELKELKDANIEQQKKENAFIGQIQELKDEQQKCLDKYEALEKELARKYSKLF

SEQ ID NO: 142801 - protein, 62 aa, Heterodera glycines
MLIKKGSNTKLIRSLLHGDLISPFWLGTREHKILYNIQKTACLYDLYRLRYGQAPIRILMEY

SEQ ID NO: 142802 - protein, 60 aa, Heterodera glycines
KPNRYSHFLKYKNLVDNKLLYIIIFFGCCRWSIEMDKIAHCLLVCCLLIIFFRLYGLWRK

SEQ ID NO: 142803 - protein, 17 aa, Heterodera glycines
HKHLFDLFYHIHNLIKI

SEQ ID NO: 142804 - protein, 204 aa, Heterodera glycines
MTEKGINSKKLKKNTKQAQRLLAFKEADMNYLLATILIQQFIILVCGANEKEIITLYKFMCKELTENDEANLYRNTKDWQHIKTIIHNEQIMDKFETLIEWQIRYSSIERWFNYCEKLKTYINSKNVNGEALLMSISLKPKFTLPNGNGILPIAKAMANIVEAYKNIFMGNCEKIFRNCYKKIIKQEENSSEMNFENKEDSIKV

SEQ ID NO: 142805 - protein, 208 aa, Heterodera glycines
MDYGLGRIRRRLSNYGAMSPTKSVQEVQPVALSWDRLTVRQFLGKPVGVVSSMSKIVSTFLDYVSGKADTDQLVALMGDGGVGKTTLLNTLLNRNLKNLSMEDQVLINAHSLGQFINYVIKYVQHDDLFMGTLTMKEHLMAQAQLRMVGHTQRTMRRRVNEVGFGGWTEAVANWKSFKDKKGIFGVVRRRPFAVRFRTYEQSANHFCR

SEQ ID NO: 142806 - protein, 455 aa, Heterodera glycines
MDYGLGRIRRRLSNYGAMSPTKSVQEVQPVALSWDRLTVWQFLGKPVGVVSSMSKIVSTFLDYVSGKADTDQLVALMGDGGVGKTTLLNTLLNRNLKNLSMEDQVLINAHSLGQFINYVIKYVQHDDLFMGTLTMKEHLMAQAQLRMVGHTQRTMRRRVNEVIDEFGLQECRHEPVGFSGDKKGISGGEARRLLFASELMNNPQIIFADEPNKLKHSASDALTMDYGLGRKRRRQSNYGAMSPTKSVQEVQPVALSWDGLTVVHAKSGRKILDNVSGMVDAGQLVALMGASGAGKTTLLNTLLNRNLKSLSVEGQVLINGHSFGRFITYVSGYVQQDDMFMGSLTVEHFMAQDWMVGDTQRTKRTRAKNVLEVQPVALSWHGLTAVHAKSGRKIPDAVSGLTDAGQLVALTGASGVDRTTLFNTLLNRNLKSLSVEGQLLINAHSLGQFINYASG

SEQ ID NO: 142807 - protein, 53 aa, Heterodera glycines
MRNLFKLPKPAIFKTSISSQICNKINSNMVSIRLFLLLLGIRRRLREIRNLFV

SEQ ID NO: 142808 - protein, 77 aa, Heterodera glycines
MAAFDANNNSRLSPEEQFRAVLNLRRTAQRLTVENSRLDRMNAMLVVLFQRLTAFAVPPVVPVVPVNANNNNRHSYN

SEQ ID NO: 142809 - protein, 38 aa, Heterodera glycines
MSTPTRREFSNRLLMLIFRIWTRTKRNSSADDLSLYSF

SEQ ID NO: 142810 - protein, 199 aa, Heterodera glycines
MLTKGKVFGVGHSRWMLLPCSPSRGVKVRCFCHPRAQIAALLACLSILWTVKSIKSTSIAFPIMTIHQLHKIAWSGTQHSGHFRTSDVRIGDKLCPEWEKVGGLMDGLVTRIRAAVANDDDDTFMKNAIKYHVEFNLSFVLPKNKWKDYEDTINKATIKSDENPHPAPTAALIFLRGLSIIMRRAKTSKETNIYFKIKK

SEQ ID NO: 142811 - protein, 135 aa, Heterodera glycines
FTISFRSSVHVSVDPGVTPFQPVKGRPNVVMFVGLQGAGKTTTCTKFSLQFATLCLCSLFICLFAIRWHHYKNNNIFSISGHYSSYTEVDPVIIAANGVDKFKNDGFEMIVVDTSGRHKQEVALFEEMLQVLNAV

SEQ ID NO: 142812 - protein, 42 aa, Heterodera glycines
MIVVDTSGRHKQEVALFEEMLQVSNAVKPDNVVFVMDASIGQ

SEQ ID NO: 142813 - protein, 147 aa, Heterodera glycines
MEYAEKGDPEMHKQLQNLIGAFHTLSGMNRFRKPFWDEQQYNSIHKLVMGSANYFQHRFGINLADFSQNPTQFGDMNSKIVPLINLVRNRLLIEDGPKQQKKAKDGEKQQKNKKDGQKRTMPKEGANDAKDDGVNGHFRKLAKWRPT

SEQ ID NO: 142814 - protein, 24 aa, Heterodera glycines
MEKACKIRRDYIDFSALELLELAS

SEQ ID NO: 142815 - protein, 22 aa, Heterodera glycines
DRKASESLIIFKLTFGAFQSTF

SEQ ID NO: 142816 - protein, 39 aa, Heterodera glycines
KFLKILFISLLIEKASESLIYLLINIWCVSEHVLKNIYE

SEQ ID NO: 142817 - protein, 29 aa, Heterodera glycines
LFGLFKKELKIFKNFIHLPLIEKASESLI

SEQ ID NO: 142818 - protein, 19 aa, Heterodera glycines
TFAFSSLALPNTHTIFEML

SEQ ID NO: 142819 - protein, 19 aa, Heterodera glycines
TFAFSSLALPNTHTIFEML

SEQ ID NO: 142820 - protein, 19 aa, Heterodera glycines
TFSFSSLALPNTHTIFEML

SEQ ID NO: 142821 - protein, 19 aa, Heterodera glycines
TFAFSSLALPNTHTIFEML

SEQ ID NO: 142822 - protein, 19 aa, Heterodera glycines
TFSFSSLALPNTHTIFEML

SEQ ID NO: 142823 - protein, 19 aa, Heterodera glycines
TFSFSSLALPNTHTIFEML

SEQ ID NO: 142824 - protein, 46 aa, Heterodera glycines
FEIFVIFSRLIEPVKSFRMISRLFDSVNNFKSYIDSKLAQTELARS

SEQ ID NO: 142825 - protein, 192 aa, Heterodera glycines
GEFCFAMIGRADLQGSKSDVAMDAWPPQASYPCGNFSDTSCWKLYTLKDRATLSRSVFVLKIRIKAFAFLLYERFPSSLSSLGHLRYALTDVPPQSNSPPDTVIGAGRRARVARLNTKMDTRRTPVLPIKGIDESSGISLAPCGSHLCYTSHDSSQSQTRVKLNRVFFPAKFAKPVPLAVVSLDSRGQWESR

SEQ ID NO: 142826 - protein, 50 aa, Heterodera glycines
MCPPIQMCTLVNPISQKAVNDITTVIFGSHEFVGPNDGIGLSNIFLVNKK

SEQ ID NO: 142827 - protein, 105 aa, Heterodera glycines
MRIVLSSLTLIIFLCIFTVSGQSAENATKSVPHSVPNGKEKPNYSICARFGANKQRACRIMVHNLFETRNEFPLRLLSAQSMGKVMGRHCAWNTECSVMSNGTDS

SEQ ID NO: 142828 - protein, 123 aa, Heterodera glycines
MQRDGVPSSASSSSIACSEPSVIVRSTVPVLSNENKNAEKIRENYQSDDNENGESSCDACEADEEDDVEENMQNEESGDSGSEDSHDNDSDGHYSDNNQAESSDEKRKETYKEHSDGHSRGSI

SEQ ID NO: 142829 - protein, 348 aa, Heterodera glycines
MSEKLAFFLKSTQEKQSSPKLRTKLNTPMAQKTKAPTKAAKNQAIPKNQKHTASSDRQKKVTEKKAVSLGNDKFRRRRRAITPIDSSTIHALLIALAILCITVLAFSSDLNPWAIVAIVFLTLNSQQANNRPNQIAKVIANVANRIYGTTDRHTEREPLLNSDDEPHRNVPQTHGLQAFHRGSYTERDRHGNAQQATPGLLKQQLSTPEFEFKLDYYPPTNRNNNKNSRTAGEASHQSRPAAPIATMALARSGNNQQIERSASNKSTARSERSGKKMESGECCDEDGECGGGDGECCDEDGECAGVSRTSSWNNDPNESAASNKLTAKSERSSEKKERNDDSVGTSAY

SEQ ID NO: 142830 - protein, 968 aa, Heterodera glycines
MIRNQPTPATNANTVPLNAPNRTQNQNFRPYGSNAIVVTEKNEDDSPVISVAHFEQKETRDYEKFFNALSTHSTEFPTNNPALVKTSKCLDITLSVVEKEAKGLMDSGAEANIANPEFLYQISVEKGINLTDWGFCPNSGPTKLPFSVASFNGGNISVIGVINVPIRKGNIESVISCLISLKPFSYDFVLGPNALDALGYYIGNTITNEILNFTSKFPTKNALLNTVYVSSFKSIPPFSSCFVESFVKTQNNCQKRSQFLIENSMSEQDLLDYESETERDENVMELCGEEEEKMLKKFGILDEKPKIVRSKSAPETDDVKVPINNLMVVERAIVGSKRGKFKILIHNKSNERIFLEPGMKVAQAEVIERVFDPFSELMPKSFDQLLLPQIFIRNLSKIDSKNRINDLFSILDPKTGPLSESEKEQMHEVWCEFNEILALDESELTQTGLIKHHINTENSNPIKSPPRPIPFGVRAKVTEMINDYLNRGVIQPSSSPWASPIVLVTKKDGTVRFCVDYRKLNAVTVKDSYPLPNIEQILMYLGNRKFFSVLDLISGYWQVKVNPEDVPKTAFTMPEGLYEFLVLPFGLCNAPATFQRFMNNILGEFVNDFVYLDDILIASKTFDEHIIHLKKVFQKLKDFEVKVKAKKCGFAQSNLPYLGHILTRQGLAKDPEKYKPILDFPQPKTIKQLQRFLGMTGWHRKFIKDYAKIAAPLTKIFKKNPTNKSWEWDEGAEKAFTNLKESIVKEVVLKYPDFELAQKDPKYKFHIFCDASKEGLGAVLCQRDKSGKLRPICYASRKCNKAESNYGPTVLECLGIKFSVQKFKQFIAWLPTIVVTDHKALPGMFRSKNSVGNPKVDRWIMELGAPFQLEVVYSPGKENYVADALSRAFPNDALFQFGDNEENENVTISVMVIQKNNSLPKNSSKEEWLKEVKNSELGFIFEFLDHKILPSDQKLRQKVIGFPWKIYC

SEQ ID NO: 142831 - protein, 51 aa, Heterodera glycines
MNIKKGKPFIGTECPLNATFVDNGQLMKNDATNSLYFCYPTVRSDLAQMTA

SEQ ID NO: 142832 - protein, 141 aa, Heterodera glycines
MREIAIEFVVVDLQLARDSLSLDDFMLTRLGLCSKDEQLASYVEFNVQKFTAKCASGASSEARQNALSTRRLLCLSESCIIERDPISYAVICARSLRTIVCLVRDINDPQKFTIVYECGVERTFSSNERDSLLAALLDGIR

SEQ ID NO: 142833 - protein, 83 aa, Heterodera glycines
EQKRKKQSAFLKKALRLKIGALWKQYRSERAKVVEEYTAAIAILGPQENVWSSPDPDPKVPSTSAAWEHNYVPISPDYAATLM

SEQ ID NO: 142834 - protein, 154 aa, Heterodera glycines
MKLFLFFFLIVLFLIIQIEIGAEKKKLEQKTFEEIFGEKWEEKENEQKKREIVQKFNKIKEKIKQKERKYSTKEWNKIKDKILKKLGTNRTKIYKWIKELNLQEIKSYKSKTDEQKIEIVQKFMAMKNEYKQKGRKYSTKEWHQNYAEIVKKIG

SEQ ID NO: 142835 - protein, 40 aa, Heterodera glycines
IFYRFLNGLDFFLAYQNFIEPGSFYSLSIAPNFFDSLTRP

SEQ ID NO: 142836 - protein, 78 aa, Heterodera glycines
MAFEAVMVKQNFPQETLSQNLQEWYRQPNRQFTSTSLNPIMTCRHLTQNQWKYCRTATRKRQGGTSETITTAQWFAGS

SEQ ID NO: 142837 - protein, 188 aa, Heterodera glycines
MPKQNEIVLKYSFLDLTWFLDIEAVFYAISKTKKCLVVKTIFHISLHNFVSSARIETGIRPLERAARALQEVKKLFEFLQFCFHNFRKLFGIIMPKQNEIVLKYSFLDLTWFLDIEAVFYAISKTKKCLVVKTIFHISLHNFVSSARIETGIRPLERAARALQEEIRINSPCGPNFRPPATAPCFSQV

SEQ ID NO: 142838 - protein, 219 aa, Heterodera glycines
DFAHHCFRYICQNAFELFESDEFLQIDQNLLCELFERDQLLINDEYELWQAALRWADEKCRQKGNVCSAKKRRALLGPALFKIRFPLISPEEFTKNIVPSGVLTNDEIVSIYQFHSHPNLRGVPGLKTLKFPWHGRISDWNTAKGNRGTLALEIEKFSEFAREEVGSRRFSDYEIRINGFGWKILAEIKTKEKSTDEKCLGFFLSCTASGKGEVKIKIF

SEQ ID NO: 142839 - protein, 141 aa, Heterodera glycines
VVKSPVGGDFVVDQCRKMLVKEGVDIVPYYKVASKKEVKEGDAPIWTPRANLPAVTQSYENFMGSLFRAHKHILTLSSDVFEAMFRFDAQNAKSGGPSADQSSLVKVPDVEAAAFKVMLSFIYADDLSELDGENAMAVLYA

SEQ ID NO: 142840 - protein, 37 aa, Heterodera glycines
LKLNSAAWVQCSITLRANWSIRRMFSRFLSKFDDITM

SEQ ID NO: 142841 - protein, 307 aa, Heterodera glycines
RNQKIDIIYLDLQKAFDQVPHDLLIYKLKKTGITDNLLNWLRDFLLGRTFKVRIIKNSNEFPVKSGVPQGSVLGPILFLIFINDLPEEIPKEISIKLFADDTKIYHCYSNESQRSFSSVFNWAETWGLNFSVKKSSVLYLGKNNKKIPYTIKNSTFPESKIIRDLGILIDNKLKFNGHVSTILQKAYLKSRILFKKIKTKSTKTWITVYKSYIRPLLEYATEIWNPRTKKEINRLEKFQKNFTKNVFRKCCLPYISYSERLKFLKLSKLETRRKYLDIITAFQIIKNTTHLNPKNLYNFSNRKRSPF

SEQ ID NO: 142842 - protein, 240 aa, Heterodera glycines
MLHNTVIEVIDRVCKEMAIRQHKDLLFGGKTVIFSGDFKQSLPVVPHEGLTAQVTACFQTSPLFGQFTTMKLTINQRLGKGQQAYLQMCRQIGLGETGEHFWIPPQFIVKSKEELIDYVYPNFQQLLGNDKELLNRLILAPHIDTCDEVNEIMMANVPGQVREYLSTDKPLDDRPLDIDEIESEVAALNRRTDSGMPPHSLRLKVRCVVVLLINKSDKEGLINGTRIVQEELGDDRLIGR

SEQ ID NO: 142843 - protein, 30 aa, Heterodera glycines
MTEIEKEMKAIETLLGEISHHMADWIEEKL

SEQ ID NO: 142844 - protein, 95 aa, Heterodera glycines
MFEFLLPFSKGLVVQNRQNVKVQHGAIHFPQLRDGFCPYLNFYYGIFYESASNNEYRNIIYNLYSWHNRSVKFVIYVRTPVQAQCAIYEALFQYE

SEQ ID NO: 142845 - protein, 201 aa, Heterodera glycines
MPVASNLLKTVSREGLKAGNRVLEDISQGKALRESIQAHAKHGMENLVEKLRQCGMGAAKTDDLLIIIDEKNLSESFIKKAHHLNMDKPVKVELTDGSLMVFKPKQRERDSKIIPTQIVNDEGLDETGSIPTLEDPYTTAEESDAEPTTSTPKTRPLIRPMRVGTTKFRQKQKSFVVKKKVINNDPEKFGVGSRGHILRAD

SEQ ID NO: 142846 - protein, 128 aa, Heterodera glycines
QQIDRAKQLLEYRRKRFAALEFEAKKRDEQQQQSSPFSSPISAALTAGEALKERIGAAQVKETEKSDQDNNNSMEKPKTHAEVLKEKIQQQQQQEITTATPTELQMTVAKRQQTKNPCQASKGEDRTK

SEQ ID NO: 142847 - protein, 187 aa, Heterodera glycines
PEDRSLNLYVNPPEVLTMHRHPVAHLNGMRGKVGYTRGFHVWQLNWPVNQRGTHAVVGVATKDAPLHAPGYVSLIGADAEGFGWNIGGNKCYHDANKCYHDAQNTKPWSFPYEQPFVAPEKLFCVLDMDEGQLAFATDSKYLGVAFRGLKGKKLYPVVSAVRHCEITLRYLGGLDRKSTRIRIIGKK

SEQ ID NO: 142848 - protein, 32 aa, Heterodera glycines
MQMLYSLAQKMDSYLLETCFNLTILFARFGIV

SEQ ID NO: 142849 - protein, 93 aa, Heterodera glycines
MRSGSPPLTNFCSNNGNPPSLPPRPNFGTVQQQSQQQLFVGQQPAFVPYNASGMYNYNFYQQSAAPFTNPWPAIHSKNNFLLAAEGFDNIRII

SEQ ID NO: 142850 - protein, 75 aa, Heterodera glycines
MATIQFLKSLGKCMAKKPICCNLAKSDEYNFIKKRITLINHNDPPLSQVMDTLIVTLMSLKKAMESGKKQIIFLF

SEQ ID NO: 142851 - protein, 264 aa, Heterodera glycines
MGTTIEKILTHVYYDLRSPASYAGVQKILLEAIKKNSNIKLKDVQNFLEKQRTYTLFKPKRNKFKRLKTVPSGLHTDWQCDLCVMDTLKDQNDGFRYILVCIDVLSRMLYVSPTLSKKGDHMIEAFEKIFKKSGVLPNKMYSDSGVEFQSKQMLNYCKEKDIIKKCNKKEKFSKGYYPNYTDELFKIERVNNTNPVTYRLSDLKGEEIKGIFYNQELVKTTEQTTHRAEILKTRITKGVKEHFVRWIGHSEKQNSWIPDSNLIH

SEQ ID NO: 142852 - protein, 74 aa, Heterodera glycines
SVNRLLEKYICNLSTILRKSVHRLLEKYICNLSTILRKSVNRLLEKYICNLSTILRSELEMIIFTIQTNFRCSN

SEQ ID NO: 142853 - protein, 176 aa, Heterodera glycines
MTISLHQTKGDVIDQLVDALKKCCDKILTATEEYKYPVKTNVIFGISAAFADRDISHLLPNLFVDALYSTPTSPHGDGIRKRTLSIEGRKLSQLQVSTAGLAALQEQFGHEYALTSFQAPPAEKQTQKEEGAKEETPKTNPAEDEEEKKTKTNSQSAEEQEKSTKTKTEEEREGGQ

SEQ ID NO: 142854 - protein, 44 aa, Heterodera glycines
MTLRNDTPMPPDEELRVPHEISLSSPWLRAVAVYMGIACEKEAK

SEQ ID NO: 142855 - protein, 133 aa, Heterodera glycines
MAPQSVVSPPLPSRPSPPWLGPSPAEEVTEELNIVTTPKVISNNSGSYTGGRPNFGTPPMPLHHISLPSPQEMAPVTRQIPPEMERETNRWRQYAAAVLVHGRKGMPPKSLDEYENEEDDEEFRGRRMTVTYR

SEQ ID NO: 142856 - protein, 162 aa, Heterodera glycines
MKLFPLLLVIILFLIVKIGSEKKKLQQKSFGEIFGEKWQEKEEEKRNELKKREIIGKYYKIKEKIKQKGRKYSRKEWDKINSKIAKKLGTNSCYIQKWIKEFGLQKKKSYKSKSDEQKLEIVQKFIEMKNEYKQKGKYSEKEWDQNYAGIYGRNNLAFAVKE

SEQ ID NO: 142857 - protein, 65 aa, Heterodera glycines; identical to SEQ ID NO: 126374

SEQ ID NO: 142858 - protein, 68 aa, Heterodera glycines; identical to SEQ ID NO: 127362

SEQ ID NO: 142859 - protein, 34 aa, Heterodera glycines
HPIPSTIAFIHPIMNAKIIRVPKIACDLSPSKNG

SEQ ID NO: 142860 - protein, 86 aa, Heterodera glycines
FFLSFEIIVKNIRKLFSVLIMLYNAFKPRREAGQFQNFVPHFTVESPSTLLDNYVSMSTVAFGQLWNGKMGISDGVRSFLKIPLFV

SEQ ID NO: 142861 - protein, 75 aa, Heterodera glycines; identical to SEQ ID NO: 124542

SEQ ID NO: 142862 - protein, 94 aa, Heterodera glycines
MRGADQPTIFYGKKGGEYAFSETRAEERGLMNPLLPFANEIPVRWNSALAMISRLLEQKDAIYQYAFENRSFDLTLAEEEWKLIEELISLLQPI

SEQ ID NO: 142863 - protein, 96 aa, Heterodera glycines
IELQIALKNYDPQKDKRFSGTVRLKHIPRPKTKVCILGDQKHCDEANANGIPCMTADDLKKLNKDKKLIKKLSKSYDAFLASESLIKFVKWVKDLG

SEQ ID NO: 142864 - protein, 104 aa, Heterodera glycines
MDIAAQLSRIPPKHYRSVDLMNRIIDDEDTEEMGAEDEELAESVINDQRSPSDSPALRKSPTDSPIGQRVFSISPAEGASSNSVLTSTVQQHSPDDDEVFETAS

SEQ ID NO: 142865 - protein, 131 aa, Heterodera glycines
NELIEEVPSYLTDFSPIERAEKEIKILAEQNAKNGHIEIEKVLQILAKLILKFDLDILINEFNAKLSKTNNVNVLNRIGHKFTEEWHSICAKIVSENSEYSGIEKELEQKMKNLLIMEHEISTIKFANIME

SEQ ID NO: 142866 - protein, 51 aa, Heterodera glycines
MTKLVAVSCAKGMFCDGYRYYKHKKTKNKIWWKFELNHYGYREGTVDFIFA

SEQ ID NO: 142867 - protein, 207 aa, Heterodera glycines
MTLMKKKFEAQLMDLLKLDPNTPLNSHEADFVNGSSVTMKSLFTLLLKTQFLAQWDEFVRCYSDCNVIVIGATNRVLDLDETVFCRFSLKVHVPLPDEESREKLLRMLLAQENVDVGFDYAEVVEVTKKLTSSELKEVIRFAFLLRYHHVALSRLNAPASLLAVGAQLDNQIKLSSEDVIQAFHSFKNYAMAPFSESVVTEEIVEVD

SEQ ID NO: 142868 - protein, 128 aa, Heterodera glycines; identical to SEQ ID NO: 125618

SEQ ID NO: 142869 - protein, 48 aa, Heterodera glycines
  unsure (1)..(48): unsure at all Xaa locations
CLPTPGSKNIAILPRRDSDLEAFSHNPSDGSFAPLVYRPSTXTKCLNL

SEQ ID NO: 142870 - protein, 77 aa, Heterodera glycines
MMVFKYRPSTDRTTDGSGGSATENSGQQHQLRHEQQIVVALVGVLHGRGPGRGARGGHSRGNHCAKFDADREQLGQS

SEQ ID NO: 142871 - protein, 17 aa, Heterodera glycines
MTTFHVLLLLLFVGMFV

SEQ ID NO: 142872 - protein, 479 aa, Heterodera glycines
HSKNNRWLFWAGQQPSGFYRTYEPKEVIGRVIGRGLASVVRRCVEKGSRKEYAVSRKEYAVKIVDLSTERQSEREAKRLSEETFSEVRLLKLLSGHPSIICLHECLHEFFITPTFVFAIFELARCELFEALNKSVTFSEKRTRLVMRQLFDGVHYLHSQLFDGVHYLHSKKSIVHRDLKLENILCVDDKRVVILENILCVDDKRVVISDFGFAKQLEPGQKLKDLFGLFGTPGYLAPETLRCQMYENAEGYGLEVDEWALGVIMYTLLAGYAPFYHRQQLRMMRLVQEGRYEFDKEHWENISEEAKDLIRRLLMVNPSVRISSCDCLSHVWMAAWVGVPSPARMVEPTPFKRSPEQIRRLFRVAQFSVCFMVRLRNFKQFKLKFDRAALRTRPYRSREALRTRPYRSREIRHEAESASFAIYGHWVNRGFFYSASFAIYGHWVNRGFFYSRDMLFANKPRPRYVKMNNGSRDSKSPQKT

SEQ ID NO: 142873 - protein, 29 aa, Heterodera glycines
FLKALRYFIQIFTRHEKRCRAKSIKVVFN

SEQ ID NO: 142874 - protein, 609 aa, Heterodera glycines
IHLSDLLVNGFTLTHFRSRGFNNKWPVNQVTHRIRVPVSIKFETVSHSHFASKTVRVRAKNVSSINRSLPSEGTLSSSIVLIDSDGVQQFCFSFSLEQHCFSFLKTLEGALSPLFKIDPPLIPLKSNAVPRSSTNWNSVLLFHLFSFSRSSTQESAKCEGQQPKISLRLAEHLMDFLLSLISFDYVLSFNFSESLSNATKAMQSQILARAFLGWLTYSQHLRKIRLNLASIVTIERFIPNSDGMEMPVNEAFWRICRSEKTIVLFKQFLTRVYFCGIEIVLFKQFLTRVYFCGIEPLRAKVWPYLLRLIEWHEDFGRRELDAIDETYRNDLKEWTEMDAKLIADNEQRNGVDEEEEGLIRNYFFTSSHQQHSPTLSTHQSEEDISREFANNLLRIKKDVDRCDRTTKFYSCHDNLDILHRIICTYIFRRLKLDLEDGYVQGMCDLVAPLLVVFRHEALTLACFERLMLRLRRNFPQSSQNNGGMEENLNNFRSLVEVMDPELYCQLSNIDYFRSLVEVMDPELYCQLSNIDYSFVVYRWLLLDFKRELVYKELVYKEVFQLWEVIWAAEMSCSRHFELFFGLALLSQYRQMENKGKTIADQINNYLEMF

SEQ ID NO: 142875 - protein, 170 aa, Heterodera glycines
MENPRQKPSKVLAEIRANTKDETFVSMGTDLALVALLDVLKRARKISVDGTFKVSPAAWTQCFVIGAFVNRRLALCVLLVNLDHVYDFLAAILDDVDKQVDIARSARVFPYKRRIKYILKEQLIGDALDEAEYNADEDVMNILSLLSLQMQGYVGGLRAKGAQHEHEDRE

SEQ ID NO: 142876 - protein, 19 aa, Heterodera glycines
EPVNSCIGCKCRRCCTPNS

SEQ ID NO: 142877 - protein, 100 aa, Heterodera glycines
MWTEEQMKRMMKRRQRRWLTNEAIDDDEVDDDDYDCCYYYMMRQSDDDDDAAAVAETFAADANERTLGKEARMMPEAVMRTNGGQPQANRADFETSVPTL

SEQ ID NO: 142878 - protein, 83 aa, Heterodera glycines
KIIRVPKIACDLSLAKNGVSKNRNYAQKASQTILAHPIPSTIAFIHPIMNAKIIRVPKIACDLSLAKNGVSKNRNYAQKASQT

SEQ ID NO: 142879 - protein, 56 aa, Heterodera glycines
MKPKFVYKKQNEIEGPLIIAVNCLIKISKFYFKSSSNEYYEDQLKRSIRRKNKKFL

SEQ ID NO: 142880 - protein, 94 aa, Heterodera glycines
MGRMELDLDQMVKGRPNLVEEEAAYGQRKREITASIANMFEQYIDSLNRLRPLSVKCVLADDELKRLKRRRRVMGMDDDDIGEQLNAVKVGTFK

SEQ ID NO: 142881 - protein, 127 aa, Heterodera glycines
MPEQSVYEKFDDLQNRGYTVTFRNTLQNARVWTSVIFTVVANSTQDENLRNLSSLYGANRQHSNTLISPIFIELNKVQPWYYGLLVYRIGMTGNDGNEIQSEYFVPYKDGISAVKAVIREFIIIEVG

SEQ ID NO: 142882 - protein, 58 aa, Heterodera glycines
MSSFTTFSSADEFSPLQRKYFAILKNGDPYFNFFFSAQNQFIGFSSDDILKITFKNAK

SEQ ID NO: 142883 - protein, 71 aa, Heterodera glycines
LRLHRPALLQLLFCAGQTLHQPNGRTASAEPQFVVMLKKVPGKQNANKSAQKADKVLKVITAEQQIEYQPK

SEQ ID NO: 142884 - protein, 385 aa, Heterodera glycines
MDSKKFLPLELIYELVNALPINHHWAAQRVSSEFDNLVFERQADLIKIILQKANVSTAQSYITTMVQLANADERIVFLTEYAILRTILGGNLFFHCHSVRFTPSQHEFCSEAVTLGNRLFNCAETKQSIVDHSVVMTFCGRMPHVCLDVSSFSQMSPQQFALADGASANVQFVGCYSGGQLLINDLALFGGLQNSVVLCPSDAFSAERATQLAMTHNGITYIRISPYPTPAIYGSSDHDKFEIGLFIVRLFNYRTNRHQSHKDKVVLVGIGAAVNLCEQAYRQLLNEKIPVTVLDMFSLKLTREFAVLSLVSILNVGRVVTVEEGVTPFCLPLASSILSFISEKKLQVRVIHKKVNLPCNLNYSGFCAKSLHLRVILFKISEDEN

SEQ ID NO: 142885 - protein, 65 aa, Heterodera glycines
  unsure (1)..(65): unsure at all Xaa locations
VPWKKRSQNLLQLKIEFTTISLLCPQLFHPTYSNGSGXKDAADQIYEGSDQNQHDQKSDDADSPI

SEQ ID NO: 142886 - protein, 70 aa, Heterodera glycines
MLRPPHFPLLLTAIVVVICLLSGTANGDKNLLDELRDLDIFQLKSGVSACPLLVGERCPESSPLYYFKMC

SEQ ID NO: 142887 - protein, 125 aa, Heterodera glycines
MRAFLLIKMFAKVLTIPFTSSNHSFIFVQMDSSSSEEGEIHEPVPQIQAVQPNPQIPPPPANLQPNEKIFFVSETTQRREILLADGFEYSFEALSRIADVTVNLIHTYGITKFTFDWTPQNAFGQ

SEQ ID NO: 142888 - protein, 20 aa, Heterodera glycines
MRRNDEETEGNEMNEQQEDS

SEQ ID NO: 142889 - protein, 113 aa, Heterodera glycines
VKHYKIRPLDNGSGFFITARKTFGTVRDLIEYYSKESGGLCYHLTYPAPKIAPVRPDLSYDTAKNWEIPRDELLLDRKLGEGNFGEVWLGRWRGVIEVAVKNVKKFSIQFFFQ

SEQ ID NO: 142890 - protein, 337 aa, Heterodera glycines
HELSTLRDINSDLRRLEDAYETIRELSSKRTKDKIDQGAQIDDTSMIEHIHQLQQELIESHTKKADLENTARELKNRVQELESAADLENTARELKNRVQELESANKRLKEYPPDGGVAAIQEELIQVKMREAEASLSLKEMRQRLAEVEQHWTRCVGLHIVQPCQSPTQQTTNQQNTHAQQCQNPSAQSARARIAKLTATLMGGGTAEALEGWSQRELEDQFIGLKLMGGGTAEALEGWSQRELEDQFIGLKIREADTMAELKEMRQKVMEMETQNHVCTNQLKRQDEEIRRLREERETFVRSNRVEENEGIKETGGRRGKEKERARYRHLLSPTPP

SEQ ID NO: 142891 - protein, 45 aa, Heterodera glycines
GIMRTRPIWQVKQRLLTSQKVRCRDETNQHCLPRGTRHGPPKEWI

SEQ ID NO: 142892 - protein, 89 aa, Heterodera glycines
MMFNSISKIPFIIFIANHFLNPFSNAIPLGEDNMLIAIMKAISKFKSVNIHCKNMRQTLALCFLCSKMEVTKFVRNLMLTFRNLSKDLR

SEQ ID NO: 142893 - protein, 188 aa, Heterodera glycines
MPCSSSSSSSAASFSSVFPVPFPASHPWNPFASAAPFVIAIGSGSVCVKNGECRQYNQLKRHHHESAPVAAEVPSVDEGMNATDKRRKKRGPSALATLSALLLLGVALIVSLAFVAWTIHRMVNEKKRPNDARESGKIELQNEQHKECAEAMTTQAERIEVLESAVTKQKRTEEKETEEPNDNGKESH

SEQ ID NO: 142894 - protein, 55 aa, Heterodera glycines
NSSLECQKWNNNLRLVRINNLMNVSETWYVYANSVTDQKCVDQVFMVNEFISDKW

SEQ ID NO: 142895 - protein, 64 aa, Heterodera glycines
MGHFCSYYVHILQFFRPYYNPYYGFFCPYKSGFCRIILFTISFVWQPFAVAIANCKIISLIGTF

SEQ ID NO: 142896 - protein, 263 aa, Heterodera glycines
IMINLIFPLFIYGITMLSELADHENDFPTSLDLRYTRRGERRIPYPQNQEHCGACWAFSAALVHSAAVFESRVGERDRLVLYSAQYLVDCTIRKKKKKPSEACNGIAVMKALNRLSTDGVPLDALYPYLSGKTGEVALVRTKKQGLLYKAEPGQFGFVRGLTAQMTYLTTYRLPLAAPLTTYKSKEVYDPSPEECKAAEEDPDNSMHIISIVGYGEEGGKPFWLIVNSYGQEWGDNGEAKFVRGNNACCIEDYGYYVKSVEHY

SEQ ID NO: 142897 - protein, 65 aa, Heterodera glycines
MLTANEAVQRDQDEKEVEEEESWAKRFPPYSAETEIEQLDEFSLLHQQIVAGRVVPCCVNLPEIT

SEQ ID NO: 142898 - protein, 70 aa, Heterodera glycines
MVGSQQQQQYHLLPTQQLNHNRNKQYTTQQQQQQQFTSPYATSNYGYHELTHPPAYSMSMVGGGGTGQRR

SEQ ID NO: 142899 - protein, 77 aa, Heterodera glycines
MTTSLADLDVEWETYKTEFEKAEAEHGAYNARQRANVNKFLERGELSDDDKRGLEALKTQAEQMHINLSDLWREEVF

SEQ ID NO: 142900 - protein, 180 aa, Heterodera glycines
VVIEARDTDGLVGHAVVLVQALAADHLPSKAAFSSPSSSAARASLFGSGQVPVIADHQPFPLSSSAFVPPLAKAVGVGIPPASPPSAQMSSSLSQNVPPAAGSQQMMSSALIASSAGGYWQPISNGGNNKANSNQKPNPFWRVDPTTTLATPAAAVKLNPMLIPFATTTTAVPPPPNQFT

SEQ ID NO: 142901 - protein, 123 aa, Heterodera glycines
MTGFYTENAQLRARAGPNWLLVRVARDRHRPPARVNTDPKPLHNSPRVNSTPPIRVPDPERLASRPSSRSYSEHLSALRLQMPHSPLNRRTANPSLEASRPTYSNKRVNADPDTPALSVSTSS

SEQ ID NO: 142902 - protein, 28 aa, Heterodera glycines
ELTRKIYAKCAIWRYEQFCLTLARTHSA

SEQ ID NO: 142903 - protein, 72 aa, Heterodera glycines
MIPNDTFILLLLLSTVSVFVQFAEAQWKQEGAAGKKHSKTATAVRKMTANNNSEQQQHGHGVERVRNRHSNK

SEQ ID NO: 142904 - protein, 40 aa, Heterodera glycines
LVILDFVIKYIRKLYRLFLYFYPQMVIRSFSSQFLPNLHI

SEQ ID NO: 142905 - protein, 463 aa, Heterodera glycines
AILAYYHPQLLLLLIALPSLFISIVACGIAMKQYVKGNMSHDANSSVKYFVKMLAQSSETVIFMFLGLSIFMFLGLSSIASKHHWDTLFVACTVLICFVYRVIGVLVQCAFLNRFVLVQCAFLNRFRKIKFSATDQFVLSYGGLRGAIAFGLVVSLPAIIEAKRMFVTTCIFVTTCIAVIYFTVFLQGITIRPLLSLLKVGITIRPLLSLLKVEKQEEYEEMMVEKVYNKYFDVYNKYFDYTMAGIEDIVGQRGKHFFRDAFERFNAKILKPLLMRNMTRKTFAFERFNAKILKPLLMRNMTRKTFDATDIVRAYNKITLQEALKIAHIGRTERNNDNTKQRNGIGTSGRRKAINSLIILLIKYMSNRDNAELLYAMFSRLLDRKIEEMQRRKETRNRSEDDDIKAGEKGGRKLIKAMNYYMDILNTSSASQKRRKRKKGGEEEEKERKKEKPSPGKGENWHI

SEQ ID NO: 142906 - protein, 103 aa, Heterodera glycines
MDIFPFFDHAQLSLKLALLSPCFDALVDKHFQWQNELTKCATTLGGLFPSFDHAQLGLKLALLSPQFDALADKHFDGPTNFCINSASFFWVFFLFFWSWPQKS

SEQ ID NO: 142907 - protein, 41 aa, Heterodera glycines
PDGADGTTTFVVPFLQMGLFNVNQEVELLSKLFSSCTTTSG

SEQ ID NO: 142908 - protein, 79 aa, Heterodera glycines
MRENAFQLYEKPNNDTGKDEASIAADTGAGEKKLPDAEQKQTTDTKERKSPIMVDKVWPFIHHLATLSPHSLLPFRECK

SEQ ID NO: 142909 - protein, 47 aa, Heterodera glycines
MTLCPTAKPCRTLPFAKAANNIGFAESKTVGTIDQRRGDGKAVQSPF

SEQ ID NO: 142910 - protein, 228 aa, Heterodera glycines
MKLFPLLLLIILFLIVKIGSEKKKLQQKSFGEIFGEKWQEKEEEKRNELKKREIIQKYYKIKEKIKQKGRKYSRKEWNKINSKIAKKLGTNQTYIQKWIKELGLNQRMQKSYKSKTDEQKIEIVQKFIAMKNEFKQKRKYSRKEWQQNHKEICKKIGVGYDTIRKWKKQFGICCKKITEKEKMEKMKVYWQTKKEYPKMNDKEIAKIMKINHFNVYRWKQIIGEGINE

SEQ ID NO: 142911 - protein, 65 aa, Heterodera glycines
MLRTVYQYKQRHPELGQEKIVKKLLPISLGTFKKWKKSLTLDADENSIDDLQDDIEEEPKHMGIE

SEQ ID NO: 142912 - protein, 102 aa, Heterodera glycines
YEDEKQFEKKISSIKEEHLDEDNFVKQELINIDNGPISIKQETITIKNEPINGIDEQLRIGNDKIKIEQNENEESEMDDSESFESHSSDQSISTDDQDSDEM

SEQ ID NO: 142913 - protein, 61 aa, Heterodera glycines
MDKKANLAMDKNFWLELLKNLIKFFEIWQANNAIQGLSYDTKIVCNLVVSEKSFELIYSKI

SEQ ID NO: 142914 - protein, 101 aa, Heterodera glycines
MDVTPMAQCAFECFVFKVSAVRTNYRSWLRSSSIHEPSDPPIRLEFILQQNTERYTTAPTYGSTPKAWLVRQLPRNVGQRPQVSSNDLCPSADGGIWWCQR

SEQ ID NO: 142915 - protein, 59 aa, Heterodera glycines
LLLLDEPAAGLRYKEKQDLARVLEQLRAEGMSILLVEHDMDFVMRLTNHLVVMDFGTKL

SEQ ID NO: 142916 - protein, 70 aa, Heterodera glycines
MYKFGFFLLLLVLFLIVVKSRSEEPRAENVRPKFVKCEKGNGQQNEEEAGPNQTQKLCRHTQNDDVFAVP

SEQ ID NO: 142917 - protein, 98 aa, Heterodera glycines
MKTERNERNQLVDAGLDLNDPNAFGEYCKDIVILSVSAQLLSLIWTGFFFVLLSIPFFTLYKLWTNILGPWFFRPTLDDDEKEDKKKQKKPKFVHVRR

SEQ ID NO: 142918 - protein, 213 aa, Heterodera glycines
MDLYLDLDDLHYDNNGIFQPIWNFFAGEIWPIFAPNIRHLTGHHLGDLRRQISPTIFTDCNQLNSIDSDNLLPASIADDGPNATSRQALTNWLHTPTKNGHPPKQLSCCDYTSESNEWFNNFKKEFLRANSSASYIIQFKTYTTIAQFELVNERTKEKLTLKAEDDYDVYTHINFVLERCQIVATIQWRQDKKTDNLNNVDITIMCVMFLLKH

SEQ ID NO: 142919 - protein, 37 aa, Heterodera glycines; identical to SEQ ID NO: 131299

SEQ ID NO: 142920 - protein, 48 aa, Heterodera glycines
MLFTGFDRLIVLIFGEITEYRKAFRDQFPIIFKQNLNVIQVSPQQNGS

SEQ ID NO: 142921 - protein, 30 aa, Heterodera glycines
MLRAIETLLNGVLKVCKMIEKAAKKHVFAP

SEQ ID NO: 142922 - protein, 51 aa, Heterodera glycines
MTIAPMRFDEDDWNVFMGKNSSLGHACFSTQRDYCKQMQKTLCPAVSNCVR

SEQ ID NO: 142923 - protein, 68 aa, Heterodera glycines
AIANYAGHMSFNLVTQKVDERRMAPQAPLFNKFNGHNLKQQDTMFFAFVCSSPFALKSMRDPTMSSCP

SEQ ID NO: 142924 - protein, 113 aa, Heterodera glycines
FCYNAEILRKATLTDVRRMRKDLFDNDLPKKLDVIECFVKQNSEFQRNNNKNLFYQMKDELILYRTVFFNEQFEIHLESIKQFGENYGRRIHEIAKLLEEIREARNQIEQQQM

SEQ ID NO: 142925 - protein, 86 aa, Heterodera glycines
MNSIRLLLQLVLPGTVIISDEWPAYLKMSNSSQKTTGGGFSKIITLPNGTEFNVNTNKCEGMFCCILIIILMINLVKSNKIHIKIA

SEQ ID NO: 142926 - protein, 493 aa, Heterodera glycines
FLIISSVLGVSILGDVRQTHALFCVSEGKDSKKVLSEAHIERIHQGKRAANDICAWGGHLAECQLADGTAESIRLATSALSDLATSALSDHSIEVPLEKPLRPKKFPLVVCVAPMYTYTEWQIMVTGIEVYTEWQIMVTGIEVWLALGASKMVFPIQSASADTIQVFPIQSASADTIQILTEYQRIGIVHLRVWPKWPVLSIVHLRVWPKWPVLSDANPNGLVLSRGIEESHVNCLHFVKPFAEMVVITDIDDMLMPLDPMKVRPGINVDILKDLFHQHPNAGSLLFEDLFHQHPNAGSLLFEHRDVQFFVLPDPSTQNTLRSFNFEFLAHSKWKTSCKVWRMKTRVAVNASRVDTVNMHESGIHRFGFVNMHESGIHRFGFVQVRVPCRQAHFYVRVPCRQAHFYHLRHSYKTLPSTSPIDMSKLRQMLNERWHFRAESNFSSEMQSKMLARSSVESFEDFDKCMSAINEEHWRLRVSRCLTPHVCFSRLAK

SEQ ID NO: 142927 - protein, 96 aa, Heterodera glycines
MVDKDKCIVMVICNDNVYKRSLNALQQVKARDGCPIVIADESVPSSELADVEHVLRVPRTVDCLQNILTVIPLQLLAYHVAELNGFNVPVLIFGLF

SEQ ID NO: 142928 - protein, 41 aa, Heterodera glycines
MAEVGNSYRPPLSEEKQNELRAIAQKILQPGKGILAADEST

SEQ ID NO: 142929 - protein, 35 aa, Heterodera glycines
MTSTIRNFGRFAGHANVDSFNLRNDWGNLIIIDYK

SEQ ID NO: 142930 - protein, 33 aa, Heterodera glycines
MQDLSLAMSFKQWRSMYPNRSKTRGYALMWLKC

SEQ ID NO: 142931 - protein, 52 aa, Heterodera glycines
MREFVTRNASLMKRKVQLYFSDSELKYLGILVASYSYMLKLSRIHCDIYALL

SEQ ID NO: 142932 - protein, 74 aa, Heterodera glycines
MKKWMMDLSHSVVNKLRSWHKSPVLIAFRIVYSERQQMVLIIAFERICLPRRWAVRVRPLVARVACGLPRQIVR

SEQ ID NO: 142933 - protein, 63 aa, Heterodera glycines
MRLHMVAIAFNRAHAVLFPFNFAQKVTKRFQRLSIPESRNFSGFLGLSSRTVSRGHFPVLNFP

SEQ ID NO: 142934 - protein, 80 aa, Heterodera glycines
LFEYPKRTLEKIDFFVFGAVPPNRCAQIYGETESFRSSFPIACTLILRWIFAPHKCLSTPNGHLKKSIFLFHKYFFQKVL

SEQ ID NO: 142935 - protein, 22 aa, Heterodera glycines
MRRIISWSSFKCEFRRQKVTAS

SEQ ID NO: 142936 - protein, 40 aa, Heterodera glycines
MCYRMIHEIFIWLQMNQVMNLCLTFFVFLSLGEKNTCIFI

SEQ ID NO: 142937 - protein, 42 aa, Heterodera glycines
MDRKNKLTLPTNGNSRDSLNCWPHFPRVPYIRIIYPSFKLKN

SEQ ID NO: 142938 - protein, 82 aa, Heterodera glycines
KLADDAFQILPLPDIDPSVTSTPAVVNNLIEAVESLDSRMPLAFQEQQQILKMQSEMLQLGVSCKEHYKKIHEQSVMRYNLE

SEQ ID NO: 142939 - protein, 52 aa, Heterodera glycines
MATEACSKSTLQYQKKILNSLLKSHFGKITYYKNPQFFALPNKFYLAFLSHF

SEQ ID NO: 142940 - protein, 126 aa, Heterodera glycines
MSVDKKTKYRVAFRRLLQDFGDYQDGYYSVQTTEGGKIKSLLAEFVDVIIWKKKLVDPFGLEGDEGAIMIEDFVLRARSVPVTFDDVVEEEEATPIMSKSHPAALSTPTILGPKERIVHRHDSTTN

SEQ ID NO: 142941 - protein, 27 aa, Heterodera glycines
NSALVLIWQKIKPFFLRTHWCSIHLTK

SEQ ID NO: 142942 - protein, 65 aa, Heterodera glycines
PGLKCPAQAKNFFYFREKIEIFPKKLPIDRARKTMFWKWSSFLWEKSLKNPKIQKPENRFLGLTR

SEQ ID NO: 142943 - protein, 19 aa, Heterodera glycines
MKNRKEIFWNQWVRVQCFD

SEQ ID NO: 142944 - protein, 471 aa, Heterodera glycines
SPTRGKNFLDLLFTNNIISNVLVGPPFNCDHNSISCEIKLKTSKKILKKGFDFRRANYLAINSVLYSINWNFFFSDCTEIDSTLVQSNLVQSNFEPKLPEHIQKLIIGNYFGKTLKKKEGKYVEISKKITFETSKFYKNKENKLLNSTSATVFKNDKNSKVAFTNKDKSVFKNDKNSKVAFTNKDKSDALAKQFFSVFTSQNIEPEPTGSKKSLEKSMDFFTITHAEIYFSLCKLKDKNNTSIDGIPSILLKNCKETLIAPLFHLFCFSLMCGKIPTIWKKSIVCPIPKIPNPANPIDFRPISLLCTMSKILEENIARNIRDFVETNKILPCQHGFRKNRSVITQLLEVVDDFSQALEEKKAIDSIYFDLAKAFDTVPHNRLISKLKNIGINDSLLKWISDYLSNRTFYVKVGSSFSDEYNCLSGVPQGSILGPLLFNIYIHDITDFCPEKVEIKLFADDKEAYLQLPKID

SEQ ID NO: 142945 - protein, 238 aa, Heterodera glycines
MNLLYLIFIIIFFIFVIDSDKIRPNFDEIFGNGWDKKESEQTVKIEQNERNENSQSAAVDQMGEEMGNDRNDQMKNDHKKREIILKFEAIKEKLREKGKYKWKDQGKIETKIGNLLGIGRHKIYKWKNELNLNKNKIKKEFYEMKKSEFIKRFDEFKDLYGQGKQKEFAKELGISNDTFWKWKKRIEQFTNEDKLKKMKQYFKIKEANPKIIDEIIAKKLGIGSATLKKWKKRMLSSI

SEQ ID NO: 142946 - protein, 111 aa, Heterodera glycines
MSNGQVERFFDTFKRAFRKLKGEGKPNKEIIDTFLITYRTTPNDTLPDLKCPAELLLRRRPRTTIDLLRPPPHQPFERLNQLEDEAAIPIQDNLAAPIEDVPIQRRFCSLR

SEQ ID NO: 142947 - protein, 170 aa, Heterodera glycines
MPLFNFLLPLALCCSAILAIGIPNDGQIVEHDKKLLPKWEQTPSPSAGTDVAQMRRKLKAFSEGTDLRQNSRRNGNGKDVQNGQIVPIPDKKKGLLRWQNMSPSASPTVTNMRQMLAAWVDKTNSRRNSRRNASEREQQSLYGYSNYLDLSANSSPAASDFALTPQHRWE

SEQ ID NO: 142948 - protein, 91 aa, Heterodera glycines
MALLCAAEPDCMVPIGQTIKCVYMPTPPNLTCHRQDQSLMEILRYNMEYRQQIEDPSFVTQLEPCPSAQFEPTVAIDGDQRIFQIGPSSKF

SEQ ID NO: 142949 - protein, 229 aa, Heterodera glycines
SFAPQSGSSVPVVAVDVLSKRLFVVPLRNKRAEEMLEAFKQLIDQMPMAPHRVFSDKGTEFKNRLLKDFFEEREIEKHEPVHSTVKASIAERAIRNVKQRLYRYFAEKETLNWKRMYRPQSFDRKTPRFHKDKFVRMSRDKGQLEKGYLQNYGDEILEIDEVLEAVHPIRYKLLDEHGEKFKESFYEQELARVRKDAETSYRIEKVFRKRKRDDGSTEMLVKFIGYPNR

SEQ ID NO: 142950 - protein, 133 aa, Heterodera glycines
MKHIAFIGLAEKQHQISFDETIHCGTAIYEYASGGYLWISGSSRKSNAKYSFGVGDIVGCGVNLAIRQIFFTKNGHLLASSKLFVPPPPPASSSSSSSSVFDLPLVPFISLFSFDDRIEANFGPNFKFDFSIL

SEQ ID NO: 142951 - protein, 125 aa, Heterodera glycines
MSNSESVPPSPTSSSAGGGDPLTYSAPVNQRSMARISASTQAANYMLPPYLQCPSGHLVCGNCRPKVTACPTCRGPIPSIRNLGMEKIAARQSGQSYQMFYAVVQLIGTKKEAENFVYKYSYLLG

SEQ ID NO: 142952 - protein, 426 aa, Heterodera glycines
CVQPGDGEFIEEDKQRKLERAWPVDGDKLLVCYLEDVMHSTRSRCAILPEEKNIFFVTAQIGNDPTKQLFYMDTKGQAINGPIPLVPLFNKSDAKYQVMDSDEHSALILTNHNAPMFKLVRVKLGEHGVVNSNDQWQVVIEEDKQRNLGWACPVDGDKLLICYLEDVKNALYVHSLDGRELYKLPLPIGSVGGVFAEKSKSKIFIGFESFLVPFILFHGDFSKCPSRESPLQLTETRRVNVPGLDCDAFDSKQVFYPRDDGTKIPMFIVHRKGVKLDGSNPVILNGYGGFNIAQTPYFSVTRLMLAKHFGIVSVIANIRGGSEYGEKWHEAGMLGRKQNVFDDFIAAAEFLISEKYTNNKKLAIHGGSNGGLLTAVCSQQRPDLFGAVVTRVGVLDMLRFNKFTVGAAWATEYGDPDKPDDFSFIY

SEQ ID NO: 142953 - protein, 70 aa, Heterodera glycines
NTLYVHSLDGRELYKLPLPIGSVGGVFAEKSKSKIFVGFESFLVPFILFHGDFSKCPSRESPLQLTETRR

SEQ ID NO: 142954 - protein, 255 aa, Heterodera glycines
MISGKRWIDKGQPSGERNAEQSTANWRSPNPQTSQHHHQRGHFNNKPHRSSSGYSQHQQSRPYQNQYNNNNQTPYKNTGSRASNYEANASHNMKNKSDVTNEPRVTTPSGPIAKPFAEPVVAANSGCPSQQVQLHREEQQTPQQIPPDPEIMGKEVKSEKGSEGTENNQKEETALIIEEKIKVKEGSENGEQQKEKFKMNPAAAPFIPKSKDLNTSSAVVTANTSPLMSNPIPPFIQLPASIPTQVLNFVHQMSV

SEQ ID NO: 142955 - protein, 40 aa, Heterodera glycines
QQHSTVCSVCATRFSHILGCERKLGEAFDKEMIVQSTATG

SEQ ID NO: 142956 - protein, 80 aa, Heterodera glycines
MRISIIFAIFFCIFSVALRDSSILAMQNIHGTECKRHIHCPDKLFCLEGFCVSAQELANELHLFSFSVAQPRNDRMRRRK

SEQ ID NO: 142957 - protein, 76 aa, Heterodera glycines
  unsure (1)..(76): unsure at all Xaa locations
KIGNILPKNKIFNKYCLALLSLIHAAFSTSFLSSFSMKNSMENVFGSRFCAFRQSVHIFHDLFQLVLNDFPCXXVI

SEQ ID NO: 142958 - protein, 287 aa, Heterodera glycines
PFSSFSPSLPLLLLCCFFSALLLGSVPSLCHLVGRADGDSDDDPRLSLPFLLAAITTCFFSLNLLSPVYGDRAEIESHIREGRKVFEHQNETELEPMSQRMGDVFEAFGFLDLAESLLLLEASLKNVGRDNGQQQGMARLKIHSPCDVSRAEFALKWLKQMRKEISKRYELNEAKMKHLLTEKSRDLEGLINRTESERKETRERLGKAFTRRMEKTRDKSARNEAANSHLGQLGTVDKTHGETSQRFGEAMQNGDEIGRIIGEMGGTGDWVVTVVRAQIKLSLAINE

SEQ ID NO: 142959 - protein, 86 aa, Heterodera glycines
  unsure (1)..(86): unsure at all Xaa locations
QXSSSDAPAAFGRAFALCWRANTNSKNSQTRNCRSYRWECSKSKEVEECDPSADGRNSSLFALHIVKQISYLLFYNNLNRIKRKSA

SEQ ID NO: 142960 - protein, 142 aa, Heterodera glycines
MLPLTPAKRFVSKKHCVDSIRWLSLQRTTFAKTIPPGPLLFSHVYLPERTPDGQPQRKPSEHPDFMKYDFMADPEFEKPPPPVELFLLEDIKDLGEKFDIVKVSAEVARWDLLLKRRAVYASPFNLKYYEGKRKATNCGGTL

SEQ ID NO: 142961 - protein, 72 aa, Heterodera glycines
QTIVFIIFKEQIKSVAPKSPIEKSVQFVLLSNISTGRHLGPSVRFLHGVLSTFCCVPSSFQSSIDHVYSRNI

SEQ ID NO: 142962 - protein, 64 aa, Heterodera glycines
MTSAETVKEEPGREFMSAVKGRREQDRKEWAAYWNIRWKEVEICLFEAEEQFRLDKLVEQYIRD

SEQ ID NO: 142963 - protein, 243 aa, Heterodera glycines
LSANKGEIGDATPFNDTVNVQKISALLEGYGYQLRGNEIMYNGFTGQKLSTQVFLGPTYYQRLKHMVEVFLGPTYYQRLKHMVEDKIHSRARGPVQGMNRQPMEGRARDGGLRFGEMERDCQISHGAAQGRARDGGLRFGEMERDCQISHGAAQFLRERLFEVSDPYTVYVCNQCGLVVIFNQRTNTFECKACQACQNKTQVSAVRIPYACKLLFQELMSMSIAPRMMTKSLFLFVHFFIFEL

SEQ ID NO: 142964 - protein, 317 aa, Heterodera glycines
LGAIDQGTQSSFLIFDPKNGNLVASHQLEVQQQFLEVQQQFPNPGFVEMCPEQIFKTTVRCIKSTCEELNRRGIAKKEIKAIGITNQRETTIVWDRETGCHLSNAIVWLDCRTHELCDEYIQRTSTRDKNHFKAKTGLPIDKNHFKAKTGLPIHPYFCALKLRWLLNNVPEVKKSLQNGTLMFGTVDSWLMWKLIGTLMFGTVDSWLMWKLIGIHATDVTNASRTLLMDLQNRKWSIHATDVTNASRTLLMDLQNRKWSTEMCTFFDIPINVLPEIRSSAEIYGYLQKGPLEGIPLAGCLGDQPLEGIPLAGCLGDQ

SEQ ID NO: 142965 - protein, 139 aa, Heterodera glycines
GTTVIKRGTTVIKRGTTVIRRGTKVIKRGTKVIKRGTTVIKRGTTVIRRGTKVIKRGTTVIKRGTKVIRRGTTVIKRGRTVIRRGTTVIKRGTTVIKRGTIVIKRGRTVIRRGTTVIKRGTKVIKDTKVIRRGTKVIRR

SEQ ID NO: 142966 - protein, 67 aa, Heterodera glycines
MTRQLKTFIGRKLRVLIKCLFCWLATNATWHINGRASFCQLHLAKNLVLFKKIHTPWALSFCLIPRM

SEQ ID NO: 142967 - protein, 36 aa, Heterodera glycines
MNEFLAKSDFRHFIGHKLNIIQKIAPGYLGLCSKRN

SEQ ID NO: 142968 - protein, 32 aa, Heterodera glycines
MQSFLLLVNILLCSIVLLHLLSNENGLVNAMP

SEQ ID NO: 142969 - protein, 42 aa, Heterodera glycines
PQTWYQQLPSFVWPYQTILRYLKRKQKKFLTKKWLSLFSHFF

SEQ ID NO: 142970 - protein, 25 aa, Heterodera glycines
REWEEVERALDELIEQRRQRGVLPE

SEQ ID NO: 142971 - protein, 30 aa, Heterodera glycines
MSNDNDKRDASSIPTNALVNKEESPDGNEE

SEQ ID NO: 142972 - protein, 77 aa, Heterodera glycines
MANLMPQCITTTMPTFTIPHALLNMRAPIRLPIITPKFKKAARRGATLTTIATVISLFINNSQHLMQISAIRPFLIP

SEQ ID NO: 142973 - protein, 96 aa, Heterodera glycines
MASSKSRDRDMEGPRIYVTFCPPFAHNMHSSSHTDCLPTDCEFGVAVGNGDGSGPCPCKIGLALWTQRHNVAAKRLRRRARRCSAGAPWEIFRENV

SEQ ID NO: 142974 - protein, 145 aa, Heterodera glycines
FRAESSKRKRLEGGGRKVPNRNFEEAVFQWVSELRQKKVRVTRNMIAAQAIKMSAAYEDIENFAASNGWLEKFMHHHKFSLRRPTTVAQKEPDAYKNIIINIILYIQQLIHKNNYTHVYAADETAVWLDPGGGTCVAEKGSKTVT

SEQ ID NO: 142975 - protein, 64 aa, Heterodera glycines
KQFERFMRYKGDELLLKIGEHQTLLNSIFDRQSVSFDQQLFAATAAILVLVPTNAGSAKNLAMR

SEQ ID NO: 142976 - protein, 265 aa, Heterodera glycines
MAFICAWMGHMGPASVFPCALCRIPYKALGNTIIGTRTAKSIVGGAAIFSYRTADTGKHTTRDSISCGSQKALPLFFVAPTNVIPSPFHTLHSAGRDQMKRLILASTEIRSIGTPFSMDIADLLDEIRELHIFGRADLMTQEQIDNFSNKCSSIHGYFKAKILFFCFSHFPLFKKLWETHPAKFDTNNAAGFTPKLHWLLAHGPDFAKRWGWFAWISEQGIEHLHHVLNKQSDRFKRYKGDELLLKIGEHQTLLNSIFDRHIGFL

SEQ ID NO: 142977 - protein, 144 aa, Heterodera glycines
MVSTRSKTDKFKKMGNSSTEAKRKRSEWRRKSGRKGGSTPKSQLQTKEAPLTTGEGTSTDTMPSTFNAEPRQRPSPRPLSTTPIRRHVRTRPTTTDQTTDTDFRATVKSTQTVLETVETATQTETGRNAELRHWNASYRREQKR

SEQ ID NO: 142978 - protein, 136 aa, Heterodera glycines
VPPPMQMTRQQSVTLCGCKDDPVQTVPPPPLPAVLPPPPPPNFPPPPPPNFPPPPPPNFPPPPPPAASEACPPPPSAVSGVQPVPPSAVSEANPARPSAVSGVNSAPPPQQVNVVNSTTSNVPFAVNNKDTADQNE

SEQ ID NO: 142979 - protein, 68 aa, Heterodera glycines
MNLIYNVALLFILGLCLVLYPMPSADGMPLNEQNNSPTAGGRSQRKEQITKVRRRRPPNSEQKGGPNK

SEQ ID NO: 142980 - protein, 201 aa, Heterodera glycines
FFGVFLIPKFRAENLYFKAFSTKKQILSTLVLPKKSKVSKKAAKFVAKVAEIWELEFWAIVLIRIATKDSGALVMLYDALYVLSVMLTLGKNGEYITKMPTELSPRSAERLLADCESTIRAQFYEEHTANMLRFYENGMLAHDGGNSFSNFLAKCQLDGCDHKFRVRIFYANGEKMANDHYDKMVTKYPKLKQMLRIGSYF

SEQ ID NO: 142981 - protein, 82 aa, Heterodera glycines
MEAIPMKEIDQNEHRLLSDLFEKKNELFGEKIAPKYSKNPCDREKHLKFLFNLHEIAMNKLMEVKDAFTKRLEAYESRHHFL

SEQ ID NO: 142982 - protein, 79 aa, Heterodera glycines
MLFGLLLNIPFSAVNCVVNGDDNKDDGGEFDDDVFCSEMLAFKSTNVEILLNHHKLFVQVGFYQFECLSFVVFIFIIQA

SEQ ID NO: 142983 - protein, 270 aa, Heterodera glycines
MEFEDLDENDCKDARYLQSYFDVLLSSANYTLTVNVFSVMQLLDHSPQFVQFVNDNCIQFGAIGANENSSLHEEEIFNLYITYFETNDIEKMHKYEAIIGLKFMLNNVRLIEAELIPKLKKEGDEKAQMAKFRAEMLAMLKMFDFCMESVDQLIRMSCPLIEYKALFSKFYLKSAAAPLAEWQPPFDCLTKSFGQILSDFRNSVASQHFQFMQMALNKDRKGKLAQILREKEDTFMRLENLIGEEMFKYLWNKSENRQKLFNQKCMFKTR

SEQ ID NO: 142984 - protein, 74 aa, Heterodera glycines
MLSSANCAQIISASIRSAKTWPFERVVVQSITARALTVPTNGVRDVLRRKARRKAVMEENEGDEEEEEDGQQQP

SEQ ID NO: 142985 - protein, 359 aa, Heterodera glycines
PQLKRLFPVLGKHLRKGDCGKSGVIGGSPDYTGAPYFASITPMKIGAPYFASITPMKIGADAFVYAHSDAAPVIKSYSPELIVYPSTDFATNRHSIVYPSTDFATNRHSIERLDVLVFGPGLGRQKHTQNLLADGVNFVRSKQLCLLCLVIDADGLFFVKECSQLFKGCTDKVIITPNHRDFVRVYTQMFPNQFVRVYTQMFPNQQKGEDTDELKIQCEMAELGKDLEVPVMRKGRSPTVTPPKRELSKETSMRRCGGHGDILSGATALFVFARKASDADIYSSEHLLDGAEAASLLVRNASLRTFRSVGRSMNAAHVSVGRSMNAAHVIDHIVPVVRDIDSGLSQKLRQLQHVDLCTK

SEQ ID NO: 142986 - protein, 63 aa, Heterodera glycines
MTSIKRRTFNVIRKLEIQSAKHSLRSLDINNNNQLEFVHAQIFQGFVQLRSVDLSHNDLIVRN

SEQ ID NO: 142987 - protein, 47 aa, Heterodera glycines; identical to SEQ ID NO: 139606

SEQ ID NO: 142988 - protein, 182 aa, Heterodera glycines; identical to SEQ ID NO: 137942
  unsure (1)..(182): unsure at all Xaa locations

SEQ ID NO: 142989 - protein, 160 aa, Heterodera glycines
LMGLSTTLPGRAISRQRARIGATRATARLTRPLEPILFPKLRIFADFPYLHYSRLEAVHLGDLLRISVRSGRRFKLPSHFQGPCGAHETPQEPRCFTGATSLSQAEPLPGTHTLNEKRTLARTPHDVCEFICVTAQNSSCEPSFPAWRDGNPLSSTGWTN

SEQ ID NO: 142990 - protein, 39 aa, Heterodera glycines
MALSLTEAVTRRFFEGEERRIEAMSKIRLIEFLSASEQC

SEQ ID NO: 142991 - protein, 78 aa, Heterodera glycines
MHGFKASRKSCTGHPPLPFTNCQPQKKGRGGWVTGAELSTDEDEDDNHHRQRKSGGTTTSRSSTTKRPKRRRRAVQQQ

SEQ ID NO: 142992 - protein, 516 aa, Heterodera glycines
MQRIAGAPEANVALKALERLEERLKAAQMEEEAKLQAIFKTGAPKSETSQTLKMAREEVAKLRTEATREELLTFLATLMAPEEFEAAKTLQKMASKSTASTVAKAPTELEAESKAELARPEEALGVSVEKPERREAKEERRMRLERQEMAFQLVQQLLSAGRSEASLSEKQRAMVSEQFKQFGLEEMSTSIVLEQLEEVAGRPEAKVALKAWKSLEEGLRVLAVMEERVGFEATWTTGETESGAEKTVQLARVEAAQKRVEEAQEQLRTFLTVLVGPEQFEEAKLLQKIPWHTSAEYRGPESREEWTKIGQQLAKMEAIGLVGVVKPLPVVGKAEASRRIEGREQAFDLVRKVLSEEKGQQTLSEAQKLSVFEQFRELGMEETAATVALQQIQQIGGMPEAKVALRDWTKLEEHLKAKEAFEEEAKLQAALKTGAPDAETSRTLQIAQEQAAQLRVCQLKEELLTFLATLMAPEEWEAAMTLQKFDVAPKAEETLRLKIEEQQQITELVAAALKRE

SEQ ID NO: 142993 - protein, 121 aa, Heterodera glycines
MENVLDVVGEEILERIQNNEFERDRDGLFEDPEFPVESIQLYFTGEPVAVRWRRPGELAEHPQFINQGPIAGDVRQGSIGNWWALAAASVLAQYGPLFYRVVPPDQGFGHNYAGKFKINDN

SEQ ID NO: 142994 - protein, 64 aa, Heterodera glycines
STYKDSAGNEKILASTQFESTYARSAFPCWDEPTYKAQFDIKLEVDKHMTALSNMNVVAEEEAA

SEQ ID NO: 142995 - protein, 78 aa, Heterodera glycines
MANGSDKFSKLPQLASPSLYQIMLSVDMETCKFKGNEIIHLEITKPTNFLTLHAGALEVEKASLKLEDGTGPEKFINL

SEQ ID NO: 142996 - protein, 37 aa, Heterodera glycines
MFSFLHSNRVITRRWLAKIMMTKLCTPLRGITIPTKY

SEQ ID NO: 142997 - protein, 34 aa, Heterodera glycines
MKMHQNYLLSIKHENTNLSKNQHEKDGLRSLKLS

SEQ ID NO: 142998 - protein, 51 aa, Heterodera glycines
MSELVKELEREEQLADELVQNSNRQMQNYAPSREASVGQPLPAQNDGTRRS

SEQ ID NO: 142999 - protein, 25 aa, Heterodera glycines
KCSERTKFYLHASLGTLMLFYRKGR

SEQ ID NO: 143000 - protein, 88 aa, Heterodera glycines; identical to SEQ ID NO: 124691

SEQ ID NO: 143001 - protein, 71 aa, Heterodera glycines
CWCGKCEELCSSRQKILRKFISICRVLSSFPAKFGELLISLERWVINEKNNYRKNNTCVVSVNNCVPSGRK

SEQ ID NO: 143002 - protein, 68 aa, Heterodera glycines
NYFFHFITQRSRLIRSSPNFAGKLLRTLQMLINFLRIFCLEEHSSSHLPNQHYFFKIIFFILSPNVLD

SEQ ID NO: 143003 - protein, 85 aa, Heterodera glycines
MCQDLIDRLDLMYRARFKKKILNKTDVKKFAQNIVGGPQFRDQLNDEWEKGEQQQQRRRQNANGEDEDIKPLELSQINDMGILKR

SEQ ID NO: 143004 - protein, 292 aa, Heterodera glycines
MRRKVTVALYEDHVKVFKLLFWARFYALAIALQRIPVEVKEAKPGQRKELFLQIPFHILFFNLNFHGFIEKTCPSDMLKNSGLSIKDAVPQKITKDEGAKLFGYNDYADVQKEEENANATTKELAATFRIDVPRNAWPDETRRRTEELRKKFEQDMDILEEYLLANFNHQMLYNGQSRFYQLSLKSKKDPNGLYQIFEKILPMNWRRWPPVRSPDRCPWSFVNKEDEDYSLKTVHFTKANVQLFKKGNNGTEKLKGIEKWLQKIFNWLDGLVDKCHKKSLTKRNRMQRFLFE

SEQ ID NO: 143005 - protein, 227 aa, Heterodera glycines
DIFNVKSSKEKTGYKHKKHRLESKKAMFGLLMEVDSAVEDNKNIREKWRRKGDQIWEENRENEMEKIWAEQIEAVKMDKTNELSNDAFKQVTSMLKEGTDMPKWMINTPKDSKSSSNKNAGTSSRVESSNTRRRGKRRVIRNATTPADKSEIRTPFTEETLVRKKRKGGFGAGHAAGHAMSRSFSHAHYSAPYYPHGGSYCMGYHYHSSTYYYYSPYHMSHKQVKEL

SEQ ID NO: 143006 - protein, 16 aa, Heterodera glycines
CDLERYQWTQTLGELE

SEQ ID NO: 143007 - protein, 259 aa, Heterodera glycines
MVEMGTEIQTSRNELKSFQEEVDKAKNITLEHVEKNDLKKAKKSADVAKGIARQAKTKYTSTLEGYNDKSEKGFSGIVNRLNEALGEHIKRKDIENRQVSEAEKGLQKRERLANEDVQFQYDSIDQKFIVYLSSAVTHIDLSKHLAYVLGFKNTRLFHAEEATYMPDLTGGVRQLYIYAPNLIENTIIGNQMAPLLRIVNVVDDPGSISEVIYSTEYFHRLQSKRISEITIEIHTPFGEFVKFHWGSCILTLHFKKSIF

SEQ ID NO: 143008 - protein, 84 aa, Heterodera glycines
MVALIGDNVPFFTRKRHVLVKESAIVRPACIPSMAHGKRQKIKMLFEQVENVGGKMNNWKTPNLLKRSNPHKFSFESSGIFPRP

SEQ ID NO: 143009 - protein, 50 aa, Heterodera glycines
MSCHLREFGSGFIHFLFFTKFENGFFYSFRSCKNDLNIAGKYLDMRTFYM

SEQ ID NO: 143010 - protein, 30 aa, Heterodera glycines
MAMEAQQQLAINGAILGMPKNEASFKNNIV

SEQ ID NO: 143011 - protein, 102 aa, Heterodera glycines
MPKIKSKSASFREWIRRIGGTDFYSTTGKIIYCQLCEQQVTATIRRTTTTTNTKFTDSLHAIRVSQTTQRNGKAQGKIGTEQWRTQQQFLTTLHNIPNPLHP

SEQ ID NO: 143012 - protein, 28 aa, Heterodera glycines
NTILAFCHYFFTISTFFGKFLNKNAIRT

SEQ ID NO: 143013 - protein, 24 aa, Heterodera glycines
MEKACKIWRDYIDFSALELLELAS

SEQ ID NO: 143014 - protein, 64 aa, Heterodera glycines
MREAPYKADAKPRKFWLGVESTGALRAENIVLSGIQVLKKKLIDMQEQLTIERSAMEQQPTTYY

SEQ ID NO: 143015 - protein, 89 aa, Heterodera glycines
MLVLLLSLDRSRLLRSLYFFQFSSEWALRLSAVFFSIRPNFFVPKVINMLPGKFPSALQPRFFDLCEQLTKQIVPTLEPFLRELIAVDQ

SEQ ID NO: 143016 - protein, 140 aa, Heterodera glycines
MNGVISRESRGLNHGLPLDTVPFHNGMVNLKNKTHSTANGRKCANGFRPSATFCRNSWVEINSFSHKFYPLSIVNARVERRRRNRNADGVRRHSSAECLCRVGDDAKSAKQKGQQMLGRDGQSGDNSKNGNEMYYLQLGF

SEQ ID NO: 143017 - protein, 82 aa, Heterodera glycines
IVTALPVPSQHLLALLFGTFRVITDSAQTFGTRMTPDAIGISVAPSPFHTCIHDGQRAKLEDIMRFKLASQVISKIIQSFGA

SEQ ID NO: 143018 - protein, 283 aa, Heterodera glycines
PMILRNCFLDSQRIWPISELMFSHLPLFQICRLLGALYSEMIFRRGYVHSDPHPGNVLVRRSANTGREEIVLLDHGLYCTLPDELRIDYTLPDELRIDYAKLWLALMKPDQDEIRRVCERMNIGQNYGLFACIVTMRSWKSVTAGIARTEIDDRERSHIKEYATGLIPQISVVLDSIPRQMLLILKTNDLLRSIAFKLKTEHRLDSFSEMTKHCTRAVMTKHCTRAVYHHSIAATQSLLSKLRLYLAMYVLLVKINIFEVFLIVNGLLTARQRHLTLQMLFLL

SEQ ID NO: 143019 - protein, 101 aa, Heterodera glycines
MIGKLVRLSPENWNDGELSPSDWNAGKLSRSDWNVTELSPDDCDAEGPVIGMLVRLSPGNWNNGELSPSDWNAGKLSPSDWNVTELSPDDCDAEGPVKFKF

SEQ ID NO: 143020 - protein, 102 aa, Heterodera glycines
AIFIAEVFHRREVPTQFRSKRRLLGKYTLVPPNTAGGSNNDYQLETDGPPSPPPPGGTAPNRNNNHFQLDTVRVADDGLRHGRPEAGSNYNNNRSFFYWIVP

SEQ ID NO: 143021 - protein, 86 aa, Heterodera glycines
DGADEVLINPNMLENERHKLNVERRKKKDHYNPYEEEVDEFGQEEMIAFRRPKNKGREKHAEQKGIESRRFGDGNDGRNGGRKKDT

SEQ ID NO: 143022 - protein, 197 aa, Heterodera glycines
DGIGQRTNERFISRVMPFHSLQIRNSTDFANTGMRYCCFGTPESPIVSYCCFGTPESPIVSDTRDMLVLFRSFYRGVLFRSFYRGGKGFQARARAVATTGRWAWSEWSECSASCGACGVRRRVRECAPRGDAVTELSQTEVCARRPCASLCARSFSEEAPCEGILSLLKGLRCRTERTRMEPCRWMCCAGYTQRWTR

SEQ ID NO: 143023 - protein, 85 aa, Heterodera glycines
MLYALESLNLFSTGISLCTFRPPHSQKTIAETYAVGQKLCTYPCSLGQIGPIGSKCQMIGRIAGGCNWRSECSGRGPKTGTIKLN

SEQ ID NO: 143024 - protein, 98 aa, Heterodera glycines
MNKANILKLNSSDEFKYFMRFCPNVNLQKRTCTVVTFGVGHTVRAERELIKIYPECHLIAADPSAEINANLTQSVGGTFVQGPIGAETANQQPVISWE

SEQ ID NO: 143025 - protein, 22 aa, Heterodera glycines
MPFTGFSAVKSDIYRVNPLYSL

SEQ ID NO: 143026 - protein, 62 aa, Heterodera glycines
MERKVLNGLQNPFRYGFVRLRMVSKYHADIREWEVQKTIHKKDADKKESLRVLREQNEWIMK

SEQ ID NO: 143027 - protein, 108 aa, Heterodera glycines
DGFGALLVSCGRSVVKMSKKGNVLQCFTAPEGVNYSALFVSQSGRLLILNRAQRILYLVDKDSNAPIARLHHCDGAVGSASLWIWTHFGVDQQNGTLFILEYISNRVE

SEQ ID NO: 143028 - protein, 78 aa, Heterodera glycines
MLEHVFVRTIGLNIILSSISNRHKIENAKLGRRFQLNATCQTLDKQMKDVPMNQIDLLGNEYSDGEVDGPKFLIEFVP

SEQ ID NO: 143029 - protein, 18 aa, Heterodera glycines
MKRQILEARGPCRNKMEI

SEQ ID NO: 143030 - protein, 28 aa, Heterodera glycines
MATVSNEKVGGSTLIGEEDGRDQRKVGE

SEQ ID NO: 143031 - protein, 204 aa, Heterodera glycines
IDHIGKSNFRRGDVILSNSPRAGGSHLPDLTLITPVFFSDQSGAPDFFVANRGHHSDIGGLVPGSMPPHSTTLAQEGAVFHSFKIIDGGVFKESELVEQLMAPQRVAGCSGTRNLRDNLADLNAQIAANQKGIGLLHELVREYSLPIVKAYMKHIQRNAVEAVRQLLKNVAEESQQKGQKVLRAKDWMDDGTEIKLEVEIDRDS

SEQ ID NO: 143032 - protein, 158 aa, Heterodera glycines
NSGKKAAENLKQNNVQQAKNGESKRSKLQEMIGQAKKTVENALGSSHGSLESHQNSIDLRQEVAEINSKCADLANLLNALEQRLRAVEELTEGVIIIQNCQFVIVMPTIFRLPKRSATAADECLSERSLSGQSPEDDFDDDPVQHHQSDLFASVTFDF

SEQ ID NO: 143033 - protein, 161 aa, Heterodera glycines
MSSSSGGAAGPSVVDEETADEVKVFRSNNAEDDPTDMAGSSADLDADKQELAMEADIEMQSNIGESKKGRGNYAGKTIELSSISGQSFNPMANPLSGPLPWPSPGSNFLFSQILAAASLSPVYGPAFQKVATAMAAQHFATAAALVVRNSPNYMNLGPSFG

SEQ ID NO: 143034 - protein, 96 aa, Heterodera glycines
MHCLFSIVYTILTIFMVAHTLSKGTVGGQPMKTERVLLDDEKLREYLSWFRFFDNDKDAQLQHKQFKDILWALGRLPYFEEQPKFERVLDVVDPNR

SEQ ID NO: 143035 - protein, 48 aa, Heterodera glycines; identical to SEQ ID NO: 130859

SEQ ID NO: 143036 - protein, 38 aa, Heterodera glycines
MYFADLLHHSVEAFPINDFDLIRLLVTRSEVDLAEIKV

SEQ ID NO: 143037 - protein, 60 aa, Heterodera glycines
LDFFFEIARPQTHGHPINCLTSVDRNLFVSGGEEKIFRVFQATSSFAENLANLSDSSTKT

SEQ ID NO: 143038 - protein, 196 aa, Heterodera glycines
MAAYAGDTDDVLLAILQFDHIDVQFLNMDGDDDQIGAAVSSLKFGSAIPSTFELSHICGAVVMAVGLSNGLIDIFVSETNSYSIQKKLSLDLCGSNKSWTRALAFNVSEDGQCHNLSLAAATDGLIKIWQFVGGGDQITVTPLANDDDDHQQLKMNQQTFCIQNGVAHPISVTLESVLHAQTGPIYALGNVPYNAK

SEQ ID NO: 143039 - protein, 175 aa, Heterodera glycines
MTEDERAAANWLDNHAWPPAEAFKDKFFEKVWKNAKGRSGYAAHWRKEFMHSHTERTSRAARAAAEGRFEKCGDLEYTRMSERVNPNELTLEDALREEDTDVNSPDLLDEFCKTKAPNMAADAKEAKKCYKKVLKQKKDQLKERADALASTNAENEELKLENNLLRERIGALESM

SEQ ID NO: 143040 - protein, 52 aa, Heterodera glycines
MGNCKPADATESENASSVETVEVEVPPDPLVNPFWKMQKAFEKKLRNLLKRE

SEQ ID NO: 143041 - protein, 52 aa, Heterodera glycines
MKKVVLQKPGWRPVGWRPVDPHPRESTLGFRAFRVLWSQILGVHPFRTPSGP

SEQ ID NO: 143042 - protein, 224 aa, Heterodera glycines
MGLYRDTKENPMQLRICSRSKDIIEPIIKSQWYVRSSEMAKRAKAAVVDGRLRLIPEYHVNTWNAWLNDIRDSVHLLVSFGGVTKSRPLLSPLTAIILRHRRETMKSVDDEESYWVSGRTEAEAKTKAAKRFNVSEQSVTLEAGYLNFNRFKNGIISTPSIFARRGRAGHVVLRRHRGPFSVDGLGPKQNGGQAPLFSPALWLETGHDISFFWVARMVVIVAGT

SEQ ID NO: 143043 - protein, 484 aa, Heterodera glycines
MAEIRYLGFLLSEKGVRMDPKQVEAVQNFKPPKSLTELKSLLGALTYFRRFIKNFAHIARPLQTLTQDKFEGKIPENWGNEQNEALQTLKKMLTSAPVLQSPRFGKLFIIECDASRRAIGAVLLQETGPVAFSSRALNKHEANYPSIEREALALVYAVKEFSPYIIGSGTTKIITDCSALTGMMRAKELKGRLEKYQVTLQGYDLEIVYRPGKKNKAADFLSRYNIPGIEDETETNLTEKKNKKENKAQKILSTENSENKIENQDNSNKITLKEIIEEQRQVKELAKIFYILKTGKYPNEILKWKKVNSEYCLINGAIYYQKGTENSENPKLIIPHSLRKRIFCEIHDKGHFGFDKTWTEIKSRFYWVGMKEDVKLLIDACDGCQRRKVQPGQSNFSPSVPIKATEYPFQRVHCDLMGPLKKTDRGNLYIFLTIDSFSKWITAKAISDQKAETVSEVFVETHTMSTAYHQQSNGQAEGSIENCS

SEQ ID NO: 143044 - protein, 646 aa, Heterodera glycines
MYNGPVVLPLREADEPLNWEKFVNDPNLELEEKTEEESSDEEEKNTEIEKLNKEKMHKKGAEFKKSLTKFGFESSEEEQESQIAFVRNVNENEGENELEILINENLIEEWEDPCTITEIFIDGEAKFAYTSWPEANLISLTSLMPIDLVQDHWEVFTNDFGKDYVIGNLLGTNFELFINEEVDKIVLGIQIQFLLNDEWDSKMENEKETYWEKLGELNGQILELQRIPDINIAYKENLQKNKNRENNEQINGQIQINVIKNKTTKVGEKEENLEIILSNDLNNNKNNERNNLENLGKNVDYLAMQSPNLPPVKVFEDDLDENERKLREQIDKLKEELEKTEEKKKEIEKRRMEQMKLATVDEVVLEDEEEEEEEEPTSKKSRLNPTATKEIVQKIINEKWVANDLVMIDPRGINDRNGPEDVIESRRIEDGIRAKNRSVNEKAMREFVMTKTSLDHAKEIRTRAMNEVKYAEKPTDPSRLLRGEIRAAEMDICEKQTKAIPPEGKRLAINQLETPEEEAKRKQFCARTPPPFQNLMAQQWAQKREKAENEVISPEKLEGILQKIEEMKGKMNVICEEVKALVNQSSVSSDGEPGTSNFNRWEDNQWRNRGHRGRWSATPRWRGRARQQFGNDWNSQGNGFGTDGYS

SEQ ID NO: 143045 - protein, 115 aa, Heterodera glycines
MFRGPFTLILSGATGSGLIGEGVETFNGIPDMNKIKEQEKPLLLILDDLMLNMQNNFLDLLFTRGSHNWNVSVIFVTQSLYGRDIKTARANAHYLVLMRNPSGQLQVRTLGLISM

SEQ ID NO: 143046 - protein, 236 aa, Heterodera glycines
MTDKSKRNTHLLFARFAEETGRFGDMAQSMKQVVELDAKLNESERKSLAVAYRKAVAGQRYAWRAITSILEKGNDATERQLEMTKELLNKIERDVEEKCREIVDLLDRLLLKEAANDEAKVFYLKLKADHFRYLAETRAENADVVEKSKQAYQEAFDMAKDKLSPLHPTRLTVALNFAILLFEVQNLPAEACQLATQAYEDAFNEKKAKPEAACPDSVTIMELLQDNLEYWGAAAD

SEQ ID NO: 143047 - protein, 41 aa, Heterodera glycines; identical to SEQ ID NO: 130306

SEQ ID NO: 143048 - protein, 78 aa, Heterodera glycines
MSKNTSTMLLFSLLANRIFLVTSVNDLTEAIGSMKEKLFTIYQKYDTDFTPNIPSILETERQEFFNKLNEITNKQFQT

SEQ ID NO: 143049 - protein, 168 aa, Heterodera glycines
MKAHSPWIGHQGDIGEAGLRGPPGEDAIGYARGATGPQGELGTPGPVGEEGPPGERGDDSPPGQPGESGPQGPPGEPGKDGFPGASGPIGAQGADAEYCPCPERSDGQLYEQSKRTHAEPSAAAAAIGTDGIGANPHAEFAANVPEGYEGYYSYSKMAHANTLRRRHL

SEQ ID NO: 143050 - protein, 241 aa, Heterodera glycines
MSAKIIRVPKIACDLSLAKNGRIQFPSTIAFIHPIMSAKIIRVPKIACDLSLAKNDVSKNRNYAQKASQTILALPIPSTIAFIHPIMSAKIIRVPKIACDLSLAKNGVSKNRNYAQKASQTILALPIPSTIAFIHPIMSAKIIRVPKIACDLSLAKNGVSKNRNYAQKAPQTILALPIPSTIAFIHPIMSAKIIRVPKIACDLSLEKNGVSKNRNYAQKASQTILASNSFYNRLYTSHYER

SEQ ID NO: 143051 - protein, 234 aa, Heterodera glycines
NGEVRKSAALLVKNGVLQGDTLSPLLFCLSVAVVSSSVRKLFDFEVLIPGRGVMQRQNHLFYMDDFKGFAPSEESLNRMLVTMERTASAVGLKVNKRKCALVSTREAAGEASGNEIPTLGAHDTYKYLGVEERIDIVFEDAWERVCAKMNERVRSLLRSEPTFGELRKAIRVTVTPVARYLFLNVIAGGPSWGSVLANAQDFDTRVRGLLRERVSDEPGWRFKHCNADRLYLRP

SEQ ID NO: 143052 - protein, 115 aa, Heterodera glycines
FVGSRYRSQPTTTEGQLAKGTTPPIPQTSQQQQIQQVEGPMTISKPNQHHNANTGGHRANASLSPALGSSGFGSSASSNASAQVERDLIDLFDEKCSIGPPLKWTPSPPPLQQHQ

SEQ ID NO: 143053 - protein, 50 aa, Heterodera glycines
MKNPRLSSRTRAKRPSKSPVCFLSYFPFLPIDRNSSLNNPTFTGAQNCAV

SEQ ID NO: 143054 - protein, 38 aa, Heterodera glycines
MAPATLTESERLFSTAGLIVTDLRKRLLPQNVDKLLFL

SEQ ID NO: 143055 - protein, 24 aa, Heterodera glycines
IGFLAIIGIGDLIGIGFCLARHIP

SEQ ID NO: 143056 - protein, 45 aa, Heterodera glycines
MLYLTMAPNLPCQNGFPPRPSPTPPPARHPPSASVVPFCAGNGDH

SEQ ID NO: 143057 - protein, 49 aa, Heterodera glycines
MISPITINGIPTPWQLLAFLANYVLENGCILQKPGSNFNTGTLNLSACY

SEQ ID NO: 143058 - protein, 135 aa, Heterodera glycines
MVFVKCLLFPSIFAVLLRLCIISVLLEHGHGYGQFGGGRPGQFNTDGFFLNMWACSPFGPENKAKCEKEGPDGANQIRADVEATTKMRAPTATDWKCTCHFGAKDKSMDNEQFVAPAPPVVKQKKGTDRMPKLKL

SEQ ID NO: 143059 - protein, 332 aa, Heterodera glycines
MCLRCAAAFERFFVACDIPATMVPKYASRFVKERIHPALMKDLDEPMLVDSNSSSSFKAPDREDIYHIKMPIGTLPKTRKILEKNRSLRDRGVLKRGVSGVRRSGIELNKPLNTISTRSKVIGRKAITLQVRTFCDGLCSNVFKGHRHHFLDGICPFGVNAKRFDLYENDRCGRQHWQLETVGFVNPIAQFVCFSVSLANRFASLSGAAPNIRFQLGKVVSPSVQLIPSRRPLVRYSSDIDDFSTTAEPFSELTTEMVRKVRKNNSVTFQPPAFRAPITERIQIVGRSRRSRPVISTTRGIKMVAVGGNSGRLGQPTLGKRTSILDRITVTK

SEQ ID NO: 143060 - protein, 95 aa, Heterodera glycines; identical to SEQ ID NO: 125597

SEQ ID NO: 143061 - protein, 54 aa, Heterodera glycines
TFLVLFESIRKMLLACKFSKIVIYAQKNQSKKSSNYWVFEFLLDITFLKLNQNF

SEQ ID NO: 143062 - protein, 44 aa, Heterodera glycines
FAFRIFWRFAFRFLARNATFTPLRIGLNSHKIFQNFTYKLANFQ

SEQ ID NO: 143063 - protein, 68 aa, Heterodera glycines; identical to SEQ ID NO: 127362

SEQ ID NO: 143064 - protein, 639 aa, Heterodera glycines
MAKTTQAHLAKKTAPQPNPNAETPQQDEVGPSTSAAPAEEAMEPPPPTPGPVPTPEMDEEILEFGFSLPSASVTPIGDLVPFSTTPTAPMDTGETTPPPLAIDERSERIEQLEKQLKDRDDTIKFLHEQVRNREALISDLRRQLDQHMAPPMAPPTTSKTPPNRGRPKKRLEELQRSARRGIVDQINFFIRPIFFWVIKIKRRICSALKYDVISTPGGPGYVCSDIAGALRFRLSTAKDNLISLIPAHGLPLKVSGDHGQGFTKITISLAHALRPNSPSNNFVAAVFPAKDSRTNLKNFCGSLWEQIEHLNEIDGREVKWFLGGDLCFLWAIIGHCGSAMTAFPSPVCNCRRDHLISSAKCQIRTVQELERQADQFQQLTHGGDKATAEARALTKGIVCASLLPSISFEQMLLAPFHVFQGLGNALIKELEAGENAEIAQQFFRRIGARREAFRKRDLTGNSIRKILVHADQMEALFETEWAKTICKTMAHLGKIQIFTKAQPLSPGDLDGLETAVYQFKAFLDEQPMVRTLLSKKTKAHLLLHHFVPFARQHGFLGLLDEQGDEALHSVWRRLEQLWKTMPDSEQMRQQLEHHFVSNWLLDTGRLDELKLREEEQREQAEEDKTNEESDQDADVDIVD

SEQ ID NO: 143065 - protein, 232 aa, Heterodera glycines
CWAASTSHLERPVPISGRGHLVVPTLAQQDSRVVNRNHLGNDPAAGSPTATLLRLLPVQATAIKSSSLHTDRSRNTNRPRISRNGSVPGSDGRCVQRAGTYSERVDDSPLQGIPRSRTIIAMSDPNHGKFSPVYQPLSGKDKHADFASRACSRTSGHHRPVIAQFRAAEHRKIPLRSLPTEAMSQLFSARVSLVIGINQTNRSTNERPCTTIHRIMKKLSICQSLRCPGRVS

SEQ ID NO: 143066 - protein, 40 aa, Heterodera glycines
MLLGCFHTLELWYTAQCCTCESLCMAAAWQCVGGGPPRLA

SEQ ID NO: 143067 - protein, 59 aa, Heterodera glycines
MPTSNHGKYEMGQQSVLRCHNPQQKVLNTEVMTNVQQIERRTKQTGALIERNLGIWQII

SEQ ID NO: 143068 - protein, 147 aa, Heterodera glycines
NRITTPSLYQHMLNTYSHTIRRRWPCPNRCVRRRRPFQCPALAPQSTTTSAPKCGHTTHLDSNAVSDPTDSRWPPHQLTKPPNCGVAAATRTSWSVHLDEFRNFLNTYSVPGNKWVWDCAFTNDSSHMVTASSDGILRMWELNACKV

SEQ ID NO: 143069 - protein, 43 aa, Heterodera glycines
VKLVLYRGSMPIKFGTILLLIERARTEENFFNVKLVLYRGVCL

SEQ ID NO: 143070 - protein, 42 aa, Heterodera glycines
MHSGQLQIPDNTVKKNAFFSVSRQSNQNFLAFDIFREHNFNI

SEQ ID NO: 143071 - protein, 100 aa, Heterodera glycines
MNRRLRKIWICGDVWMDILPSFERAELGLKIALLSYRYDALVDKHFDGKKELTIWRTIEICEGIGPEPKLSVQIDDKFVAFPLPERPLPNKIRFNFLWIK

SEQ ID NO: 143072 - protein, 78 aa, Heterodera glycines
MSRYDGGGGDLLLKRCPISEKASADQWENDQNLDANLNFVQFNLCAGKSSTGPYGHQRTKKKKRVKASKYRRIARKTN

SEQ ID NO: 143073 - protein, 87 aa, Heterodera glycines; identical to SEQ ID NO: 129152

SEQ ID NO: 143074 - protein, 84 aa, Heterodera glycines
MLAENCLRTVQRQYVKLGSNLAKIRDNEQVLAITPWESATDASDSAEITAPANADEHPQSWHGGRHFVEVQTTKSCTLNAEDGR

SEQ ID NO: 143075 - protein, 250 aa, Heterodera glycines
HESTLGHVFETAFGEIAVNICYGRHHPQNWMMIAVNICYGRHHPQNWMMYALNGADIIFNPSATVSGLSEADIIFNPSATVSGLSEALWPIEARNAAIANHVFTVAINVAINRVGTESFPNEFTSGNGRAAHKHKEFGHFYGSSYVTAPDGSRTPGLSRTRDGVLIVELDLNLCRQTKDGLSRTRDGVLIVELDLNLCRQTKDSWGFRMTQRLEMYAQSLSAMTQRLEMYAQSLSAAAASEYRPNVVKEK

SEQ ID NO: 143076 - protein, 55 aa, Heterodera glycines
MICGNCIALAVYQPYPAQDSDMKNTVLENLENLFIVVFTAESDQHSAFPDQHPGI

SEQ ID NO: 143077 - protein, 130 aa, Heterodera glycines
KQKVHTKCTSCAWSSDGFFYAVGFFDGTVSVRSASGPTSHRSDKQLDYDPTAVHLFNNGCFFLTIGSNRMLNLHTVGGIDLGAMAQLDAWPWSMVLFKQQFLVVLSAGDHQSAFDPVPEQALDMLRPEGH

SEQ ID NO: 143078 - protein, 46 aa, Heterodera glycines
LCSAEPNDASLRLNRSQVTHRLSHFCWFCLFLSPQVHPISKNSVLS

SEQ ID NO: 143079 - protein, 84 aa, Heterodera glycines
MSEEVDRHIVERYEIQKRLGKGAYGIVWKAIDRKTNDTIALKKIFDAFRNATDAQRTFREIMFLQEFRTAPKHHQTVQHSQSGQ

SEQ ID NO: 143080 - protein, 25 aa, Heterodera glycines
MEKACKIWRDYIDFSALEQFLKKYL

SEQ ID NO: 143081 - protein, 27 aa, Heterodera glycines
NCSETHQILFASYFRHSDAFTIKKGDE

SEQ ID NO: 143082 - protein, 80 aa, Heterodera glycines
MRLNNRNRQFIEETRISVKENYCILANFVLNLLEKANVVEYLQKNDENIEYFFIRYSTDCAQRNDLPTRTFDENIVGRQI

SEQ ID NO: 143083 - protein, 86 aa, Heterodera glycines
VANTLVPDFHKLAFALLSGLPNEVSFGLNILTVLSHPGPFVLNFANCPQLIALLVALCGVCVNVEGFCCFASIVGGICCVKLPMIH

SEQ ID NO: 143084 - protein, 54 aa, Heterodera glycines
MADTATANRQGFAVVGPFATTLRALCGPSQLICNAHSAQHLSPFRRRTSQTPHA

SEQ ID NO: 143085 - protein, 18 aa, Heterodera glycines
EAIPEGFGLPINLGASVR

SEQ ID NO: 143086 - protein, 96 aa, Heterodera glycines
FILSWTVFTSSIFYVWRRVNQPAISGSTPRLVYKYFLFMHKLSYIFGIVGYFSLVFTVIGINSVFGISSNLSLDFGVHLLFYCLYYGVLGRDLAHS

SEQ ID NO: 143087 - protein, 75 aa, Heterodera glycines
YLKVPENHSYTKTCLNFVIGSMAFDRFFELLNFPFPKGRRRKLPTFIPIVKDCTYSNVPPNVHNCTIATSKSRAK

SEQ ID NO: 143088 - protein, 34 aa, Heterodera glycines
SVSGYSNNYRGAKIQRRIKVQAIGKLFRKDSVSP

SEQ ID NO: 143089 - protein, 167 aa, Heterodera glycines
MRAILFLAMVCLVMAVILETANSKAVKNKKGTVATPAKGKAAPKGAAKGGIKKDAKSKGKGKKDAKGKKDKKAKPAKGKGVPKNVKPMAAVKAVPKAAENAQKGPSSAEVVAEENNLDTEAVDDLGAEESDFDQLAEDELLEDDAMDGEADEWEGMGDELVDSQMAL

SEQ ID NO: 143090 - protein, 83 aa, Heterodera glycines
MSNGPREEQNFHLIRVGFDDTLQGELINAATINYKASSCSPTIATRSTRSRPTPARPCWPACCASVVASALEERRIAVAWPPC

SEQ ID NO: 143091 - protein, 35 aa, Heterodera glycines
ISPLRLKLFRPYFANFLPLFRSLNWNFSPLKIRTL

SEQ ID NO: 143092 - protein, 53 aa, Heterodera glycines
LFSFSTKLNILGIIRKHSKNAISLQIFKNFYLCTKKSEQKKVRITGFLSSFWP

SEQ ID NO: 143093 - protein, 22 aa, Heterodera glycines
MLSLLTSLFVPRPATVCPPFSE

SEQ ID NO: 143094 - protein, 259 aa, Heterodera glycines
KRSFFSQRNEILIYEAVKLWNDNTCLNIVESDKVSPRIQFTNIVGRGCKANVGMQSSKAYQEVDLEYPDCYELGLIAHELGLIAHEIGHSLGFFHQHERYDRDSFVWFYPDNVDPENHYAFQKETTESTDNYKVPYDLGSVMHYSAKAFSINGQYTLVPRAGASYINTIKAFSINGQYTLVPRAGASYINTIGQRFGPSISDYIVINKHYCGLACRVTMNCDNDGCRVTMNCDNDGFQNPDTCSTCICPQGYIGAKCQD

SEQ ID NO: 143095 - protein, 286 aa, Heterodera glycines
ATSVAPSANLLAQQLAGQSAAAATAKFGTTPQRQQQQQLPAKQQQQRQKQQHQQPGQAAHFGIGGAQQQQVPVLILPDQSLLERYVQHKRDALDQLHNSDDDDHDAAGDAAAAVDEALHTATTPSAPALFVPRTAAAAAVVSASLPGSKRNSQMLAAVPSGAELPQPLTGSFHSAIEATAADLRAAAAAAQPRLRRAQQQQQQIPILSTQTFEKPKSLFEEQMQRQAIQLRQRGAVARHSLHDDDAEAAPAAKTVQNQQRQHKQAAQAVPATQPQQRRQRSGDATA

SEQ ID NO: 143096 - protein, 93 aa, Heterodera glycines
FHPNIYADGKVCISILHTPGDDPTGYETSAERWSPVQSVEKILISVVSMLAEPNDESAANVNAAKMWRDNRAQFERIAHKLVRTTLVKQGKTC

SEQ ID NO: 143097 - protein, 142 aa, Heterodera glycines
AFIELTHRGCGNTIPELNDYGLLILKSINENNAEVICSCDFTNRAFGKRNFFVISQSQDADLVMSKKSGLTGWITEQPSVLDMLVGITQKKNLAKLILLIKINKKNEDELKKWNSLKLAKFVNRNLIKEKMPIKLDEDKMIF

SEQ ID NO: 143098 - protein, 166 aa, Heterodera glycines
MQKVVRTPGCQLLYTDTDSLIFVHPIGMCPLKTGPHLGQFTDEYPEHEIVEFCSGGAKQYGLALRRKNGQADAEMEYVLKLRGLTLNYDVINNQGLRYETFKQQVKRYAQTGEIEPINVMYPNFIRPNIRDGGSVISSSMQKCYQPYVGKGIVGADYNVLNFGHTL

SEQ ID NO: 143099 - protein, 116 aa, Heterodera glycines; identical to SEQ ID NO: 127487

SEQ ID NO: 143100 - protein, 66 aa, Heterodera glycines
MNTVRRTKWWQFTGVKKHSELYRRPTGPADGWSSALRSTIAETAPSPPVVVAVVAGVVVENEMPKK

SEQ ID NO: 143101 - protein, 36 aa, Heterodera glycines
MPKDVLKNVRKLEALQQGTSKSNDELRIRFGFRHSK

SEQ ID NO: 143102 - protein, 92 aa, Heterodera glycines
FISADCWLCVYDLLPASQLGLGIALISHRFDFYVDEHFKTRRWTLRSMAIKSKSKSDGTVGMDIVNYAGKALPIPQNPLPKKVVGFKAISMK

SEQ ID NO: 143103 - protein, 107 aa, Heterodera glycines
DDIQAACYKILDSLYMVSRLANSCASRQSIQIEVEKHRSALGQCLSAFSACFPVAFLEAEFNANNKLSVLAKSRDQSVQVQEMLQNLSQHIPMLDKLLQEIEQSAAK

SEQ ID NO: 143104 - protein, 140 aa, Heterodera glycines
FVTYWSNTTQSTNIPINGTQSSSISISGTQPSSIQSLGLNPPTFQSTGLNPPAFQSVGLNPPTFQSTGLNPPTFQSTGLNPPAFQSVGLNPPTFQSPGLNPPAFQSVGLNPPAFQSVGLNPPTFQSTGLKRNLYPPAFQS

SEQ ID NO: 143105 - protein, 92 aa, Heterodera glycines; identical to SEQ ID NO: 125147

SEQ ID NO: 143106 - protein, 24 aa, Heterodera glycines
ITGVSIIAVLFLVFLMPSQNLVRF

SEQ ID NO: 143107 - protein, 150 aa, Heterodera glycines
MEYYYCFNYSQVKHYMALVDTQQYEACHQEAVTRCHATDNWHENTNKLPGQDQKVVVDPGPQADPLGKECALYVRQVLRERAARVNLLPDIEENCCDALSEYCFQIVMLDNYCSPKVDIESEGKTVHSFLVHSQEKDEGKVETTYPIRSA

SEQ ID NO: 143108 - protein, 212 aa, Heterodera glycines
KLVELKKKEVSRKRKRLIETEKVEGNKVPTNVKEVQETEDGEKKDEKELKGIGNERDLKEVNEEEKEKKDKKGKEEAKKKEIVLIDSEEDWKKVSQHEDEVSLGPEEEDDEERILFPTPKGAELQNLSFWESCHNKAKSRGEMEEKSREKEKRETNALRLARAEIRSAELSIIEKRDEEIPPEGKRIRNELDINCETEEEERNRKKYRAHTP

SEQ ID NO: 143109 - protein, 86 aa, Heterodera glycines; identical to SEQ ID NO: 125661

SEQ ID NO: 143110 - protein, 84 aa, Heterodera glycines
YPKIFFWVFGAALLNRCAQIYGETESFRNSFTIACTLILRWIFAPHNCLSTPNGHLKKSIYFCFRGSPPEPMRPDLWGDRILRE

SEQ ID NO: 143111 - protein, 23 aa, Heterodera glycines
MTTSAGEWKNKQKANRGLLGALK

SEQ ID NO: 143112 - protein, 95 aa, Heterodera glycines
MRHERRTVECQRRVTQLKRRAVETWKAPATILAQVLQNTTTPMLAAFPNKAATKRLLVFARSSTSQWTCIMKNVYADGTFSRRHLFQILPQLRKK

SEQ ID NO: 143113 - protein, 153 aa, Heterodera glycines
MPEIDEFDGQAEYGAYGYVDRFIRNWIQQSANQNRAALFPMELWNMCDRVEGDLCRTNNSVEAWHINLNALFRSPSPRLSIFLRKVRQEESHWRQQVEDFANNPANGIRGKGMKRKQTYVDQDMNLNELYVTRNNRHPLQYLRAISHRMAEPL

SEQ ID NO: 143114 - protein, 371 aa, Heterodera glycines
MDLRISTPKNLLQYLVNQYNRQQARQNPNAQQKTVDDIGSVVRLSEHNVNSLQYWKKMYEDCNTVFARCHDAKKARLFITFTNNREWPEFKENIYKNGQVFTDRFDMWMRVWSSKIAEFREELYDKKFFGTILGYGESMEFQGRGGPHAHIVAQTDLDAVPYVIQEYIWAHIPSLPDKDDDTPIAKMHREIRETMHMQLHRCSDSWCGPSDPIYGRCKKGFPAPYSKCTILRPDRPAMYFRPSPSDGGAQLEVNGLIYDNSHVVPYNPYILLRYRVHHNVLFAYGNKANIKYALKYPFKGPGHCYVECKEESGNKIGIDEPAQYAKMNFRGATEAYAIVHSMPFARLSHHVVKLAIHLPNQQPIVYRAFQL

SEQ ID NO: 143115 - protein, 349 aa, Heterodera glycines
MTIVRRFGKPDLFVTMTCNPKWEEIQENLYKEQDPSDRPDIIDRVFNLKIKALLRDVTNQVFGFCIAWMYPVEFQLRGLPHIHLLITLAQKDKLHDGEDVDKRGISAKIPNKNQDPQLYELVKKHMIHGPCGILNPNSPCMEEITDKNNVKIKRCSKGYPKSFQEKTIVLENGFTIYARPNDGNFVEVKIFDGKVYKLDNRWVVPHMPYLLKKFSCHINVEKVNSLSSVKYLHKYIHKGPDRTGVKLVEKIDFDEVKQFTDARFVSPTDAVWRILENPICDRSHAIKTLPVHLSGEQIYYFEENMEEEELRDKINRNTELMAYFELNKNDELAKNKYYHEIPEFFVFGK

SEQ ID NO: 143116 - protein, 65 aa, Heterodera glycines
MRTEMNGSFLEINSAEEKRRTFRGPGLDPGPEEPGFFLDLDFCPGNQGPGPTWNPSPGFFQNVDL

SEQ ID NO: 143117 - protein, 125 aa, Heterodera glycines
MDRCKKEKKQWIIICGGSAYYFEDATIALGMKFLKNCNENVQLFLTPNATILITKRNVKDVIPIGETPEVERLSKKSLSPIRYAMISQLFTERLAAIIVVKMISVANTLPTLLQDSLTMRNSAKK

SEQ ID NO: 143118 - protein, 30 aa, Heterodera glycines
TQECTLKALRRHGEHSKMDCDTCTELTLTC

SEQ ID NO: 143119 - protein, 163 aa, Heterodera glycines
MQQQYDHRWVNHRMYFVDPNDPRVHTQGIEATWRALKNGLRHLHGTNSDMFVTNLSLSVYVPSVPWKCKNFPKYSGRNSISISTIIVALHCGIAPAMLFTGIDRLIAIAFSEFHDSLKKRLYLALLTVISVAYGVCFSATVYQNEIVDGDQMTTGSYLDFIKV

SEQ ID NO: 143120 - protein, 67 aa, Heterodera glycines
MVSTRSKTDKFKKMGNSSTEANRKRKEWRQERARKGGSTPKTLKQTEAETTGELSMSHFCDQSNLTG

SEQ ID NO: 143121 - protein, 59 aa, Heterodera glycines
MPDEEQMRQLLEHHFVSNWLLETGKLDEMKRDREEQQEQIGGRESDEESDVEEEQFDFE

SEQ ID NO: 143122 - protein, 240 aa, Heterodera glycines
MPAPVQSVRVIRSYTDEYFQASVLLGFGLPPKADSAHFQLYEVHIAWSPGKKVVGRQQVVFRGEHIQKTGGKSAEGRVNITGLEPARLYTFAVRNVSRELAAKCSAPLGVRLITPPVITSTIYAGQISTHSININFGESDPSHPFDQYELHFDSSSGAEAAEGDGETAPKSGKKLENGDETPNTLIRRLAKNDTKSFTFNKLVPGKTYTFALFTLLHGVRSRPVDVNITTCEEQKKDRKK

SEQ ID NO: 143123 - protein, 95 aa, Heterodera glycines; identical to SEQ ID NO: 125597

SEQ ID NO: 143124 - protein, 61 aa, Heterodera glycines
VILCYQDELFGANKSSIWKVARRFRLNDLSNLQNTNCAKYEKEIQVSIQNGTFSIGTEHFK

SEQ ID NO: 143125 - protein, 315 aa, Heterodera glycines
KAFSDVCGGEAPLMQPKCSASDPCPPTGYGCRQGRCCPSKGVCPAGSPLGGITQCSNERGNPCPNNFQCVTNNGHQYCCPSPDHVCGLPKDPGIPCQARGVPALSRFYFDGSTGSCRSFQFSQCGGNANNFDSLEFSQCGGNANNFDSLEQCEGFCFETQCPQGGSLRAGPAQCPQGGSLRAGPALATCVPGDALSNAHDSCPSQYGCSQPRFGSNFVCCSNPEEVCREPVSAGNACFGGFVTEPVSAGNACFGGFVTINRWSYNPEINRWSYNPEKSQCEPFQYYGCGGSGNNFLTKSDCESICQPSIRSGKSM

SEQ ID NO: 143126 - protein, 123 aa, Heterodera glycines
NTIRRPASTSAVPPVPLKMEEDERRGEVGTDTRRRRHDGGHSGGKKKGTDRSPTSRANVLDMEQLQDGGNQQQQQSMNNTQMRGGGIAQQQAAGNHSQQMLASGSGTGLPQDPEKPQQQPFKL

SEQ ID NO: 143127 - protein, 31 aa, Heterodera glycines
MEKSLGYLFILSVGGYVELLLIPRLINWLSV

SEQ ID NO: 143128 - protein, 410 aa, Heterodera glycines
MWDVVSGNPPPVEKTNWTRAQRVIRHFPNDADGQTLRQGIAKMPFANYDIWTNDNDEVFTERTLQLFTEILTTACSALHRSSQLFSALNSSSSAPAFDVAIAEWFDFSSLALFHRLGIPTTLITSALPLDSVLARYLGIPMPAYVPIVNKASPEGTKMDIWRRFVNYIDKRRNTQLDQIINTVANSVFGENFPSPQELALRASFLLLNTNEMLDLARPTSNKIKHIGGFLLDSDYPKNAVAKRMAKDPSMPSASAPSVFVSFGSVADPNKMPPQMLRAFLHTFASFPELDFVWRFPTQKGTDDEARCHNGTLFGNKIPANVRLVQWVDQHAILAHPNTRAFVSHCGLNSLNEAATAGVPLLCVPLFGDQNYNAAIVQNHQNGIVLLKKHLNKERLQSALKELVADEKANR

SEQ ID NO: 143129 - protein, 97 aa, Heterodera glycines
MVIVPFAVFSEIHFHHPGIEFWKPMEYSTRFVGGMHRNYRPISYGGKEIFTQKTFGQIVSVVNNLKTIFNPSTYKLLSRNCLLFLRTLVRQLTGKNG

SEQ ID NO: 143130 - protein, 154 aa, Heterodera glycines
MRPIPLNAVLIKDWRYYQKLEEEPDFDKPNYPKKWNEMAKAAKEAKDQLKMANNGTNENNKNGGTNGNGAANGNAKNGKKGHRAMIIKEYRLVLPMTVDEYQIGQLFSVAEASRQETGGGEGVQVLRNEPFEGESLFNGQFSSGQYTHKIYHFD

SEQ ID NO: 143131 - protein, 240 aa, Heterodera glycines
SPPLFLPISFFPSPVGHFPRVPAFAPIFALIVEMSVDTMAITALPLDCWLKERLKNWVQLSGHEGTIVPASNHTLWKKQPRGNRAELSGHEGTIVPASNHTLWKKQPRGNRAEAHAYEEIMRDSELCGITPKFYKEISELCGITPKFYKEIAHNNETFIEIQDLLAQFPFIEIQDLLAQFPNTKSRAIMDIKIGTRTFMESEVSNDTKRVDLYQKMATLSPDDPDEKERPEGQVTKLRYM

SEQ ID NO: 143132 - protein, 43 aa, Heterodera glycines
CFAVPRTGRQWMAFNLQEIRLAICGCKKLLGIELFFEVSQTPY

SEQ ID NO: 143133 - protein, 307 aa, Heterodera glycines
KWEEKEEERRNELKKREIIQKYYKIKEKIKQKGRKYSTKEWNKIEQKIAKKLGTNNCYIKKWIKEFGLQKQIKKSYKSKTDEEKRQIIQKFIEMTNEFKQKGKYSLKEWNKNYAEICKKIGVSKGTIIKWKKQFGISLKRITEKEKMAKMKIYWQIKRENPKISEQKIAKMTNTRRRTFGNGKPNLEKRNNEEEMKAKKEDKEILEILENSENYILCDFCFCSLTGLQKICKCIKNTFFFFVFAYKSRDFYLHILALSAYFMHILPFFVKYFPIFCIFCHFSSNIFQFFAYFAIFRQIFSDSNISIF

SEQ ID NO: 143134 - protein, 96 aa, Heterodera glycines
MESIENGIPIIAKGRENGIDAKQVIKPVAGPAEATDISTKQQRMPRMQVAATPPTEKPKTRKRKADLSFDGMRETDAESEKGQSEKRARNFIRKES

SEQ ID NO: 143135 - protein, 304 aa, Heterodera glycines
MDDSSTLIDRDEVMKNFKENLSFVNNKYQIALPWNDRVAQLPTNYHQAKARLISLIRKLRTINLVDEYQAILDEQQQNSIIELVNSDHSCGPVHYLPHRAVIRTDKSTTKIRIVMDASAKPKSTPSAPSLNECLHTGPLLLKDLTGILLRFRRMEKVILADIEKAFLQLGVREQDRDATRFLWLANPKEANLEQLKREDFRVFRFCRVSFGLTVSPFLLNATIREHLALHDTDVAQRISDNLYVDNIMVEVKPSENSNQLVTEAKIIFESAGMRIREFFGSHIDGLKELLTHPNWPKTSKTQRC

SEQ ID NO: 143136 - protein, 834 aa, Heterodera glycines
MSLEDHNYCGEMGGNEETPTKRRKRNDDDREQKFQKNCIRTLSADKQYNQNFKVQSVKSTFVIENLPANPESMLRALFAHCMSTALDESQQNGITPDQLGATISSDLLNPSIWIPIRRISDNTADSIMNRFLEVAQSKSREGSLWGSPFTVTITTLDVAQLPQRQQVRGSGKRTANSVQHIVKESALLRINNNDDAYCLFYALETSRKYHIKEMSRQTFSKYINRQNGRRLEDVFGLMSSANIRTDLREYDAVVYVPIVVDYWNRKYATANQRFKVFIFGATGSYRPKFQYGPDNYNVEIPLYHHNGHFDGIRSGVGKAVFGRDYYCFSSCGKDFMSQDCFSHHLSSNVCRQFKKCKQCGVVWNVKQNRRKGRSGHVCGEKFCYTCKCYHKPERGCFIQQLKARRPTKYRLIAFDCETTQNTRIEGDRRLHSVNFISCYVVCTKCINENLWRNSLQAPCGICGRQRTVTFSHRAYERTQTDAQFITPCPMAAFAQWLLSEFDPRYPTMLFAHFGGRFDNIMLFRQFFLNGFCPQMIRRGNKLYEMKIARGEKNPEIIVRDSWNLMPVPLGALPGAFGLNVQDKEFFPHLANVEANYGHILQSLPPKADYLYGGMTPDRQRRFDQWYAEHRHQQFDLCEQLAAYCTNDTRILIEALVAFRTEFLTISDPLERHGCLDDDNDDEEEEEQDDDNAFEVIGGGIDITWEPMTIASASMRHFRLNHLKRDQLAIVPECGYDTTNTQSLVALKFMDWYAKKNGVSIQTAHSPGGEKKIGQYTVDGYIASTDTVIEVNGCHWHAHDHPRHRFQPQTVMANGKTAQRIREDDARRMAFITSQ

SEQ ID NO: 143137 - protein, 224 aa, Heterodera glycines
MPRPSTCADSGGGMMTTLTARPEAITFDPQQSALIVVDMQNAYATPGGYLDLAGFDVSTTRPVIANIQTAVTAARAAGMLIIWFQNGWDEQYVEAGGPGSPNFHKSNALKTMRKQPQLQGKLLAKGSWDYQLVDELVPQPGDIVLPKPRYSGFFNTPLDSILRSRGIRHLVFTGIATNVCVESTLRDGFFLEYFGVVLEDATHQAGPKFAQKAALFNIETFFGW

SEQ ID NO: 143138 - protein, 102 aa, Heterodera glycines
MIKNIAPGIFDLRHLTALYLGNNLLQRIPPEIAKLSNLSLLDLSHNKLRSLPSEIGDMISLCHLYLNSNQLRVLPYELGKLFRLQTFGLREYSMALIGNLFV

SEQ ID NO: 143139 - protein, 84 aa, Heterodera glycines
MEIFDEFIIIGEKAIGKFAITGKSSHWEMIEFVELEFTSVTTDFNQALEIADIGNASSNPSDLEPLAQIVRWHWNQNGTQQISE

SEQ ID NO: 143140 - protein, 105 aa, Heterodera glycines
PGLKCPAQAKKFFYFREKIEIFPKKIPVDRARKTMFWKWSPFFWENSLKNPKIQKPKNRFLGLARKILKIFEILKSEKIELIELYNKSAGHPALRSNPNELFAWY

SEQ ID NO: 143141 - protein, 268 aa, Heterodera glycines
SKNIAILPRRDSDLEAFSHNPSDGSFAPLVYRPSTTKCLNLRFLSYAGLLLATGLGKTNLSHDGLNPAHVPYWWVNNPTLGEFCFAMIGRADIEGSKSDVAMDAWPPQASYPCGNFSDTSCWKLYTLKDRATLSRSVFVLKIRIKAFAFLLYERFPSSLSSLGHLRYALTDVPPQSNSPPDTVIRGSPGHRVARLNTKMDRRTPVLPIKGIDESSGISLAPCGSHLCYTSHDSSQSQTRVKLNRVFFPAFAKPPLLGSLDSRGQWESR

SEQ ID NO: 143142 - protein, 143 aa, Heterodera glycines
MDTDIETIVRGCSQCQQAAKQSPKQEPLQPWPATTSVFERIHIDLAGPCSDGNIYLVVIDTFSKWPEVFLLRQSSSQAIIDQLQWLFDRVGIPKTIVSDNGPQFLSQNFKNFCTRNSIKHIFSSPYHPQSNGAAERCICVMIY

SEQ ID NO: 143143 - protein, 20 aa, Heterodera glycines
MIEALEKVFKKAGMMRNKLF

SEQ ID NO: 143144 - protein, 103 aa, Heterodera glycines
MFNFLKLLFYETVTDGVNHATTNLSVEVLDVNDNGPQFVQPYIEIERSMDVPIGHILTKVEAIDGDMSKHNSQIRYTLESAAAFQNLSTADLDWLSCGQNNGN

SEQ ID NO: 143145 - protein, 18 aa, Heterodera glycines
YREAIPEGFGLPINLGAS

SEQ ID NO: 143146 - protein, 95 aa, Heterodera glycines
LFEYPKRTLEKIDFFVFGAVPPNRCAQIYGETESFRNSFPIVCTLILRWIFAPHNCLSTPNGHLKKSIFLFSGQSPRTDAPRFMGRPNPSGIASL

SEQ ID NO: 143147 - protein, 52 aa, Heterodera glycines
LHNFGDPRHYGHLQQSVAARCVLGVHICAAGQSAQKTANVTAFDAVNSVDRM

SEQ ID NO: 143148 - protein, 73 aa, Heterodera glycines
MHKYQPVVSLFRLVDRQAMHLCSFEPPETQFIAVTAYQCEAITRLKVEHNPFAKGFREGSSRKRTLSPSPIFA

SEQ ID NO: 143149 - protein, 159 aa, Heterodera glycines
MHKYVSPTVLFDWRRNFFQISATGFARESDHLQQFAGLGRHVYWYNWAGTRLAPMGRPSFTRAVGPVKYMVLASFDVNYTRREQMVNIRTEEKLTLSSDVHQRPDGGFVSSVKILRCPAVFTEANVMSWLRLPHRCLRTEEPIGLRTEKDNCGSTTAEP

SEQ ID NO: 143150 - protein, 21 aa, Heterodera glycines
KSAVVTQQWKKSYWLNSKKKK

SEQ ID NO: 143151 - protein, 33 aa, Heterodera glycines
MVPWHYTVPIGHRPIPLRMCEQRNGVDDHHPQQ

SEQ ID NO: 143152 - protein, 89 aa, Heterodera glycines
MGITIIKCNYWIINVLSCPALHEHELSWPMTAYGQTAQVACPPGTYGHAEWHCSAKTKRWNTEEGPNMAKCTSEWARDLRREHKDDETG

SEQ ID NO: 143153 - protein, 360 aa, Heterodera glycines
IFQTMLGTGLLSFKLAFKYSGIWLGLFLLICVCCILGLFLLICVCCICTFTCRQLVNCSQFFCQRKGREMMDYANVMRSAIECGPPWISERGYFFKQLVNSTMFICQLGFCCVYFVFMFFKQLVNSTMFICQLGFCCVYFVFMADNVKQFFDETSQIHISQFFDETSQIHISQAGWIALLLIPTMALCLCTIRQLKVLAPLALVANLVYLGAVLIILEYMITHLDSIDELPAVGNLSDLPLFFGTVIFAFEGIAVVLPIENQMDQPHHFISPVLPIENQMDQPHHFISPNGVLNTSCLLVLCIYGTMGFYMGFYGYLAFGKNVKDTVTLNLPSTPFYQTIKNMLVSQPFYQTIKNMLVSQ

SEQ ID NO: 143154 - protein, 335 aa, Heterodera glycines
SHIIGDRECQVKVPFSKNALSSKIFVGRLQEGVTPIELKKRFMEEAQRIDPDSSVTDVYIPRPFRSFAFVTFSTPIVAKELIKIGQVDFKDTSVSISSAHSTRPQDSTVHSVHHHSSFIPPHPHNFVPEDDSYSTSELYSNYGTNTKWEFDEMASMAMPKHQLITSTPGIQQSRTAGPMFSGRLSFLSNRIDWSTLGSEITHFILHFYPLISGSVQQHLNQPFSAHNQQHPPIAAGSQMLNQLETLNLNNIGMPQEVVNAAIKAIVAAAASSAAHSHGDPSHSQRASSSHLSQQQFVRYQSLSPPQPAVPASSAPMSRSPMYSQQMTYRQQNGRG

SEQ ID NO: 143155 - protein, 120 aa, Heterodera glycines
MDRRSGAKNEAMRSGVTKRQQGATKQKRMMGKEAPVGTPSAVGTAQREREEEDTTGRIVDLLVMGLPFELSEEQLRAHFESFGKVVHCEIKTQKGHLSNRGFGFIQMADLEAQKRVLKHK

SEQ ID NO: 143156 - protein, 130 aa, Heterodera glycines
RSLPARSAHPVVLFRCDRAEPMFNPEFPLDKYELDSTSPLVQNMLSRREPNLCWQVFVEGSFKQPGIGLPFGYLKVSSSSTVNLLVMPYNYPDLLTLLAQAKEGPEMIASVPFQQRFDKYLNTVPPYYYT

SEQ ID NO: 143157 - protein, 55 aa, Heterodera glycines
RKFTLISDPEKLVVIFVDGPAETSDDLPEDWIHLWNEAALKSPELGFGTVTGCWI

SEQ ID NO: 143158 - protein, 141 aa, Heterodera glycines
MEKEPQVFNFFKQNWWKLKKVEPNANAAGVSDSFSKDAEEEEDKDKEEAVKEMPGQPKKNWWKLKKAEPNANAAGVSDSFSKDANEEEDKDKEEAAQEMPGQPKKNWWKLKKAEPNANAAGVSDSFSKDAEEEEDKDKEEA

SEQ ID NO: 143159 - protein, 154 aa, Heterodera glycines
MSGRKCPKMALKKWAANVRGANVGPQKTDRNCRFWLVAANVVTRNQQQKKETAKGEEKEEKMGGKERKREEKKEQQLKKRKKKIAAEHHQKQQHQQKQEHWKEERRKRKRLNTSRNNNISRSKNIGRRRDGREREKNGGEKGAATEEEEKENCS

SEQ ID NO: 143160 - protein, 257 aa, Heterodera glycines
ITIPCHQTVNANGEQFTAYSIHMAGRHLGSRRYSEFLQLNKLLKEEFPDFPFPKLPRKWPFRHSEQQLDSRRRMLEQYLEKVCAVKVIAESDTVQFLMEDSGGFLMEDSGGALSAPFVDVSLLIVCGNTLSLNIKRHSDTREVFGRVCEELKLGTEAAHFCALFEVIEDSFARKLHDRECPHNIYIQNYSSAASSCLAMRKFCFDVEKEKQLCEKDKLFRSIFYQAVEDYQAVEDVNNGIIKGGERLYQLKHCKGTT

SEQ ID NO: 143161 - protein, 18 aa, Heterodera glycines
MELVLKITKLELKNKGLQ

SEQ ID NO: 143162 - protein, 145 aa, Heterodera glycines
LNSIDSYGLLPEAIAIGDDLAHTEKRWPTQAIVLHTFERQVYFDWVNNFKKQFLRANAISSVSYQIHFTVHAPSIVTFELVNEWTKEKLTLAKAKELDNRWIMKRCKIGEAVTVQQQKNDENWDNNWCSFCFLVALIVLGSSENP

SEQ ID NO: 143163 - protein, 64 aa, Heterodera glycines; identical to SEQ ID NO: 129150

SEQ ID NO: 143164 - protein, 155 aa, Heterodera glycines
MAFLHFLTPCGHFVLTCLFVSLGLVFVPKLLFIYHWPELTKEEQQQSTQRQLLEVSAPNRSEQLRYQQLLKENAEIKRQIELRNLRIQECRRILEGHITLINPLNKAKNSTVRRRQKQQQNNNNNNANLGNNKNANNNNDNYKNGSERGKRSDKK

SEQ ID NO: 143165 - protein, 160 aa, Heterodera glycines
MDPTTTITLLEPTTTASGGEEFDEAPPNYTTEESEGGGIAGENVVEFASPPRIGKGNAGGEQRAIARHADRPPVEAEEERERGGRAATRGGEDTGGTKIGGKWNGKMGQKCLFVIPGVCSDYEEEEDEADGEGSGEKVELMSTESDDANWPNGDEEEILL

SEQ ID NO: 143166 - protein, 71 aa, Heterodera glycines
MLSPMLLLLLPLLLLSLMPNILSEARPQWLFGSGSYADAMTSGTILDNLCVLVVFRKLLFDLCYGQLRKAK

SEQ ID NO: 143167 - protein, 229 aa, Heterodera glycines
GDQQQQNCEQLVTLFEGMNKFFREEAIIQGSEHSSVLFGILILSAYILVIAFGAVGFGILILSAYILVIAFGAVGNILTIFVVLRNKQMRSVRNFFILNRSVRNFFILNLAMSDFFVCTVTAPTTLYTVLYVFWPFGTTLCKIAGSLQGFNIFLSTFSITAIALDRYFLVIFPTRHQCQQRLSLLFFSMIWLASVLLAAPLFLAADLRPVFQQKSCQIELNLCSEQNER

SEQ ID NO: 143168 - protein, 19 aa, Heterodera glycines
FSNFVGLGRALRDRFLNLF

SEQ ID NO: 143169 - protein, 45 aa, Heterodera glycines
MHIAPLELHPLARLVQGRYHKMHCLCVASWDHVLVRVLTLLAQLG

SEQ ID NO: 143170 - protein, 23 aa, Heterodera glycines
CYDFCPVQATAIKSVPVCIPTEA

SEQ ID NO: 143171 - protein, 193 aa, Heterodera glycines
MVQEVWNSDRRGRKGFAEPAKVRLLLGKLSDEEYNKYRDSIRPTQPDTVNWKESIDKLKAKSDHHDMRQKCLKMLEEAEKSGARISLGQIEEELKTMQLIKDSALALLSPPISTNAIQLCPQQWIEPKSKKGNYNSGKTTANQHTTGGKANQRNPTYPCGACGNSDHWRSDCKQSGRTLVERRTESRSNSFSL

SEQ ID NO: 143172 - protein, 70 aa, Heterodera glycines
MLPNSSSILLLHNLRKQSVNALPLGRQAVHNDVQFPNFDAYRNELTKDPAQPSHVTEDRRKGVSSFIFYG

SEQ ID NO: 143173 - protein, 144 aa, Heterodera glycines
MPKSSLSFSHCRITMPALALLIPLSLIAVSNARVFTSMADLLDEQHHQQLHLPLWRSASGLAPSFSPFRSPPAAALSAEPTDDEAEETEEDSPISVPATASGEAKQKRRLVVRVPFAQNPDNLHLSRKWSKENPIQLAKWLTGY

SEQ ID NO: 143174 - protein, 18 aa, Heterodera glycines
YREAIPEGFGLPINLGAS

SEQ ID NO: 143175 - protein, 148 aa, Heterodera glycines
MMRAKKVGARISIMIINNHENDQESKGIAKVSDLLIESTRIIARGDKLPNGVKLPNLDSGNEDGSATTEERSVALPPAHFQRGARRPRLQPCQVHTHGHAVRPTVGPRTDPLAHPPGTKRRNSELHAVRLARDNFSALHADQSGARRS

SEQ ID NO: 143176 - protein, 58 aa, Heterodera glycines
SKPRKNGLSKNRNYAQKASQTILTLPIPSTIAFIHPIMSAKIIRVPKIACDLSLEKMV

SEQ ID NO: 143177 - protein, 79 aa, Heterodera glycines
MKFLSTKVLLGDWSRGRAYARDILNDLRNWVVGWTDWNMCLDLEGGPNLARNFVDSPIIVNARAGEFYKQPMFYAMGHF

SEQ ID NO: 143178 - protein, 94 aa, Heterodera glycines
MEKRKYPNNLMNYCWGRGPKNKTKINNKKEVVSSKVEKKGKQSDHSEERETLGEWKEKDNDGCVATKLANYDAPKSKGYDLVKNVNLLANDFGA

SEQ ID NO: 143179 - protein, 30 aa, Heterodera glycines
KTTDDQQQQQMDTALTMMRGNCGSQTIGRM

SEQ ID NO: 143180 - protein, 80 aa, Heterodera glycines
KGSVRFVSAKRRSQPPVDGRASEGPWNFARQFRREIGAAVEMIGQIEGRKSDEAKDGPTKDPFINCVQFLSKVLINFIII

SEQ ID NO: 143181 - protein, 86 aa, Heterodera glycines
MPRLILVLKEEERIAQDKVRTYELDPTSGLNLQPRRRTYYNNDVAIRTLVTRFDALANPEPDQIVHHLRALQYRLASNGFDNLIHE

SEQ ID NO: 143182 - protein, 95 aa, Heterodera glycines
MIPTQDEFRVEDLFKKIASYMDQTVRKCPSANVRPQMSVRKCPSAKVRPQMSVRKCPSANVRPQMSVRKSPSANVRPQMSVRKCLVAKKRDAVFR

SEQ ID NO: 143183 - protein, 86 aa, Heterodera glycines; identical to SEQ ID NO: 143181

SEQ ID NO: 143184 - protein, 87 aa, Heterodera glycines
PGLKCPAQAKNFFYFREKIEIFPKKIPVDRARKTVAWKWSSFFWEKSLKNPKIQKPENRFLGLARKILKIFEIFKNRKNRAPSSSSQ

SEQ ID NO: 143185 - protein, 78 aa, Heterodera glycines
MGKDYYKILGLSKGASEDDIKKAYRKMALKYHPDKNKEAGAENRGDPMQMFAQAFGGPNGMFSEFTFGGGGGGPEVEK

SEQ ID NO: 143186 - protein, 38 aa, Heterodera glycines
MAMTFVNTLFARFIFPLLNFDAFAIGFFVIQLVEVRRD

SEQ ID NO: 143187 - protein, 84 aa, Heterodera glycines
MLTNIYGTDSFTQAVQDGPHAGQTVEHVHVHVVPRKASDFGGDMDRFYTELQGHENERTARSATEMATEAKTYRQWLAENSGKE

SEQ ID NO: 143188 - protein, 49 aa, Heterodera glycines
MREFQPPVLWPKLCWAPLVINSSPAHSLFHWVAPVVMCPFLCSSDAKMA

SEQ ID NO: 143189 - protein, 69 aa, Heterodera glycines
MCQFVCPPERRPVQPFDGQIVWTLLAQVVRHFFLNAQNVPGLQCRLNELAKNGDRNGRHWRNRGKVANK

SEQ ID NO: 143190 - protein, 51 aa, Heterodera glycines
MSPVAISVLGEFVQPALKSWDVLSVQEEMAYDLSQQSPYDLTIEGLYRAAF

SEQ ID NO: 143191 - protein, 28 aa, Heterodera glycines
NCWPGHRTDTRRFHCPSEDSDCGRCEKG

SEQ ID NO: 143192 - protein, 93 aa, Heterodera glycines
MPTISVKKRLLDKHLRVSLSQQQVDDLCFQYGLEVDDVVSAVRPFVVGAILRDVHFDADAYASFIDLQDKLHQNIGRKRTLASMGTHDLDTIK

SEQ ID NO: 143193 - protein, 332 aa, Heterodera glycines
PSKDGRQHGAGGDVPTVYKAVNGTTFDRAELERDPALGQIQEWSFPIFRLAEKHKRTVLSRLTYAIFKEADLFRTFKISYTKFFNFFHALESGYWDIPYHNRIHAADVLHGTYYLTYHSSELEDEDELEEDEEANNDTATDAAYSTEQPLTNHNGQPTTSTTNGGGRHVLRQQQSNTATGATHRNCEAHPQQQTFDSAAVALAQSMSPLELMALYTAAAMHDYDHPGRTNAFLVASEDRKAILYNDRSVLENHHAAESWRLLNSHAQFQFIENLDSAETKRFRYLVLEYILATDLKQHFDIIMQFNERVPDMDLNSESDRVLISLMLINLRT

SEQ ID NO: 143194 - protein, 144 aa, Heterodera glycines
MLFPAFAEVDEYDRKGEKADENCKASCLQYYFFHGHFSCWKPSHAHTIQNHGGHHGGGIATNFSNSLPQRINLYEYEDELHGEQQQHVEQIAPNDMAWKEQQHNEVGDQHKQQQRRRSQRLVNNNEDGGEPSGQAVQQQQQQQR

SEQ ID NO: 143195 - protein, 283 aa, Heterodera glycines
MKAMGMTTRGKNGSWQMNLGIYLSEHLLSPYRKKRTVSITVPNSLVMVLELGEESLKHRLNRLKIEWKKHGNLDVINSDIKSIFIQMVIALRDLHRFAIHLALKSENWLYVNRNGEKMLALIDFQTSALIQTNGTIDNSSKIKRKELRSFICKTFVGRTHLPRTRRFASPEHNKFCESHGKNKLDVQTDIWSLGISLLEILAYTPQIDAVFDFEFSVEEKRKFKILRNSFVEENENKNKQFAEKAKMAVSEYFPNFSVLIKQMLTTDPKNRPTVDELLNEFLD

SEQ ID NO: 143196 - protein, 57 aa, Heterodera glycines
MGHNSEVSRTMFEIGTSGSKNQIFGSKTVLFYNLFNQKIKYYASSHSLPILTLLEKL

SEQ ID NO: 143197 - protein, 21 aa, Heterodera glycines
MRTRPIWQVKQRLLTSQKKGF

SEQ ID NO: 143198 - protein, 53 aa, Heterodera glycines
FLRQCGRCAIGHRGETAERSGKSFRFERQRSENARTDHTSGDQSGEAEEVIGN

SEQ ID NO: 143199 - protein, 77 aa, Heterodera glycines
MGRTKGAEGAVSGEEQQVGQWQQQQQHHRRARLWPNGRRDLGILSSENNNTAARPSKSKSFPFLFSYRSNLGEQIKK

SEQ ID NO: 143200 - protein, 257 aa, Heterodera glycines
SFNASSFLSSSSSKLSPRVASECFYRGAFYHFFEGGPRSPLFPGRSDGKTFKDGDRCVEAGRYCKRSPELDFWYPCKERAESANASAFEGCYFGRGFWYPCKERAESANASAFEGCYFGRGPLQLSWNYNYGQLSWNYNYGQFRHFLRTEGVEVDLLQQPFRHFLRTEGVEVDLLQQPNQLLTRLDPPLAMLSALWFFYNTPQPPKPSMHEIMTGQWIMTGQWVPSKRNRRIATKDQCLGKWQLKGENKAFRTDLDQ

SEQ ID NO: 143201 - protein, 64 aa, Heterodera glycines
MSSSINDLANETMSLIFQYLPPNERVRIERVCRRWCFVSRELSWYNQKTLLLDGQELAQNFDLT

SEQ ID NO: 143202 - protein, 91 aa, Heterodera glycines
MGDKPMVKGGNEQQTEHNAKRKEGTDQRGDGAKPKVEQRLRTEKRLLKGVVDERIPENSLTNGRPFALHFPRQKRTNYERPKSRAPKEKPH

SEQ ID NO: 143203 - protein, 96 aa, Heterodera glycines
MEEKGGEVKKEEEKNGGRGRKREKRGTEGKRRERKRREGREEVKIKEEGEKKKRKGIKSAENGWRGEGKKREVTGREGMGGEERKGKKEENQEERK

SEQ ID NO: 143204 - protein, 43 aa, Heterodera glycines
CFAVPRTGRQWMAFNLQEIRLAISGCKKLLCKELFFEVSQTPY

SEQ ID NO: 143205 - protein, 123 aa, Heterodera glycines
MGNDDAVVQEFLTSMKPEESEKGEGLERKLSQQSAALSSFSETKEAKSKGTTQPEKEAEEKQQNGETKGKGLIEKEALFTGKVKYRVFASYSLHEKMLRSILRSPIAFFDITPLGRILNRFSK

SEQ ID NO: 143206 - protein, 94 aa, Heterodera glycines
MSATVAKLTIRRLGQLIRINYRFARLIPRVFDLVMFVRGQWLRFALFVQRFDPEFVVALVLQSFELQRRFARPDLANRHKFATAINILGKNIFK

SEQ ID NO: 143207 - protein, 71 aa, Heterodera glycines
DVDGGGKFVPVGQVGPGETSLQLKGLKDKGNYKFRVKALNKEGESEPLATDKHYQIKNPWDEPGKPVINSN

SEQ ID NO: 143208 - protein, 67 aa, Heterodera glycines
MANLSNSGNDTFYLAFKDVHPSWSLIGCALTYGTIALIGTIFNFSVIFVTIKTKYEMILFVRNYNFL

SEQ ID NO: 143209 - protein, 71 aa, Heterodera glycines
MRWHTDNDRNVSSAITQIIRAIQTNLVKYKIGPIDAAPMFKGIEIITWQNQCVIGEEIMGSKSKNTIVVNQ

SEQ ID NO: 143210 - protein, 63 aa, Heterodera glycines
MEDKAYNQNTDFLRPPARGDRTPKVVKKPVSATMLSNDVLICGWITGDQTPNRCPVVLCEDEE

SEQ ID NO: 143211 - protein, 110 aa, Heterodera glycines
MADHDHRSVPDQDHHLSRPVVSSSLISLFILLSLSLLLGRLLSYFFIPFITGPILIGILFTNLVSFRSLFHYFPHYQLSTLIYEIAFLLIIIRSAFGIDQSTVRQFYVGF

SEQ ID NO: 143212 - protein, 39 aa, Heterodera glycines
LIFLNIGIFKEFNLLNKSRSLGIRPDNINGIQIPVLSGS

SEQ ID NO: 143213 - protein, 92 aa, Heterodera glycines; identical to SEQ ID NO: 125147

SEQ ID NO: 143214 - protein, 92 aa, Heterodera glycines
MIGRAVRNRPFIFEGIFKFILYPRKMAISFFEKFYTSQKRLRMRRRAVHNRHFISQRIFIFRGYPRKMAISFFDKFYTHTNTIEHDREGGAQ

SEQ ID NO: 143215 - protein, 48 aa, Heterodera glycines
MPAEYRIWQDEKRRYRSLCQLLNDFTTRAAFESNSDLKFKWACFSLLK

SEQ ID NO: 143216 - protein, 335 aa, Heterodera glycines
MLDPEYVKSQIKKLGGASPVFEQQTKKRKRSASSASSIATISHSVSSANHRNSTGAAKKQSTMDKWLVPKSKLVAAAAAFTKRSIGGVGGQGIGGGCGANAKLTKSAIDASGIGTEIGAVDEAQMKKRVRKSPRISPATIDQKVETKRRNVKPIGKVTWLDQPSTSHEDSSHSLMPSSSAKFPSKSDVQWVPNSSGQNMPNSDVQLVPDSDVQFVPKSDGQQVVPPTTGGEQPMGTATSAVALLLNEAPEPSTSKARRDRLLREVFGHRKFRSSMQMQAINAVIGKTVDVFVSFPTGAGKSLCYQLPACFHSGLTIVFSPLLALIQDQLSALRAR

SEQ ID NO: 143217 - protein, 58 aa, Heterodera glycines; identical to SEQ ID NO: 128482

SEQ ID NO: 143218 - protein, 168 aa, Heterodera glycines
MQMVRPAVERMDEQVKNTRKSQLFLANHIDQTSESGTSIYAKLQVKYSRRAKFTPRVARPWRQRVIAWAGPDAFSRDRFYELDSWYKARIQRPELLPKLHIIDPDLIVDNYESKIQRKTRGREGYIHLYFEGRKERTLDIGFRKNEAAPAKVTEEAMQKLEELSAMNQ

SEQ ID NO: 143219 - protein, 155 aa, Heterodera glycines
MIFALNCGLMAMFCAAFDRLFAVVSPFKHSSIFTKYKLPYLLSHLLICVIYGAFTLNYVLAFAFENAGNPTTGVVAETFLGPVGHKFFAGTLIISFCSTYCYVAIFVIIRCKKGVTQQTNTRVLRSLVIILSINIGGYLTNLAIYQLLYAFGSIL

SEQ ID NO: 143220 - protein, 60 aa, Heterodera glycines
MASINTSSNDPLYLAYRFAGPSADLIVPAVALYLVVLVGIVLNGTVLVVTVKSRQMPWHF

SEQ ID NO: 143221 - protein, 33 aa, Heterodera glycines
LVDPTKTKPCFDKFSAYVKDWLSCVDAKLVKES

SEQ ID NO: 143222 - protein, 123 aa, Heterodera glycines
MKRTGGRPVQILVHLENPDPKPVNLILASSFLWDPGNPSVDNPLTDNPSVKDNPSLRDNPSTDNPSLRDNPSLDNPSTDNPSVKEKPSLRDNPSVDNPSTDNPSVKDRQSIIKGQSVSRQFIK

SEQ ID NO: 143223 - protein, 39 aa, Heterodera glycines
MTNGKKGAEVIVRPLANRATNAMGTENANGTMALGDGAT

SEQ ID NO: 143224 - protein, 56 aa, Heterodera glycines
QKALKNVMCPKKRTQNKCGDTKGIVRKSNERDRRRLSSEIAALQRPLSASAALSPT

SEQ ID NO: 143225 - protein, 79 aa, Heterodera glycines
MDSAAYSYLLEQHLGGVCPEDIQDINTYSQHALMRPVQVDEEEEEEEEELVEDHDVERRQHHYQQQQQRKYWVGQQQQK

SEQ ID NO: 143226 - protein, 45 aa, Heterodera glycines
MFASVLLSEKRIRMDHDAGYPEPCKCPAQQCIMAPASSKLLLFFG

SEQ ID NO: 143227 - protein, 146 aa, Heterodera glycines
KCVSKNRNYAQKASQTILALPIPSTIAFIHPIMSAKIIRVPKIACDLSLAKNGVSKNRNYAQKASQTILTLPIPSTIAFIHPIMNAKIIRVPKIACDLSLAKNGVSKNRNYAQKASQTILTLPIPSTIAFIHPIMSAKIIRVPKIA

SEQ ID NO: 143228 - protein, 240 aa, Heterodera glycines
MATACKLEMSLDEIIKANKSKTNQASINGRKTQMTGKRLIRGNIAKGKPFIRKQINGQNQTKRFIANSARRVRTIMLNKVSPRSRVITRQRQRIVAVQPQQQPVFVQRVVRGRGPIRYASDAALVPQTMKMVPKRRFRINPMQQQQPVLLVQNQSPKRRFPSFSSMSVRQHVNALRRATTVQQLQTQFVNQQLPIRQQFRGRQAITTPVMPNRSRGKQQFILDQPVQAGPQFMVRVCRDV

SEQ ID NO: 143229 - protein, 63 aa, Heterodera glycines
MTTIRACALEPLFDAYCVSARQILSNIKVKRKLWVNIQTDELKTNECETKTPNKGLSNDPNAY

SEQ ID NO: 143230 - protein, 97 aa, Heterodera glycines
MDVECHAPTPSTSASNLNEPEILANLAAFESNFVSVISEQLGTDILPSSSSAVALHVSSLIRNVLRLARKFQRSARRKWLSSEDVEAALAYYGHTVI

SEQ ID NO: 143231 - protein, 168 aa, Heterodera glycines
MPRRFSRAAPGPPPDMPPPPMSAAVAPVLRPPSAASMWGAIPDPPSAPLPPPRSTLLSEFAVDARVGDPPVPPPPPPPQPEPPPPPEPPQPEPPQPPPPPPPPPPTPPPPPHPGIETACANSDSHPKQSFIFFKKKYGYGYQKFGGPPTYALPPPQTAATHFLNIFSE

SEQ ID NO: 143232 - protein, 92 aa, Heterodera glycines; identical to SEQ ID NO: 125147

SEQ ID NO: 143233 - protein, 92 aa, Heterodera glycines
MIGRAVRNSPFILEGIFKFILYPRKMAISFFEKFYTSQKRLRMRRRAVHNRHFISQRIFIFRGYPRKMAISFFDKFYTHTNALEHDREGGAQ

SEQ ID NO: 143234 - protein, 86 aa, Heterodera glycines
AQPTAQLQPPSVVAPRSRNCILAHVLMLRAVLRLHHCFFFICVIVPLVLFRLRLVVVVDQLLHQSRVRLGEEQRKERKCQRADGQT

SEQ ID NO: 143235 - protein, 105 aa, Heterodera glycines
MAFHSPSGQCAEGVQMLAFASASSPVNFIVSICIPLPFADSVLLFDLTNGFTHEQLTLTWMNDIGRFLLIRRPIVRDESKWAKWEKDAIGWQFYDQWNRIDIWVS

SEQ ID NO: 143236 - protein, 186 aa, Heterodera glycines
SSAGGYESDEHSLGSCSAEVAAINAADQQRRRRHNQQQQQQAKKKAPAAPALQQKAVATVAATASAVSSKAAPQHQQQQQLYAKQANVNGTAADRPMLPQIVAAPSCATSRPQPFRPQPQLGVLPPALIAAAASTSGYGDQQQMLQKVPSIEQLRLMRSSQERAGSQVKQQISGGVINLGQIYVID

SEQ ID NO: 143237 - protein, 25 aa, Heterodera glycines
SKSSLTTAQKNMFFVRFRPRGSQEK

SEQ ID NO: 143238 - protein, 203 aa, Heterodera glycines
MASSVHSQDGFRPAASCLSTLSLQRIGLMGGSSGSGAFHSYTPTTAQQKQSSVPFQPQPQQHQLKGSIQSLPDSALCTAAAAAGLKGYGAAVYSRQQPSSFGTGTTVMAQQQQQKQPVNGITTNHRQFATLARMDSSNSRPKQGAGGGSSTATKAAATSNCLRPTAQRLLPTAVTTTATTAPADHASAIDALVAELELNTADT

SEQ ID NO: 143239 - protein, 203 aa, Heterodera glycines
MQTEVATRTKAAKIGGTTVVTRQQLPSHNFTNRPAQQENGSSNRSKPLEKLNELISMDDESSTTRRHRTAQQQQQQSADSSAPAPSAGGNRPFETINQEKLNPSKVDAMARMFNGKQQQQSATTAATSTKPFTSGGSAGNNATSDHQGWATRRAATIGGRAAAPAVPSWSVGSTTARAWRQCAAIAYKWTPRATGDGHDGTAA

SEQ ID NO: 143240 - protein, 61 aa, Heterodera glycines
MPIDRFPKSEKFLDLRTGANRKSSDRQATSPPQQQPQQNGGIGNRLKQTIFGSAIRRRVPT

SEQ ID NO: 143241 - protein, 163 aa, Heterodera glycines
MFLNLLLLLSLSCICQAEVLNSMKMMELARLAVPFANNANPNKHLFMEWIDKYAFRLLCQKNFLEINAKNYFVSELSGWYELGKIQSNFCEAFAKGEISKVTEENWEKMTIKFANYFDETQKNEENIRKNIQKINDKFVKFFGKETDNILDNVFDALKVIADI

SEQ ID NO: 143242 - protein, 175 aa, Heterodera glycines
MSRHREQQMAGEDAAAFAAIHSKNDAQQQHIGKWLFYALLMLLLLFSGYTLYGDRRLRLAGNKTQQQQSVEEIVPQIHGKPDREQLLKLKPSDELHQTHLAQPGTPKKDIVMDQPELHLTQSLHPSPPPPRGEVPIVDEISAQPQFIYHTTTPYSFYEHFDRAGQSVWELIRITF

SEQ ID NO: 143243 - protein, 19 aa, Heterodera glycines
TFAFSSLALPNTHTIFEML

SEQ ID NO: 143244 - protein, 19 aa, Heterodera glycines
TFAFSSLALPNTHTIFEML

SEQ ID NO: 143245 - protein, 19 aa, Heterodera glycines
TFAFSSLALPNTHTIFEML

SEQ ID NO: 143246 - protein, 19 aa, Heterodera glycines
TFSFSSLALPNTHTIFEML

SEQ ID NO: 143247 - protein, 19 aa, Heterodera glycines
TFSFSSLALPNTHTIFEML

SEQ ID NO: 143248 - protein, 19 aa, Heterodera glycines
TFAFSSLALPNTHTIFEML

SEQ ID NO: 143249 - protein, 19 aa, Heterodera glycines
TFAFSSLALPNTHTIFEML

SEQ ID NO: 143250 - protein, 19 aa, Heterodera glycines
TFPFSSLALPNTHTIFEML

SEQ ID NO: 143251 - protein, 220 aa, Heterodera glycines
MPNFLMMKYQWCSEHLWSELLDSNAIKKLRVLLTEEINYLTPPEFLSSSSSEKELFWETQNEFEGEREESCAKNGQTVKNEQSAETQNGQIAKTESEIWQMIKSTEKNLANEKKNDQRKRKKVYKKSQKNEQNSMKIEKDGEKEFKQTPKQKKDKVSTGQNVTNGTVKNGKIKGEEAENGQKNKTNLMEIKEENSEEMSKEEKGTKEALERIGIERIFGK

SEQ ID NO: 143252 - protein, 212 aa, Heterodera glycines
MYTHSVSADSEPVLKMANLAILYIQSVFAVSIEAQLFAFLVFVHVGFVHLLTNLVVQILLGVPLELVHKYGRVGFLYLAGVMSGALLFFVTDREVYLAGASGGVYTLLSAHIANVIINWSEMQFNWVRASILSTLVTADVVIAVYQRYFSDMPNRVLGVGINGKVVECEHRTDGKKFALKILRDIPKAKREAELHFVASGHANIVNVYDIYE

SEQ ID NO: 143253 - protein, 136 aa, Heterodera glycines
MATVSSSSNNTCKPSESYSASKIPQCAETIKKMFHELGIKEYEPQLVLQLCDISYSLTKEILVDARSVSEFSGKKQMEERPRQNGSSKFNAINNFDPESVSNLLMTDKNATQRKRPYTNGEMQKHTQEEDYDDEYD

SEQ ID NO: 143254 - protein, 107 aa, Heterodera glycines
MTKNGAEFGPARYWDALLEREAFELNRPPANISEAADANEQVLQSHLVADDDFEEMDDDDDGEEDEQDETEVEGGGELADFDVCYFCCVHLSATFCLGHFARLRDRL

SEQ ID NO: 143255 - protein, 47 aa, Heterodera glycines
AMADQIIHRIDEMTQRVDSLEKNITEMMASDSALVASTSGTVDEDNQ

SEQ ID NO: 143256 - protein, 71 aa, Heterodera glycines
MMFASAVFGSMFRFDDKNSKTKTSADCPHVIEVPDVEAEAFKAMLSFIYAEDLSELNGQNAMAVLYAGENV

SEQ ID NO: 143257 - protein, 137 aa, Heterodera glycines
MTKALYRKATSTKESHPTYKEPSEWEKRSETVTKGAKKHRKCQCPKSFSAPGGSPGAVRSVTPAMLLPPLPSPPPSSPPPPRVRRPASARALTERPAKVNESAFPPKCSSHFTSSRTAEANRGNIGLSNDSKKVGFG

SEQ ID NO: 143258 - protein, 203 aa, Heterodera glycines
YRTGRLFGGLMADIRRKLPWFPSDFSDFFRGRLSQSLAATILLFFANLSNIITFGAIMERSFHHQIASIENTFGGALSGLLFGLFSGQPLNVLSATGPTLIFEKILFDFCTPLNVLSATGPTLIFEKILFDFCTTNHWETNHWEFLPFRFYVGLWMSFYLIILVATDASALVALITRFTEEAFATLISIVFIIQAFEKLFEIT

SEQ ID NO: 143259 - protein, 123 aa, Heterodera glycines
MLLLLRSSNPISEIIHLSAKHIKKRKAMCPINCDGQSTIGTDDADGVVVGTAAVAAADSAAVPSKRHPTPRVCAARHAPGPPQSSHCAASRTSTRRSRTASSPPVVMGEWQCVKKVRKDEVGA

SEQ ID NO: 143260 - protein, 63 aa, Heterodera glycines
MAPAPNAGSAGVDSNRKCQLFKEIFESSANEDGVLNVKRTDAEQQVKGTSTSNNLNVASSDDE

SEQ ID NO: 143261 - protein, 44 aa, Heterodera glycines
ETGNFKFADPVAGLEFKIFYRTGSGRINPANPAILHLKSAGSCA

SEQ ID NO: 143262 - protein, 26 aa, Heterodera glycines
QNEFINIFSETALKRTKFYLQVILGT

SEQ ID NO: 143263 - protein, 136 aa, Heterodera glycines
KLEIKHFPFLAGRQISQPYRAPTSARYGQWHKDQRAPTSARYGQWHKDQRYSQMRSGPRLIIFIVGGVTFSELRSAYEVTRTQKTWEVVIGSDQIITPERFLVNLRELSKKSGSDQIITPERFLVNLRELSKKSHD

SEQ ID NO: 143264 - protein, 18 aa, Heterodera glycines
MNDKKRIDWNKRVFFLAF

SEQ ID NO: 143265 - protein, 144 aa, Heterodera glycines
LLLVSEADCAEPTEVPSKFDGRLMVWHRMTFSFGNAKNCSEAVAQLKQQQNLWWQIWKGTNFLPHRDVPYMAQFDFLIANRKLINELKSFQFNVGILETGMGDFSMSILRAFPTIKKFVGSQSISPTISQWKYFGYDKIVGAMP

SEQ ID NO: 143266 - protein, 36 aa, Heterodera glycines
KRRDKKTGERERKRKRNARCASEASASALVDIKNLI

SEQ ID NO: 143267 - protein, 53 aa, Heterodera glycines
MTPNHRTNNAKEIREAIFATIDPKRIAENLRQFTKEPHVAGTEANKRVNEQKR

SEQ ID NO: 143268 - protein, 33 aa, Heterodera glycines
MAIPLNISAASNFLYFTSTEYRQAFRDKFPTKF

SEQ ID NO: 143269 - protein, 189 aa, Heterodera glycines
MLVANEAAKEFENYLTSNVFKNIYVQQNFYRIKMEGALQQIVTVVEKWSNGLAQLLISGSLLLHSHTIGSDVNLVCLTPGEKLKVSDFMGDDRKSKCEENKCTDEANSSLFCQICAHKSTTNLIKIESDSLLIVRFQFDGIEFDISLVAIPKIEQLEKINAEMLQKLAEKFNDSIFEQKNMGRTLASKI

SEQ ID NO: 143270 - protein, 53 aa, Heterodera glycines
MTEKSDDRARPSASVVVLPGRRCSAVRPSLVPVVPIAFAPIAAGHYHLAQLNG

SEQ ID NO: 143271 - protein, 473 aa, Heterodera glycines
MIASFRPLAEIGSMLGRSWMWPVPASPSFSWSSPTCSAWKLDEKQCKLYFKTHLPYSSENTTPQTYLQYILFKQPHGQDNLNVIASFYELLKMLLPQLRKKQLDASKPLDKTLALLAVIANSYSNNREVFEEHVSSAVFRILGQSIVHQQQIANPGTRGKFGTTFVEHGIGFIGAAQLSPPKHCLWLEVEHRNAFPFSLPSHIYGHFSTALFHVPQVLEALVRSPISTAPCPSSNTLQLCALLEQTIQRFVQCTWPQDLLNFSQLLMGKTLPNPLMAMPEYYRLFLLAVFRAVKLLGADHLQFSSQDLGQRWPLSELRWFPPNIIRSIVPNDSDLPQLEQMQSAQQAQEMVELQNISFQEAQRLMHLDAEFFGLDSPPCHPTSPSLLVSIFRCLHEFTNFHPQLPPGKQSHQSAPNFPALCYKLLSLQSNRDVHRSTNALVDYLVWKCQGDASQAPSGMLTDESLSLQQIDLR

SEQ ID NO: 143272 - protein, 16 aa, Heterodera glycines
EAIPEGFGLPINLGAS

SEQ ID NO: 143273 - protein, 108 aa, Heterodera glycines
MNRQIDTKRQKSKITHEGHLYTFDKASADGMTKFWRCEFKDICKGSIWTNLADQFIRLATAHRCPANASSVEVQKVKTAIKRRALATYEPPAVIRSEALQNVPSPAGL

SEQ ID NO: 143274 - protein, 57 aa, Heterodera glycines
MKECFGDGTFSLAPPMFYQIYTILASAIALIQCLQKQMELGHSQQSHQNSGTSTLAH

SEQ ID NO: 143275 - protein, 45 aa, Heterodera glycines
MRAVTVGGIVLIGVLLCCLIICLVTMVASLTFSCWWTLVNFFTNY

SEQ ID NO: 143276 - protein, 17 aa, Heterodera glycines
IESHPLPADARHSKALI

SEQ ID NO: 143277 - protein, 167 aa, Heterodera glycines
MTEFIECCIYNWHYLNPKQAKEIDWVIPARFCTGRYDSKKIRHRIEVQLGEESKEERLEAGESQTKWPNAYVIPSKDGHKVRIIDAPGIGDTKGVNEDKINFDKTLNFISTLPELHAVCILLRPNTTRATPAITYCIKGLLTYLHKNAAKVLYSSSIMDNTDYNTPF

SEQ ID NO: 143278 - protein, 23 aa, Heterodera glycines
MHWHINFEDIFKIYHTRFQLTYK

SEQ ID NO: 143279 - protein, 758 aa, Heterodera glycines
MVVTLMIGMKNGVEKLFKQRPLTIDQLDEQYIDKEVLVQNWKPNVVYLVQFPHTDSAPSLSPAAIQLETWLRIKEIPFYTVSDGVLFRALFADDKVPFVEYNGQKIFGTSEEIIDTLKQEALSKGTLSELLGLGQKSDENEQEMRNLIDNVLYSILLHDRFQNLASSEAETHLAKNIDFQRIVLPSVLKEAKRNWFKIQPLPKPFWDEYFAKGKTVAYGSKSWNGYGISEKEWKKFVDKLSTEHIPKAMTKFVKHLKKQLDSVLFGILSQFTNTNTIYNGHYANSISAKLNRNPNDPLKIYFGHMKDIFMGQNNTEQNQWQINADWKFEKKANKYNGPFILRFDVLKLDYEQRKRFTNDERKTFSPLFNNGNAENSDEISGTLFSERKFLAVYPKVVTFIVHQLLSLFNLERFAIEMAERMKLGRALIHLMASYLCEGKIGQNDCETEHDEKAKKYLGRICKISEKYFAELSVIVRSLVYQMMYTINVEYQTKESLKMFGAALLDFDEEQTIKYEAKRLRNAIRHLEKFESEKIEYLRTKVQQLGILMQKSQQTDSKDPQTIADGQKSNEEIKKLQKELSVWVLRSFIVSEMRALVDALDDDDKFSREKVTFNDIEPSRNHWLNLNVLVEKCEKEDRTCKMNREQMKQGFQMITERKKKHIFKELWAKTVDQAESVFTVQKYHEVLSYRLGQLRKLYELRKSQLPRDEAVNIKKIDEQYVKVKAELFQRLGDSEVTTTEDNDEGAEVVEVLAEVTFTS

SEQ ID NO: 143280 - protein, 159 aa, Heterodera glycines
GELFILLRAKVEEDGTNFDEEEIAKGFKYVKGHNSMHRAHKLRAFLFDWAGKVAKEKKFVKKLAWRMGQLSKLYMLRKEKIDEKDIKSWASKQEELSGEMEKRWTELKTIMEKMADKIIENATGKTDKAPLAAANVYAEDGKPGTMPLEEIQIEDKREL

SEQ ID NO: 143281 - protein, 200 aa, Heterodera glycines
MDVDVIVKKFKLVFWPAQEFRNVPEDFDEKTRKFVEDALSCKYLIETLKLQIGVETAQRMGEEEYDARVEYSLNLEISEGKNAHLMTKADEESIRQNNHLLYMLNFFIVFINERVKLTEHAFTCALMLNTKEFFDVQFWYSCTKCSSVLNQFALVRLTWRFPRNAFHSSVWLTVTNHLFIELFNLLRILTESWIVSTIAQ

SEQ ID NO: 143282 - protein, 70 aa, Heterodera glycines
MKKKINKKEEQRRKRYRPGEKALKEIRRYQKSTDNLMPRQPFRRLIREVISEITWNSHPVETQAATALQE

SEQ ID NO: 143283 - protein, 83 aa, Heterodera glycines
MCEEVNESSVFRVQFDLERRVTLDVLEQVLAEIDKRLDCLHPSLIYDWIFKRVNRSADAMRQIHDENTKEGYVRIRKVRLISF

SEQ ID NO: 143284 - protein, 169 aa, Heterodera glycines
MEAVDFPKTGVPPKPLTTKWETVNPENEDAPAKPTAIPPERAERSPDFMEKNNEPMHVSVYLTNNLLVKIQNILDCYGIKTEGELFSGHFTALRNRISEKDSDDMSFYNTTNAIEQQLFSVFGKFRRQFFELLLEGQQNRYEEVTVPVYRYVRTNGAKVLGVWLFGYYD

SEQ ID NO: 143285 - protein, 24 aa, Heterodera glycines
ITGVSIIAVLFLVFLMLSQNLVRF

SEQ ID NO: 143286 - protein, 48 aa, Heterodera glycines
MTFYASLVGYTGRNNKILSVKSAFGILMSKSVTVNDILCFSCWIHGKK

SEQ ID NO: 143287 - protein, 48 aa, Heterodera glycines
MTFYASLVGYTGRNNKILSVQSAFGILMSKSGTVNDILCFSCWIHGKR

SEQ ID NO: 143288 - protein, 60 aa, Heterodera glycines
MGCAFKTGKYQDKEEHNDKDNGILMGKGLSYKERSVESSWRKKMFDSPSNYIFIQKGCHR

SEQ ID NO: 143289 - protein, 185 aa, Heterodera glycines
MGRMAPEKGVDIAIEFALWSGIKLKIAAQLVDEHKHSYWHKQIEPLINANQHLVEYVGEIGGDERDSFLGNALAFLFTPKWDEPFGLSMIEAMATGTPAIANRRGAVPEIVQIGRNGYTFDYKDRLGVEQVANFVHLINQAAKLDRATVRQTVEEKWSLDKMAENYEKVYRRMLNKNFIANCYDH

SEQ ID NO: 143290 - protein, 71 aa, Heterodera glycines
MPYNKKRMDKKRRIKTEPAEAYDQNYGANRQQSNGKWAKLAAVKEEAITLINDDVGHLEQQKKLNMAKIVP

SEQ ID NO: 143291 - protein, 181 aa, Heterodera glycines
YVNPFNTVCYPSYGTPPALFRHSLQLRSKLPPRLAHFLPEPEPHICAHNSQIIRVVEPYIPPGAIQNVNDALMSKQISSAGTWPKQLAAKLCAIYDFPVAVPCCNGFTSLVLALRSANIGAGADVLMPSITFVAVSNAVLNVGANPVFVDSADEWDYNPSWSLLLRAATQKTRHEKILEKF

SEQ ID NO: 143292 - protein, 68 aa, Heterodera glycines
MPHCTDDPIWPAWAFHTSVVLNFVLVLVLFVLSVLLVGRCNRPVPVKTVGHCDQCHRRLTDLNELVLC

SEQ ID NO: 143293 - protein, 60 aa, Heterodera glycines
IHSFGGPCRVPRGKQCWFVSSRHRTFWLVSNRCLTCQIGRVRMIPLFQAPHQKQNDITKI

SEQ ID NO: 143294 - protein, 222 aa, Heterodera glycines
MPGPEKPGLVRVLIFKPAQGVRITPKLGLGTNSDALLNVEPAGVRNEQQRQNEAVVDENLEPQRGGLRLCFQNLGFNVGREEWLVRNENFDGHRITHTLSPRIVPRTSTPIENRITPELLVQHVPAQNAQKTQNVMQNNARTGVNGGGAAIQQQAMHSLARPQPLPAQQPIIVQQAIPQPAVTQPTIQQGFPGPIWGFPGQIPYYQYQPPGSKMGRLSLQMG

SEQ ID NO: 143295 - protein, 55 aa, Heterodera glycines
FGPRGRLGPNPKIEKCAFLKIKILKTKPEGSLATWHKLGLITFAHFLLIPNPIIF

SEQ ID NO: 143296 - protein, 96 aa, Heterodera glycines
MTNEYKQKRKYSKKEWEKNYAEICKKIGVSRDIINKWKKQFGIRCKITENEKMEKMKIYWQIKSENPKMTDKEIAKIVNTSQQNIFNWKKQFGEEI

SEQ ID NO: 143297 - protein, 21 aa, Heterodera glycines
MNGHLFIREMIFILINWIFLN

SEQ ID NO: 143298 - protein, 115 aa, Heterodera glycines
LAKYPILLNKNSSDIFYFEILVTKIKNERNLVSFGFAVKQQARLDDGILLEKGTYAYGSAGWIWINGGVKEAEYSYGVGDTVGIGVNSATRQIIFTKNGLRLDRKINKMCKIMST

SEQ ID NO: 143299 - protein, 210 aa, Heterodera glycines
AWIQCESEETAADVKNKLADIIRRETEKKQCALLALGNIAKGGGSSPSFSNGTASQQRHHQHHHHALPGTSTTYAAPLTTTAAAVAGAGVPASGTACSGGQMAAASVANGQPAQHSVAANGGGFSHQNRPPPELETISEDEKQQLEQQQQQQFAGAEQRSPATSVSSSSNGAGGAGSGPQQQKRHNHHGHHHLSQSAREKRLELRECKAK

SEQ ID NO: 143300 - protein, 120 aa, Heterodera glycines
MSIIRLYISFNWMDLSQFIVCINKRSYLLRSGFKYRYEKNLSIRDGNEQFLENGNVLVIEDETEIFEHDIDDVLSEHNYAKRARCLTDVNVASQASLNSDIGVAGPSRMSDSQFGRKEKK

SEQ ID NO: 143301 - protein, 57 aa, Heterodera glycines
LSFSGTTMNNWKTILLGTLGESTRTIISSHFDGAEERRLRQFATNTNKEQKINWIII

SEQ ID NO: 143302 - protein, 539 aa, Heterodera glycines
DNTESELVSILPSLGPYSSFGILSDCCYGQLILLGFVMAATDSSGRKHFVKMFFKRRKEPNGIRKGSAMTLSTNEAPAVKDATRHTVSYSYGKSGTVLVEYLPDSSRDMFQVGRSSEDQIDFTIVDTWLAIGSSNVSSPAGNSARHLRDDVNGQKSISSTISRYACRILADRDRPNKAFIFAAGFNSSKNIFLGEKATKWQKANGEFDGLTTNGVNIFLGEKATKWQKANGEFDGLTTNGVLILHPNLCNKSADKVFNERLLKVFNERLLWREVSVDGDIYNLRETRSSMQKGTLAMNETNELQDGTLIDGTLIDLCGATLLWRSAEGLRRCPSREALERRLDELNAGKPQCPVNLNTLVVPRRKHPKNSSSRQPYVYFGCGHVQGKHTWGVQPYVYFGCGHVQGKHTWGVNKCGSINKCGSITTFRCPICMVDSKGVAKLVMGMESVFHLDSDCLKYAFNPCGHVASFRTVSFWSRIPLPHGTSSFFWSRIPLPHGTSSFFPVCPFCTSLLSAEKPFVRLIFQDNCGDDCMVPSPSFP

SEQ ID NO: 143303 - protein, 167 aa, Heterodera glycines
LLLLRGYAFNHSADFETVRQLKEKHCYVAYDVEQEQRLALETTVLTESYTLPDGRMIKLGSERFEAPEVLFQPHLVNVEKLGLSELLFNVIQSADIDTRLEFYKHIVLSGGTTMYPGFPSRLERELKQLYLERVLKGNTDSFQEFWVTRREWEENGLSYCMKKLSFK

SEQ ID NO: 143304 - protein, 48 aa, Heterodera glycines
NKNDINRRTWAIETEHFGRAVHKSIRTYNRSEIAFIGGQGIRQFPTLP

SEQ ID NO: 143305 - protein, 170 aa, Heterodera glycines
MAFFENGNFWTNWNKNVKKMIMANLLKEDNEEKIILSIEKLEKYLILFKKLNEQIQIDEHLFNKYRNELNKYVDEKVRKSFVDSEKWTLPDEVAKNWQEINFEENLKEKSEQIIEIKNCLTTNGYLSEEEMRKKGQIIGELTKIIKEWYEIPLDNPASPEVKFAGISAGL

SEQ ID NO: 143306 - protein, 39 aa, Heterodera glycines
MCNFELKCIKFPTICSMFFIQNNCFKHAFKMFSLSNYVS

SEQ ID NO: 143307 - protein, 50 aa, Heterodera glycines
MRKNIPTELLFEIIGAIPFDRKWAQIHVSQVFNHFLFNRMGSWLSQIKNL

SEQ ID NO: 143308 - protein, 234 aa, Heterodera glycines
YKLLEQVYYDLRSPASYAGIQKVLAEAQRRNPSITLRDVDKFLHKQRTYTLFKPRKNRFRRLKTVPSGLHTDWQCDLCIMDALKEHNDGFRYILVCIDVLSRKIFTAEAESKKSEHMIAAFEKIFKKAGVLPNKLYSDAGLEFQAKKMMDYWKQKEIIKHVMYSPHLHAGVVERANRTLKERLYKYFSEKNTKRWVDVLDSIVRNLNSSANRTTGLRPTDVNIKNASATESPIA

SEQ ID NO: 143309 - protein, 68 aa, Heterodera glycines
MERTVVIKRLGLPDQKVKVRIWNDTPNTIVGSAAFNLFMIIAICVSAVPPTEIRRQKHLDVFFVTATW

SEQ ID NO: 143310 - protein, 15 aa, Heterodera glycines
MTSQKDTKFFGIKWL

SEQ ID NO: 143311 - protein, 16 aa, Heterodera glycines
EAIPEGFGLPINLGAS

SEQ ID NO: 143312 - protein, 45 aa, Heterodera glycines
MANLDNFDNDTFYLAFKDANPSWSLIGCALIYGIITTFGIIFIFL

SEQ ID NO: 143313 - protein, 399 aa, Heterodera glycines
MTKKSNIAKLVSEKPKHQRNFQKVKHCNSSFLKAKTSKNFPIKTPNNTISFPKRVVLTLLQKAHVRLNPKYLYQADGHAIRELLPVLRMLYESVKEQNGATEPRGAEERQRRTGERQELHQIIKLATELPKTAASLYELLREEIFAKVRNQGILSWVHSVAVETELRERIQTTEQRIEEVKERLQNIESDEQELGRKIERRRREMDQLQKRLAKLQAFRPPYLDEYERYEAQLRVRYAVYVILFRNLHALQSRLVQSYVILFRNLHALQSRLVQSEHAEREQALEAERSMREMVGKMRMESEQAAPLALNEISGPNNLANHSIGLLRVFGNMTGLGLSDDDEEDEEEDEDGLEVDESLKWRMMKNDDDDDDDNDDYMKNVDEEETDEEAADEDNSGDNF

SEQ ID NO: 143314 - protein, 87 aa, Heterodera glycines
FFLNFCGVGPKGHTFLKLAKFFAIKKRNAKLNISPDPTQAQQKDNIFSIVGRQALNRPAFPDTPFWRFVLPKNIGPFYGLPINFFSL

SEQ ID NO: 143315 - protein, 23 aa, Heterodera glycines
NPKLFGLFKKELKIFKNFIHLPF

SEQ ID NO: 143316 - protein, 42 aa, Heterodera glycines
MNYHICTDFINSLAYANPEISFAIGTLRISMEEAYPFGFYDD

SEQ ID NO: 143317 - protein, 65 aa, Heterodera glycines
MSNLESPLRTINAWVLDSVVRLLGSERDKFKKKTKGSNQTDQKKEDKDRKKTSNIKMNIDKKKKE

SEQ ID NO: 143318 - protein, 82 aa, Heterodera glycines
MRRKRRIWPWKRRRSVARNGKLDFNGRVTQESAKNFQIEHQSRQVLQFGRIENGAYTLDFREPFSAIQAFAVALASITQRLK

SEQ ID NO: 143319 - protein, 188 aa, Heterodera glycines
MNLWLLIVIIIFCLFYGIKSGKIQPNFDEIFGDKWDKNESEEKIIKMEQNENSEFNINQNSGKNGNRPNDQQKIETIEKFDAIKEKLREKGKYENEKRNKIEWKIAKLLGANRKKIYKWKNELNLNKIKFNKMKKSFYEEKKSEFIERIDEFKSLYGQGKHKEFVKELGISKKTFRKWKKELLPNCYK

SEQ ID NO: 143320 - protein, 70 aa, Heterodera glycines
MNPLISGGSKLAINRMSWTVYFLATVENEFQTMGYGCTASLISPQFVLLAAHCFDNLKENGQFSLGNFFY

SEQ ID NO: 143321 - protein, 38 aa, Heterodera glycines
MDKKVKLSPKMYPVCVHCGPTEKFKNGKAFIAGWGNLK

SEQ ID NO: 143322 - protein, 84 aa, Heterodera glycines
MALARRENNGTTTTATARRYGVETKQAAAKTTAKHSAEDDDDDDQQQQLLMNSTYIPEVAKNGNLVPMFPEYGILVIGMAFLCR

SEQ ID NO: 143323 - protein, 124 aa, Heterodera glycines
MARQLTDGTGGATTKRGSASSLLNLVSAHHRGGEKRSFRHPSVVQSTSANSTAAALLDAQPAVTAAGSSAKKRSGGSGTGAGGSVNNALERLARAGGGGSVNNALIERMARAGGGGTAGNSKKA

SEQ ID NO: 143324 - protein, 85 aa, Heterodera glycines
NESLPPDLGCESPKQPDSKTRKEWNRHRQLDRSCHLLWSPGRRENLNKRANPSSRSIRYTSQPRGAAIRALDSSQFTRRYYGNPR

SEQ ID NO: 143325 - protein, 47 aa, Heterodera glycines
MAPKCLPLELLFEIVPFIPAENATPNALSSSRLLYNFLLPRVIKWKE

SEQ ID NO: 143326 - protein, 26 aa, Heterodera glycines
MGPALDGQRKLFSLFCAFLVKNINVE

SEQ ID NO: 143327 - protein, 80 aa, Heterodera glycines
LFEYPKRTLEKIDYFVFGAVPPNRCAQIYGETESFRNSFPIACTLILRWIFAPHKCLSTPNGHLKKSIFLFHKYFFQKVL

SEQ ID NO: 143328 - protein, 142 aa, Heterodera glycines
KNLNNFFIRKPRPSFSSALIPVTCNKCSASIEEYNLGQVGYYLDEENNWALDMDELERALKEVGYEHDVKAIVVINPGNPTGQVLSRANIESIIQFAHKHRLYIFADEVSSHETRPGIIKSFKKILEIVYRNFKKNFKKKVL

SEQ ID NO: 143329 - protein, 19 aa, Heterodera glycines
EPVNSCIGCKCRRCCTPNS

SEQ ID NO: 143330 - protein, 153 aa, Heterodera glycines
MPNFLIKKCRKSVPLANLMFDEQKWDQHQQAPVVDHLNYENALNSVPSLAYTVHSRPSSAMPKIALTVLFVDLSDCVQFAARHLGEFPLHTFGHKRQPFARLQLAHKCEQSTPGGFQVGEQARHGGGRVEDKLRKGTAKWDGEKTWIIMDHGH

SEQ ID NO: 143331 - protein, 471 aa, Heterodera glycines
YDGTRGSIHRFLAALIWSADSFPDHLSSTRPPLSGLFTDLELSSTRPPLSGLFTDLESTRRGLLAFVGQLKAGKGLTLVAECVEGKFAQWRAANWTQSNLHDEVKASRIRGFCDVLVADQYIQGVSHLIQTSGLGGLRHNSVVCAWPQNWSASDVVCAWPQNWSASDPMLEANRFAELVRTIAAAGCAVLVPKYASAFPSHGDRLTGTIDIYWVVHDGGVVHDGGLLMLIPFLLIKHKTWKNTTVRLFTFAQPEDNTLQMKRDLERFLYHLRIEAQVFVLEIDSTEIEPYVYQRTLKIEERVKLLREMGTKSNERVADIQSRIWCKFKANTLWAVHEESEEEGKQQQRAAEEHRAKPSGENGTSERRRQWHKWEQSALHRQFSGGEKAHKDTAEHRPKKRSTVARMHTAMKLNQHMRELSADAQLLIVNLPGPPDGQHDAYYMEFIEALTEGIRRVLLVRGTGSEVVTIYS

SEQ ID NO: 143332 - protein, 200 aa, Heterodera glycines
MTPRFALDAIDKKLRELTKCNLLFGGKTIILAVRSEIVDLTIKKSVLWNNFEQLKLTINIRAKDIIFAKQILDIGDGVSPNSFIQLPPECILSNESDLIDEVYGDIFLKHNFNELKNHIILTPYNDLTDNYNEIALDKFPGKCVTYLSIDEVETSNNFPITPEIMNSFNSPGFPLHELKLKQNCKVMLMRNISIENGLCN

SEQ ID NO: 143333 - protein, 170 aa, Heterodera glycines
MEEQQYAVVVDEPDHYRIEQHFDEPMPEEYGDGGTIVHHEHVVEWEQHRSDESPPSDAVSAPAAEEAMQKSGTTTVTTVTTVTDSWSSSNGRGAEAETEGEEEKRLAHAQLAEQQHEEEEAEHKGGAGGTASTNGGHGRADEVGTPVPTEEDHHGHDDGHWHEQAEDRRD

SEQ ID NO: 143334 - protein, 66 aa, Heterodera glycines
MAPPQKQRHFALRAPNAKIWTALFLFASSSLRYTIHQFKQNVKIANFTVEIRTRTLNGHLIKLVIF

SEQ ID NO: 143335 - protein, 49 aa, Heterodera glycines
MSENPENIRIDVKPRICDLSAKEGGGKEASAERTERTMCECQQKLLLNL

SEQ ID NO: 143336 - protein, 106 aa, Heterodera glycines
ENWERLSSFVRNTNTLVSGLVENERYKFRVLAENQYGLSDPLELPEPIVAKYQFSVPSQPDKPVVRDFDRTWAELEWEPPASNGGSKILGYNLQYRDQHSHKWVSI

SEQ ID NO: 143337 - protein, 106 aa, Heterodera glycines
MIKLEIQYMQLKRMCDRHMNNCPCPETTTTTTTPMTTTTMSTTTTEQCEPAQPCQDDSPMICAHYAKLNQCNKPGVCVLIKRVFLPDPIRGKIANFVTVDTPNRMF

SEQ ID NO: 143338 - protein, 190 aa, Heterodera glycines
VFGAVPLNRCAQIYGETESFGNSFPIVCTLILRWSFAPHNCLSTPNGHLKKSIFFVFGAVPPNRCAQIYGETESFGNSFPIACTLILRWIFAPHNCLSTPNGHLKKSIFFVFGAVPPNRCAQIYGETESFGSSFPIACTLILRWIFAPHNCLSTPNGHLKKSIFLFSGQSPRTDAPRFMGRPNPSGVASL

SEQ ID NO: 143339 - protein, 64 aa, Heterodera glycines
MSTFQNHNAEVVQQQQQQSQMAHLLATTPQQLQLNTFQLVFKSLKQRDEWRDVLWKAISLKKLA

SEQ ID NO: 143340 - protein, 22 aa, Heterodera glycines
MCTPSSRRTRDACHDYSLMFLD

SEQ ID NO: 143341 - protein, 70 aa, Heterodera glycines
MCFTEPSTLIERAYFCTSALHRTRNVPSAVPYSNRRDSARSMTPKYHGCSTTFGLFLWKSTIALGKMPEN

SEQ ID NO: 143342 - protein, 142 aa, Heterodera glycines
AIVDFHKNNPNVVEQPWYFGVMDRAESRRLLYGTADGTFLVRWSAEVQKYALSISVDGSVKHMRLEYNAEMKNEAIHGLDVVLRGTPLKGTLYRAVAPFERTNGRAGYITLRPGDLVTLLDTADDDKGWWRGSVSNANGGTR

SEQ ID NO: 143343 - protein, 20 aa, Heterodera glycines
MIIRFKLTVLSLLIKSDLKT

SEQ ID NO: 143344 - protein, 135 aa, Heterodera glycines
FYFLFFLIFRRPQIVGTNSHCRHISTSAYRNNAKIFESAADAVRDIPSGATLLVGGFGLCGIPEHLIDAVAGSGVRELTCVSNNAGIDGVGLGILLRNGQVRKMISSYVGENAEFARQYLGGELELEFTPQGALN

SEQ ID NO: 143345 - protein, 57 aa, Heterodera glycines
MPSPTPSMPALLLTQVNSRTPLPATASIRCSGMPQSPKPKKERILLMEMRPGRTRPT

SEQ ID NO: 143346 - protein, 23 aa, Heterodera glycines
MNELEALSSDYEFDQIKYTLYFI

SEQ ID NO: 143347 - protein, 148 aa, Heterodera glycines; identical to SEQ ID NO: 136434

SEQ ID NO: 143348 - protein, 21 aa, Heterodera glycines
MRTRPIWQVKQRLLTSQKKGF

SEQ ID NO: 143349 - protein, 151 aa, Heterodera glycines
LFEYPKRTLEKIDFFVFGAVSPNRCAQIYGETESFRNSFPIACTLILRWIFAPHNCLSTPNGHSLEKIDFFVFGAVPPNRCAQIYGETESFGNSFPIACTLILRWIFAPHNCLSTPNGHLKKSIFLFSGQSPRTDAPRFMGRPNPSGVASL

SEQ ID NO: 143350 - protein, 39 aa, Heterodera glycines
MEKMKIYWQTKKENPKSFSELVIYFLKLLNLIALFDSAN

SEQ ID NO: 143351 - protein, 44 aa, Heterodera glycines
MVHYKLYYFDLTARGEPIRYLLHYAGQPFEDIRIKAEDWQTEKP

SEQ ID NO: 143352 - protein, 247 aa, Heterodera glycines
DDREEIEKQMEEEDKILQSVTQTSALATEMKLPRPIIAIMKEKKIVCPTVIQMQGIPVALSGRDMIGIASTGSGKTLTFVLPVIMFVMEQEIALRFKRGEGPYGLIIVPSRELAKQIYDVIMWISGALPSPDYPELRVGLCIGGFPIKDQAREFERGVHIAVATPGRLSDMLNKKIFNLQVCRYLVLDEADRMLDMGFEEELRSIFSYFKGQRQTLLFSATMPKKIQNFAKSTLVKAVVVNVGRAGA

SEQ ID NO: 143353 - protein, 26 aa, Heterodera glycines
TSRPRSIQWYIAYMHFPTHSSECSLV

SEQ ID NO: 143354 - protein, 980 aa, Heterodera glycines
VYNAQKHHKIPIYNNSLAFQVQIGSRVYDAQELQKLIPQMEDQLEKKDRQLRQNQKEMEDQLEKKDRQLRQNQKEMDAQQKRIGELEVEVKGLSSECDKLRSVLNQKAESAATSASQKRSGEPHRDEAGCDLQKAALLPEFGQGGTEVRAKKIAVSAGCDLQKAALLPEFGQGGTEVRAKKIAVSAEPTNLDQHKATLQHHTKSAGSSKQLIRDAVQKNDFLRQLAKEQIIELVECMFEMRARAGQWVIQLVECMFEMRARAGQWVIQEGEPGDRLFVIAEGQLQVSREGQSLGVLNPGVAMGELAILYNCVLNPGVAMGELAILYNCARTASIQAITDCVLFCLDRTASIQAITDCVLFCLDRSVFQMITMRLGMERHAQLMNFLHKITMRLGMERHAQLMNFLHKVEIFAALPEDRLSKMADVMDQDYYAAEHYIIREGEKGDTFFVINSGQVRITQSIEGELEPREVRILKQGEFFGEKALLGEEVRTANVIAMAPGVEVLTLDRESFLKLIGDLEPLLKQQRTYREEDIKRRSARTEKDSSRVSPTKTVPALEDEFSQILLRHLKRIATLGVGGFGRVELVCIIGVCIIGDKGRTFALKALKKKHIIDTRQQEHEHIFAERNIMMETRTDWIVRLYKTFRDSKYVYMLLEACLGGELWTTLYMLLEACLGGELWTTLRDRGHFDDYTARFYVACVLEGLEHLHRRNIVYRDLKPENCLLTTSGYLKLVDFGFAKKLASGRKTWTFCGTPEYVSPEIILNKGHDQAADYWALGIYICELMLGRPPFQASDPMKTYTLILKGIDALEIPNRRIGKTATALVKKLLKGIDALEIPNRRIGKTATALVKKLCRDNPGERLGSGSGGVNDIRKHRWFMGFDWDGLRSRTLKPPIWFMGFDWDGLRSRTLKPPIIPKVSNPADVSNFDNYPPDQDIPIPKVSNPADVSNFDNYPPDQDIPPDEFSGWDDGFPDEFSGWDDGF

SEQ ID NO: 143355 - protein, 74 aa, Heterodera glycines
ELETGNFKFADPVAGLEFKIFYRTGSGRINPANPAILHVKSAGSCAGLRILGNFKKFCINKKVFQSIKKYSNIF

SEQ ID NO: 143356 - protein, 51 aa, Heterodera glycines
ARGNIKGIFVFSDPENPKNPKLDSFCFYKFWTFRGFLLFWTFRGLDTLWGC

SEQ ID NO: 143357 - protein, 78 aa, Heterodera glycines
MSCANVINPVPTVVRPESPGKGGNGAKTESRASGEEPANRAKMEGRVKAKLRKTAEKNTFLGENGTTGKTGKVMEEKG

SEQ ID NO: 143358 - protein, 87 aa, Heterodera glycines; identical to SEQ ID NO: 129152

SEQ ID NO: 143359 - protein, 210 aa, Heterodera glycines
IHKQQKWLISPSAATADGVRPLGTAEPSANLQQCLQQCCARPDVYNLSLTDLILSLFLNWNLIISLPLDCSAISFSGFLPLSSDSGNSSTNGDDDTSSSASSSAANCALFECPAGANSECALTDATDAADQEGLLSVRLRRKDTQPPPTSSPTSNNNTSSAEQQDDEEDDGQSAENGGDQRHILSLGNDGTSTEDGTGGGTTAEQQHQQQ

SEQ ID NO: 143360 - protein, 96 aa, Heterodera glycines
MEMEGQWQREEKRKRGREWDGERQTDDGLGRDGETASAHSILDEELGLKLSMLGLNGAKSAGAQLDPGVYFVENHSDGSLGEITGQIAVNRITEHE

SEQ ID NO: 143361 - protein, 16 aa, Heterodera glycines
EAIPEGFGLPINLGAS

SEQ ID NO: 143362 - protein, 62 aa, Heterodera glycines
CCYQQTCCVSTVTTCRTCAVSYGGGGYGGGGYGGGGYGGGGYGGGGYGGGGYGGGCGGYGKK

SEQ ID NO: 143363 - protein, 105 aa, Heterodera glycines
MDPQLLIREATFNKIAQKQAAAKYLATKKRREKDEQRMREFVRRAVTPPDFGQMDADAMVKLSDFMPAVPAQFDRSFRYETLTVPVKIASDGVYSSDDILIIGAQ

SEQ ID NO: 143364 - protein, 103 aa, Heterodera glycines
MAHKNCVQSAFSHRCWPPPLGEKMVPAPAAATLFIAIICSNFNMNFPSRTRTQLLDEILRCAGVGVRLLVEAESVSDYSLSNLRGALFAIYYSAVYYMPTTDD

SEQ ID NO: 143365 - protein, 37 aa, Heterodera glycines
IKVNVEASNQVENALFMLNISKVVRRKKRHLPQNAVS

SEQ ID NO: 143366 - protein, 350 aa, Heterodera glycines
MLKQHVEDVVKAEQYAAWHVNKVKFELKRKMALKEEIHKMVGMLHQVKHSNSLDRDIEKAEKSFGNFYSDLANAPWLPEKREIQREFKKYDDELAKFREQIAEYINAISKIKSEAELHAKLPFKTFVYTLANYSKQSGKVCQLLKKEQKKAKQEQDTAIVEAAIESHGQRMEQESRNETIGEQRREDDKRNEANAIQQPQQFDMDTQNDIVVVGQQKLQRIVEVEENSPSDAEQMPQQLLMDRESQQHVFATPLPPVSAPRGCDDGDQQALFDFFGGEGGADQSATEGSFNFGSFMTTLAGPGAKKGPQKPQADGPGDSQSDFNFNAFLGKPDEFSKEVTEGGALFDFNF

SEQ ID NO: 143367 - protein, 74 aa, Heterodera glycines
AFADNTDEIVFENYCFNAFLRTSASACTAQAHCSAHNPCCVVVDSGSVSHWSHPHSFTHIVPFVGGQIVREGIV

SEQ ID NO: 143368 - protein, 38 aa, Heterodera glycines
MDLPDNALAHNLSPNKWHNAMKKHKFSSPDVRRKALKQ

SEQ ID NO: 143369 - protein, 31 aa, Heterodera glycines
MFAVVLGVNQATRVHFRTRPAQGKQRAVVEP

SEQ ID NO: 143370 - protein, 76 aa, Heterodera glycines
MVNIGGIGMDKLDKNAKLEEPFKSEMSKGKEGVVFVSMGTIIRSSDLPAKFRQNLLETFAKFSDYHFIMRIEKGDN

SEQ ID NO: 143371 - protein, 149 aa, Heterodera glycines
MVQTIQAMNSFAFSVDPLDDDEQAAMAQAFQTDIQDAVERMNSDAGMAAMAVAMFEAQQRGQHDELFLGASASGGGQPQQQQAVHGTAAGGADRHDITTTSTTAQRQQQQNSEQEEEEIRRRRQQMVSIGKPGAAARRKKDMVIQTDRQ

SEQ ID NO: 143372 - protein, 76 aa, Heterodera glycines
MLLSDRFLGYFMVPSAGVWNYNFMGVRHDANMQYDVCLSAPKEFYHEDHRPLHFHNFNVFEDPLGVSTADREDIFE

SEQ ID NO: 143373 - protein, 85 aa, Heterodera glycines
MQPQSKRKIQVSFLIRNGSVESKHRGFVNALQFDPTTRSLFSAGSDSVIRQWDTSAPSGSAAFLRSLEHHCDWVNDIVLCSDGTR

SEQ ID NO: 143374 - protein, 35 aa, Heterodera glycines
WLARHTLCVLRVDKHAPFLRVCHTLTMVSEEAEIT

SEQ ID NO: 143375 - protein, 531 aa, Heterodera glycines
NIRAISVNRDGTCLSGSSDGTVKCLSGSSDGTVKLWSIGQQRCIGTIRCHSDSVWALQTDSVFATVFSGGRDHRVFRTPLRNLNDSELLFTEGKPVQKLLMVDTDQPKHLWTATWDSSIRRWPIDGKETERTEEGPRVREADMTLQGEKGAAGNCPMGGGDNKRKNFEKKDFLLPGAPSIRKYAVLNDKRQIVTRDSDGNVELWDVMQCGRVNTFPMGTNMEEVIKDNVRKVWIPSWFGVDAKCGVLEITLDESDAFSAWVSARDAGFTDKANDAKVNYGGLLLRSLFNYGGLLLRSLFEHWPAYVGDDEDSPLQGFYSLPLHTPILIRDDIARPLFRTTVHDTASQADSAMLRDVLPSWVLQVVELNHFPKFVVELNHFPKFNKIPFYLQPHCSFIPKFPVKDRLSATEMLQLRKVMEHDRLSATEMLQLRKVMEHVWEKILAAHSLATQLQENIEERIELAAHSLATQLQENIEERIELFCNEQKLDSEMDLRTVKHLIKKLDSEMDLRTVKHLIKQGGDLLIFYRPEK

SEQ ID NO: 143376 - protein, 196 aa, Heterodera glycines
GNGRRTGGGEMESKGNGGSGGGLNGTTNGEWHGSRGGLNGGQPMGNGGNRGGLNGGQPMGNGGSRGGLNGGQPMGNGTGTEEGMGDKGNGTSRGGLNGTTNGEWHGSRGGLNGGQPMGNGTGAEEGNGGQPMGNGTGTEEGMGDNNGEWHGSRGGLNGGQPMGNGTGTEEGKGDKGNGTGAEEGGGQPMGNGTGTE

SEQ ID NO: 143377 - protein, 200 aa, Heterodera glycines
MGLNPTAFQSLGLNPPTFQSLVLNPPTFQSLGLNSPTFQSLGLNPTAFQSLGLNPTAFQSLVLNPPTFQSLGLNPPAFQSLGLNPPTFQSLGLNPPAFQSLGLNPPTFQSLGLNPPAFQSLELNPPTFQSLGLNPPTFQSLVLNPPAFQSLALNSPAFQSLGLNPPAFQSLGLNPTAFPITGTQPTSIPNHWDSTQHHFN

SEQ ID NO: 143378 - protein, 80 aa, Heterodera glycines
GGNDYEIFEHSDTVGHTVTSPDNCRRLRSKYKEGPTLLNLPDRTGWRTFNVDVSVPSTKKAQRCLTCQIGRDGVLSTWYG

SEQ ID NO: 143379 - protein, 35 aa, Heterodera glycines
MIGRAVRNRPFIFEGIFIFRLYPRKMAISFFEKFY

SEQ ID NO: 143380 - protein, 97 aa, Heterodera glycines
MIGRAVRNRPFIFEGIFKFILYPRKMAISFFEKFYTSQKRLRMRRRAVHNRHFISQRIFIFRGYPRKMAISFFDKFYTHTNALEHDREGGAQFTFYF

SEQ ID NO: 143381 - protein, 55 aa, Heterodera glycines
IYLLSQKNGYFFFEKFYPSQKRLRMRRRGCAQSAFYFTEDFYIKRLSQKNGYLFF

SEQ ID NO: 143382 - protein, 97 aa, Heterodera glycines
MSNEAEKEFTSAGNPKAPALHVTLDWIHRSWQEISKEVIIKAFKVCGLTTPLDGTEDEKIACFKPEGAIGPIEILREFRGNETMKDGRNDQEEGRPI

SEQ ID NO: 143383 - protein, 26 aa, Heterodera glycines
MRNAKRQKMQIMRKAKCEKRNLGPSL

SEQ ID NO: 143384 - protein, 54 aa, Heterodera glycines
MTNSTHFVVKISKIKLHGTGNFDKNRDRDLPVQKSQDRDLDFRPGLGPTGNFHK

SEQ ID NO: 143385 - protein, 43 aa, Heterodera glycines
MGVWHLFICISGQVAKPSDFIISRLGSIPHLDRIFFIFSLPLF

SEQ ID NO: 143386 - protein, 97 aa, Heterodera glycines
MQQQKQDAQMARRELEVYKQMARRELEDSERDRDALGKQLRTLNTEMESLKNELKKEQEQSQRMEFEMRKVRGENSTLRQRVEDEREEKEAEIAMEK

SEQ ID NO: 143387 - protein, 120 aa, Heterodera glycines
MRRSIKICKSDNTYRERKRWTPLKRETERKRERETDRHTDRDRKRANKRKKKRQTDKEGERKRETYRKTEMAKIGRRDERRTERHHFTELSSTKFFLKKSSAKKRCENKKVNSYVIPSFY

SEQ ID NO: 143388 - protein, 24 aa, Heterodera glycines
RTLSTAVRQRSSKIYSMPQILWAG

SEQ ID NO: 143389 - protein, 72 aa, Heterodera glycines
MRAVHTEWVQRLSAAVPLNLPSVAVSLPFCRVANAPIRGPMFELSTKKCPAKHWTKLRPFLSVVSPHQKGAL

SEQ ID NO: 143390 - protein, 58 aa, Heterodera glycines
MFSSLTKLTTSDEAIINEFLAFDNIRSTGDNSSGYVNDPQLSTSTVENIFEVFLSKLI

SEQ ID NO: 143391 - protein, 162 aa, Heterodera glycines
MDEEAREQKIKELIAMTEETHRKRAERKRQRNEEEAEERRRLNRVRARMGLEPIPSSEDEEEEQKGAAEATELDVSAIPLPPSSPEAKTTKEPEQKKQRFGVREWDRGKIGCMRWAEEQRDEREDEFAPPSFYYGEENDARGEEETQKLKLKRMNGPFGKII

SEQ ID NO: 143392 - protein, 174 aa, Heterodera glycines
MPFTSFYIFCCRSFTYCLGKNFSKELFILIVSPINCQNGKPIWDVVISEIWPIFATSICQLRFAGGDYLDKLRRHISPTLLTDLDQLNSIDSCGLCPDEIADDGPNATSGQALSKWLHIPTKNGQPKRFRCLDYYSQPGMNWINNFMIIMYFMKKNRNYMWVYLNKFGVTLQEF

SEQ ID NO: 143393 - protein, 23 aa, Heterodera glycines
IIMYFMKKNRNYMWVYLNKFGVT

SEQ ID NO: 143394 - protein, 64 aa, Heterodera glycines
MTDFYRISRENELNFIQQIELLHSYEFYSKRKESVANGQAYVFSLADQQPKQKRTSEITVIELC

SEQ ID NO: 143395 - protein, 21 aa, Heterodera glycines
MGTRGAVSAEYFLRQGYNVIL

SEQ ID NO: 143396 - protein, 21 aa, Heterodera glycines
MSARRGTMIHFPKINNKNTKT

SEQ ID NO: 143397 - protein, 104 aa, Heterodera glycines
MATAKQMAAAANARRVKNAKLAAKKSRAAVGRAGNVVKAQARPKCAKCEKGGRKRLRKKSRADMCSTAGASSVTLPQQFAAQHATKGLWRNSSKGKNESDDQKM

SEQ ID NO: 143398 - protein, 79 aa, Heterodera glycines
MRDLEDQEEQAKVRLGDRVVRRSVHFQIDFHPINIIIAGDACYASVDLHYINMITKIFGQNESSLCGVAVHVISIAAGK

SEQ ID NO: 143399 - protein, 32 aa, Heterodera glycines
IGRDNNMRRVKSICAPRKGTKPILCHFIVVEN

SEQ ID NO: 143400 - protein, 98 aa, Heterodera glycines
AIFITFGLSGFPIGCTPGKYLLGLRVISCLDVQPIVGSSDRVMVTCMPSVGFRSSLTRAVIKNMLTTFLFPLSTAFYLFNHNRAIYDLAAKTMVISLV

SEQ ID NO: 143401 - protein, 115 aa, Heterodera glycines
MALLEMGCGQQLQPPLGPADGEGAAEEEAAAGTGGVATTSATMALFGFYHPPATAPQQLTTTVPPPTALQHNANQHQHHYGIFGSDSAAIFGLIVKRFSPMQILLFLNGNKITNK

SEQ ID NO: 143402 - protein, 120 aa, Heterodera glycines
MDSNLRHSKHWDSLNPPTFNDIPISGTQPTTFQSLRLNYLTFQSLGLNPPAFHWTQSTNIPITGTQSTNISITGTQSTNIPFNGTQPTNIPITGTQPTSISISGTQISGIPNNGLKSPAF

SEQ ID NO: 143403 - protein, 75 aa, Heterodera glycines
DRVVPLHTLKYVAQLYHLLRTEASEWQRRPVLARIETKAGHGAGKPTTKTATMGTITKALIELYNNTKKNTRDSD

SEQ ID NO: 143404 - protein, 95 aa, Heterodera glycines
NKEKDTHFHINRITFCTTSQNQITPLSIQVRAPAAKNSTNRQVRRSEQKAAQRVSVACFPKRILRYRFGGWLAGSVPRLCLNARQHRPPLPFACL

SEQ ID NO: 143405 - protein, 122 aa, Heterodera glycines
MAQRAQLHPLALMLPTTLACSFAFVLPVGTPPNALAIGSGLLRVSDLMLSGLAVSAASALLTIAYLSTFAPLILPIDCFPEWAAVTTATAFDANGTTLIAEGAAEEMGGIAALGRLIMAEEA

SEQ ID NO: 143406 - protein, 45 aa, Heterodera glycines; identical to SEQ ID NO: 124527

SEQ ID NO: 143407 - protein, 76 aa, Heterodera glycines
MAAPKWPRQNGRAKMDAPKWTRQNGRAKMAAPKKLAPKKLAPKWADCEISTKKSRDDCEINRDITKKRTNRTVLID

SEQ ID NO: 143408 - protein, 245 aa, Heterodera glycines
MDNNSNNGGGGNNGGRKPPPSRGRKRLHESSSNNSGSSSSNSANNFVDGDSSSTVRASNRPQQPQQQQQHNYNDLELLLIPGIDDVNSSALQPQQTQMVQRPIATGNGRQMVAVNSASHGTPVEGTLQNVDGGGGGGGVLSQRNCSIRRQQKQHSLVMQIDDDDEGEEQQDEQSRGSGGSDDGPAANFALSSAGTDAPRTETGASSTPWLSATRPPTPPPPRMDHRRRPTGGAPVMWTFPPRLLF

SEQ ID NO: 143409 - protein, 74 aa, Heterodera glycines
MIRQAAHQIQKQNRRNTVISREPIFKLNKYRQIALSLSHYDNSTANDAQIAEAMDKAWQEQADAELARRLADQL

SEQ ID NO: 143410 - protein, 101 aa, Heterodera glycines
MGMELEQEQQQQEEQEEEEEGDQMMALTIDHSDDEGEEEEKPEKERDSNVEEADTNSAKFDDNNGTIAADNGTNGNNNPLRLLISAVEEQQRQQQRDNNDL

SEQ ID NO: 143411 - protein, 127 aa, Heterodera glycines
IIGQLENKRRTSVCFCNRFCSKHAKGKKKLIPTQSEIKAFTEVDENFNKILPFSDPFEWWKKHGPKLPMLSKLAMKYLSAPATSVPSEQTFKVARDVYDYRRSRLKPKTAEMLIFLNKAIPMLDYKY

SEQ ID NO: 143412 - protein, 63 aa, Heterodera glycines
MAPISDKGCLRNVRAGPLPPLIFHSLQKVPRMADAMAQAHLTHFELQHHENVVPSGCQSSNVW

SEQ ID NO: 143413 - protein, 243 aa, Heterodera glycines
MPIEEKEKKDVYRIVVWDSETSQDTIYKGDQKEHVINYISVRVTCTECCDDKNRTNCKICGEERIKDWSEAEGHEPTKDFVEWILTAFTNYDTYIFAHNAGRFDGHFVFNYLCRTGKNPLPLINGLKIYEFKVQNSKKHSKLIWRDSCLLMPVKLESLKATFNLDCEDKPFFPYYYNKKENYGIRLEHLPPMEDYSPGSMNKDKFIKFEKWYNENKETPFYLDEELRNYCRNDTEILLLSLLE

SEQ ID NO: 143414 - protein, 106 aa, Heterodera glycines
MSNVALFSVLGELALPGGMLNKGEPPTEAAVREFSEEAMGGHRREDKLEHFWKKGKTVYQGYVDDHRNTDNAWGETTAVNFHDTDGLLEDIELEVEQTHFRDKDTD

SEQ ID NO: 143415 - protein, 76 aa, Heterodera glycines
MPPISLFEWTFDADGKQTYDVSYVDGANVPISVRVLNCPGVNFNKKLGNSLDTLVDQLPDAMKMDVFGVRFIGTIR

SEQ ID NO: 143416 - protein, 203 aa, Heterodera glycines
MSVLANRSAVFWAQPTLTTINSVDRSVGSEFADDFDQSNPSFVHLSITVVLTHPVALTFFVDFLNEVGGQNYIDFYLAIEVCSASHLVVSTGFQRVHGASVEGVGLGRHFGQRRAGDNSRSGSLHVPSVSVTGSEPLNKFGLQKTKMTQAITRVPLSEAIVNKFLARLRNDEPSDGWFEQIQEQANKPSPKRNPMPILIMNTP

SEQ ID NO: 143417 - protein, 130 aa, Heterodera glycines
GFNVSMEHQLRGLASGDTLDSDARETIREAALFMYHQYLSQEVNLRVPLSEAIVNKFLARLRNDEPSDGWFEQIQEQANKPSPKRNPMPILIMNTPFKRHALYGRMLDQLGITTGGSEVAAESAESGAAQ

SEQ ID NO: 143418 - protein, 88 aa, Heterodera glycines
NDQPVFSRISCQYFPIRNDTVNSFASLIFIRALLRISLKISGRQFYILAIFYFISDRKFLHTSHFLFYCDQAYLSSYFWDFFQNVVIE

SEQ ID NO: 143419 - protein, 77 aa, Heterodera glycines
MTPTRSYCLPFLHKLLTIKSINKVTHVPVERAELGFGLPSLRIPIIVMRGSWGDQSHFPPKSNSMLGMALFQEKHGK

SEQ ID NO: 143420 - protein, 177 aa, Heterodera glycines
ATAIGLGNKYAIPYAQLLLEPVFVCFSDTDSRVRYFACEALYNIVKIIKMAALDHFALYNIVKIIKMAALDHFDQLFDILWKLSSDPDQNVRNGSELLDRLVKEIVVSKNDFELETLIEIVVSKNDFELETLILLIRERIYSVNSSNRRFIISWVITNTSSEFLLNCNFCLGANFQK

SEQ ID NO: 143421 - protein, 187 aa, Heterodera glycines
MEELLAVFQFHCHPNLRGAPGQYPMAFPCHGRISDQKEGTLSMQIEKLSEFAREEVNSRRLSKHFYTKGLPWKILAKIKTKENSTEKWLGFYLLCTAPKQDGNWSCKWSCKCSATLRIASQDSVTEDLIRKYDHVFNNEVDKWGFSNFIAFTQLMDPSKGFYDKNEDKVTLAIDLTVEEEKGELADE

SEQ ID NO: 143422 - protein, 177 aa, Heterodera glycines
MFLDPGLRTTGKWSHKSIIKKINQILLIILISFQLTLLIAIIISQLASANCPVEVTDVEVAAFKVMLSFIYTGDLAKLNGYNAMAVLYAAKKYNIPGLVDASLQVPISSLRNVFLAYAQAGLFELENFANDCLAYIDRNADDLFKSDAFLQIDQKLLCEILGHDELQSMEKFSFGKQ

SEQ ID NO: 143423 - protein, 140 aa, Heterodera glycines
MEIEKVSEFSREIFLSERKSKTVHINGLPWKIWTKIEKKNESTGNEKCFGFYLWCDAPKEENWSCKCSAIFRIVSQKSDVADFRRVFDAHVFDSKKNSWGYCFISFAELMDPSKVLYNKEEDKVTLAIDVTVKEAKTEDK

SEQ ID NO: 143424 - protein, 16 aa, Heterodera glycines
EAIPEGFGLPINLGAS

SEQ ID NO: 143425 - protein, 71 aa, Heterodera glycines
MNGEGTDGGETAERVKTKKKVRRVKMDFAEQINKLVQNEGEQQLKKKKKRKIVEENGEEKKSKKMKKKKSK

SEQ ID NO: 143426 - protein, 112 aa, Heterodera glycines
MVTSGGQRVLDVVGGGVQKGLIARVPSAAFHPSRLLHSAEHLEKKDLILNTQFCVQHLCCLDTGQHTLLLQVVHLHRVRVLQQQQPRASIENVVDGTRVFNLDQLVINIRFK

SEQ ID NO: 143427 - protein, 78 aa, Heterodera glycines
MASALILAGLGIAAAGFTGRYMISNNLLFRITKMVLNIDLFREEKGGDPEQIRKSQVGRFADVSLVDKVISADSEWRK

SEQ ID NO: 143428 - protein, 350 aa, Heterodera glycines
MHREIRETMHMQLHRCSDSWCGPSDPIYGRCKKGFPAPYSKCTVLRPDRPAMYFRPSPSDGGAQLEVNGLIYDNSHVVPYNPYVLLRYRVHHNVLFAYGNKANIKYALKYPFKGPGHCYVECKEESGNKIGIDEPAQYAKMNFRGATEAYAIVHSMPFARLSHHVVKLAIHLPNQQPIVYRAFQLVSKAQQIQQGELPETHCSAYWKQWQNEWKNDPKFKDILFEKVPEQFRWAKDKWVLYKRQQIKRPPIGRIVPVPPSDPERFALYSLMRHFPGDPDHLKMVNGLLCTSFTEAAIMHGLLEDGKIWDKTLAEAALSRWPDQMRWLFVSIMVYGQPSNAIELWNKYKDQ

SEQ ID NO: 143429 - protein, 116 aa, Heterodera glycines; identical to SEQ ID NO: 127487

SEQ ID NO: 143430 - protein, 53 aa, Heterodera glycines
  unsure (1)..(53): unsure at all Xaa locations
SREGARPVQLAVPTHLYVSGVGCLGSQXKSGGKLHLRLNTATSPIANKYREGK

SEQ ID NO: 143431 - protein, 175 aa, Heterodera glycines
GTEAVTESGRGTESGRESGRGTESGRGTVRESGRGTERGRGIESGRETESGRESGTENGRESGTENGRGTESGRRSGRATDVEEKVEEEQKVEEKVEEEQKVEEEVEDEQKVEEEVEEEQKVEEEQKVEEKVEEKQKVEEKVEEEQKVEEEQKKQQRERGRNKKRREQEKARVMK

SEQ ID NO: 143432 - protein, 63 aa, Heterodera glycines
FLADLKLSIACRFSAQQSTNTVFDSLQKNNSLPKSFLQPLIANLISCRFKAIHCLPVLGTAKH

SEQ ID NO: 143433 - protein, 897 aa, Heterodera glycines
MAAPIQQKLGAALKVLSRSRTAAELNIQADQAASNLENALNFEIQLEKVQKDAKTMDIFLDDVREALTAWADLLRKLPALERDPAEADFNKFEKKERINDKVDEAALKLRDLRDLIGTLTFQARLFRSKADKEERDAQAAYAQATQHTAQQQTTKTPSFTPPFYQFQPIQLDKFFGNKRKWPEFYESFKSAIGTHALSKAEKFNLLRNLLGGEARELVAGFRLEDNNYDTALQLLKDTYGAPDEHIRALHFELANLKPCKNLRDTKEFLLQLERLTRELNNSGEDIEGPPTFLMLEKKLTPGFLRTILTKKGENPAHWNTTKFRDVLNEAVRKETQIQEVMGEYGHSQQQRPPPQKPNFSASKFRDRAPIPQQRERTFITSAVDDNHKRLYGRQPQYRPQQQRPRAPQTQQRNSRTFNNRTQIPAQQANATFNQRKPPSPCIFCGNDHWNEECRKFSTIQQRREVLRTKALCFKCLKNNHQAGNCPQPKRCFKCKQPHPTALCHGDSKPPNQITAAMFGQPQQNVPSTSQAESNEPAASTSQMCNAVNGSDTRALLMTATSTVFNPAQPHLSMTAAIFIDPGSHRSFISAKAAQLLDLPVVHTEECHLTSFGEREPKRYISDLVKLGFLCTSGEKLIFNLNAMKFLVNDMPMIQLSELDKTELRQQKLNPPHEQRQPDIMLGIDVWHELQVQPIEKLPSGFTLCRSKIGKILSGSGRIEMHQTPNVTFVMSVHGTDQEGANQSVTFESTKEDKEVFTSEDDVKKDEQLNNFFGLNLIGMDDTSTPTDQDQVMVYFKKNLTFVNNRYQVALPWNDRVDALPSNIHQAKARLVSLIKKLRSLNLIDEYQTILDEQSRQSVIEYIGPPESPSSAWRTAFLPHRAVIRADKATTKIRIVMD

SEQ ID NO: 143434 - protein, 1206 aa, Heterodera glycines
MWTDSQCSVERLRENKRQDRFVVNRLQKIREANFQVRHVRTDSNPADMASRGADPQCLRSSLLWHFGPVWLSKADKWPKSNVIYRPGDEFKEVEEPPIIELTTPVHVEEQFKPSIHFERFSNWNRLKATAAHAMRFIKKLRTIENGTISEPHQNNKPLTMAQLQQAENWILKEAQRLHPPSNDQIRELQLFRQEGIWRCGGRLEEAPDLPYDSKHPIFLPPHAWITKLIIRHYDKQLKHCGPRILLSTLREKFWIPRGRKTVQQLLNSPQHGCLECRRERVKPYIYPEASDLPRGRVSEARPFDKTGVDYFGPLKVKQSNDVVKIYVALFTCLAIRALHLEVAEDYSAEAFLRAFRRFTARRGIPSLIMSDQGTNFVAGAKVIKENWTDTLMPEDMQQQMAQSGIRWIFNTAHAPWKGGIWERLVGITKNALRRTVGRNLLTLDEFGTMLCEIEAIINNRPLTFESDQEPIKVLRPINFLIPYSKANNNFPIINDDTDDPTYEPNPTNRDKMVTTLSHVNARLNKFWEIWKSDYLLSLREHDRPNATTGLQTPNNGDIVIVEDDQMPRSLWNLARVEKVLIGKDGRARSALIKINGKLRDRAINQLYNLELSPKVPEQPIQQVHCLIASIMEDSVSLAGSDDEEQRPRNTEDFKIPKRRSALLRPIGEQQSPLQGQHKRRKQLHDSGLLKLFHAIADQQGSSKATIQAIAENREVRKAPQHEQIEHEQQMVQKAQKEAKRHLRTEQHEREMPQPQKEEQQREAERQQIERQQNDEQRATNQQAHSKAWQELAQQFDYDLMDQPDPTEKHAEETDQSTKSKQQSAKDKELERHRIGRKKTIDMQEKRQRSRDEWPEENETLLSYVQRIYGPENWTSAWQRGRVLRELHELEDQGRWMIHHKTDRLQLSVSRLYGGKRPFAEFRFVDGGYYSHMVPEDVIFLQAVPTEEPEIITLDDTPTTEKTATDNAKQPNQPKTSAPTIEEYRMADPKPNNFNEFNLFEPCDDSHTTCAKTATYGSIASNRFQLEEFNNCRATNFFQALIFNWLTRNMNLPADEIWAAHDNYTQLNVVTEEIAKKFHQQQVVSKRRQIGRDQHFTEVINVWRNSCDRFGELYNQPAHKQVKFRPIIPEKEQPSDYEEWIERLNNRTAEILTKARAKVQHPTFLNYNCTTILIGDNVAEVFKPLFYDAKWFTHFPADEFRLIPGPK

SEQ ID NO: 143435 - protein, 1233 aa, Heterodera glycines
MIHHKTDRLQLSVSRLYGGKRPFDEFRFVDGGYYSHMVPEDVIFLQAVPTEEPKIITLDDTPTTEKTATDNAKQPNQPKTSAPTIEEYRMADPKPNNFNEFNLFEPCDDSHTTCAKTATYGSIASNRFQMEEFNNCRATNFFQALIFNWLTRNMNLPADEIWAAHDNYTQLNVVTEEIAKKFHQQQVVSKRRQIGRDQHLTEVINVWRNSCDRFGELYNQPAHKQVKFRPIIPEKEQPSDYEEWIERLNNRTAEILTKARAKVQHPTFLNYNCTTILIGDNVAEVFKPLFYDAKWFTHFPADEFRLIPGPKVKHMIFAYQATADNMAAQIAPMLHRFLRSDIEITLIVAKDDNAQWINNKKYLIDITRELKAGFFVFNREMGEARQIANRIRQAIPEPMDLEQELGPSSSTNTSRQGPSTSRQVISSLMLISMFCLLFTGTAQGLPSRQKRITQVKAWHGGHVSNFLNIFTERDRRASTKYSPYVQRYIDKVLALNRSLSQSTNPPTSTTPPWTTTQPTTTTSRPRTTTTTATTTTTRTTNWPTRSTTRPTARTTTTSPMPWSMDHRTTTVSRVRQQQRPRPGIKLIRWPKSTITTEKGRDVFWCSNHGSTLWELKGPENSPFCRPPPALTAQWTPLTITLYTKIHRPEPIATAWHCSIKTTTENYYTNIVGDKFVEINKEFPLVSKRLCQRMAHQQECPLAKTEMHHDDNNRIWATNDQLQVDFPGPITGLFKGKQTSSATNCFAQPATLFVKWHSLQLLSPIHRADHCNYASEYCQLQDNNSLIWTSACPNDNCFMCDFQEAEEIHGEFTKLNGQTTAFWISEDRQKALTFTETHAVQACDGRQIVLSEQNFGIPKEQYDIIMSNHTRERRNVQPEQLASQLSAAQLATTMALSQLYLKECQRNVRVSNPTLQTRKLLKRDNLQARWISETTIEVFPCVPISLSNISYRTTKDCYKFIPVTIHLPNATRDAFLDPEMRILSLISKIASCSPFRYHHLQVQQNPTLWVRIDSRNGNVQRLSQTVIHELYETILNKTDNDLDLHPLIFHQWQLDNDTDFASLPHIDEFEDSEEFKNKLEQQTTQRAQALGALPGGIEGWTIKWFQERLQETIQWWIRLASAYSTFLLFRDVILPCLIAYFLNPIRITLMTLIGFRPKNQPTPQIQPQYEDMPLREMPSTPIRRKRRQLPEQSTPPIRLDTTTGTASFRTRARAHSATEDTPFGRLRPMKLADD

SEQ ID NO: 143436 - protein, 153 aa, Heterodera glycines
MSGTDRLPSISANESFSIDSDVARRFCQENREIVQICALLAYNKTYIELLDELIAKADEAVRHNRDAQKVVKDKLLRPDNKPGKRRRRKDFGLHYRYPYFRDASGMVPAQNMESLELSRVCSFNPLTEEEKKCQFIKKLIIVFAGLNLLLHLN

SEQ ID NO: 143437 - protein, 189 aa, Heterodera glycines
MSGTDRLPSISANESFSIDSDVARRFCQENREIVQICALLAYNKTYIELLDELIAKADEAVRHNRDAQKVVKDKLLRPDNKPGKRRRRKDFGLHYRYPYFRDASGMVPAQNMESLELSRVCSFNPLTEEEKKCQFIKKLIIVFAGPVRAQLIVTLKLINFKGTEKELRGLREAVAQSLNEQQIIKLDAK

SEQ ID NO: 143438 - protein, 175 aa, Heterodera glycines
MNPKKDVVFRHFAKNYLCCKSRRTSVVDKFQRYLETEQQSQKNQLLSRLGLGTYMVDFADYTDVKKERAEKFGQWTVKGSGRWVRALMKNPNEYNSEDLMEELDKLPEEKREEAIEWLHKSDERLEQERQMEETIPEDPVEAKDFYERMYPKERLKELSEFVGKLLKPTQKYGCK

SEQ ID NO: 143439 - protein, 42 aa, Heterodera glycines
MSSILFFRMRDQYLNLNPNFAQLLVSVERMLYFLLLIPYFVY

SEQ ID NO: 143440 - protein, 37 aa, Heterodera glycines
LVLHCLLSAPSGWEEPYRRDKMWGGGRVKAISGPGLT

SEQ ID NO: 143441 - protein, 491 aa, Heterodera glycines
FVTCLVCLITIANVLMGCELDLNVVLTSVKLDLNVVLTSVKRPVAPAIGFFTQFIIMPLLLGYTIALFLFSDDNRRTHLLALGLFVTGCSPGGGASNYWTVLLNGNANLSVTMTFLSTIGALVAMPFWINVLGSRILKSIYAMPFWINVLGSRILKSIYLSRSVFIPYAKIVASLLMLVIPLLIGLTIAKLSRSVFIPYAKIVASLLMLVIPLLIGLTIAKYKPGMATKAKKLMRPFIIFVLVFIILMRPFIIFVLVFIIIFGISINLWLFAQITWTVLLAGLLLPWCGFMFGCFSSIILAQAPAGLLLPWCGFMFGCFSSIILAQAPADVTAIAIETGVQNTGIAIMLLKAIETGVQNTGIAIMLLKLSFPGADSDLASLSFPGADSDLASLLPISVACFTPGPLLLLLPISVACFTPGPLLLGYAIPSAIKRIRAPRHDDSVQFACRPTVTRCSSTLCQQPQKIVSLFGRNTKEEPHELLTSHRSVDLR

SEQ ID NO: 143442 - protein, 378 aa, Heterodera glycines
NARRNRRMTSRSRKRHRYLTGTLGFLTVRTVVDFHLSNGADIASLSAHFRNLLPIVLRPGYQQIGDDEMLNGRAGFLASLLELRWVRDEIRSVLDAMVDEIRSVLDAMVSRQKMVSSGRKYSKKHKSPAKLMFEWYNTEYLGAAHGVSGIYQMMLRSDWFCSFWDLLDAFCSFWDLLDASAKSDLKQSVDWLLSTQFSDGNFPSSSDRIAKGLSEEKGLSEELVHWCHGASGVLHLLIVASLVFKEDKYLESAERCVNLIWARGISAERCVNLIWARGILRKGPGICHGVAGNGYAFLLLFRLTKNDKFLQMAHWFAFVMMAPSFEASARVPDCPSSASARVPDCPSSLFEGWAGALCFLADLLEPTTAQFPLLPIPF

SEQ ID NO: 143443 - protein, 98 aa, Heterodera glycines
LNSVTSANNFEMSACICPLCDTSLAAGLAKLAKCQHIGHGPCLSAHVSKHGFCPFFNCAMPTTEDEVLLITHTEGKQSNNFAGLVWHSFEKRGNPLIY

SEQ ID NO: 143444 - protein, 107 aa, Heterodera glycines
MRLLKFNFVHYSTIRQRHFVFVFRILTRNTNIFIYWHDWGGGKTECCELHERLAKLKVYERLDKTKVAKKKKKPKPNNFKQLDADFGKAMMTKGPVFVEDFIKAILL

SEQ ID NO: 143445 - protein, 73 aa, Heterodera glycines
MPSCLAPFVGKCEPCVPEQCNMKSIELHYANKSLPRQPGDNGGGNKKKDNSGGHAEGVAVTAIIGIALLTLFG

SEQ ID NO: 143446 - protein, 115 aa, Heterodera glycines
MPSQILKFNFSKGAKVEKLRIRVECKSENSNREVRIDLRVIYGINGKVSGKTQMNINCAEEFGIYLNKKVDKDRFKFNFDIFTKPFDNEIVPSNESSENPQTEGEEQQIVDDILR

SEQ ID NO: 143447 - protein, 185 aa, Heterodera glycines
MFYYKAHLGLNRSNFRYVRCANKRPNMKRVIKWQFISKFKSGTFPPIFESSAETFSNFHMNSIGELFRIGREDENEFLRTQAKHQIQAIVDQLNNSAKNYKNFLSNTNLKHLVPFLEQKFFEIGTDGFVETEIVRQIRNLLENFINEQQQKGGKEDIAIARYLLKLASASKIAPKFARRITQLKS

SEQ ID NO: 143448 - protein, 15 aa, Heterodera glycines
MTKPRRGMKSKGKMK

SEQ ID NO: 143449 - protein, 67 aa, Heterodera glycines
MRPPQQWATVLLLFRLSPSALFLYHFAHRRHGGGGGHLLKARWLQQCHPSYGVDADLSAKRFLEEKK

SEQ ID NO: 143450 - protein, 83 aa, Heterodera glycines
RQRTWLMIDHTLIRSAEKAVASIIFQLFSSLINPFFVSMSNKSCILCQNTLNFRLWHKMTKAFCSPSLNYLKMFLVHTKPNDH

SEQ ID NO: 143451 - protein, 36 aa, Heterodera glycines
MEMAQDGLKKAKAVNDGHKKEADKSHASPKLDAIGV

SEQ ID NO: 143452 - protein, 96 aa, Heterodera glycines
MPTAGEIVHEERQQEKMKKTNFEEAKEEKGRKGTIKGGGRRSKRKRCQRNRTASCSSEKEKQTQQFDGIGGATPPRQKRHFPQAAVVDNGARRVTK

SEQ ID NO: 143453 - protein, 31 aa, Heterodera glycines
MIIVNIVESQRSHKKNIFFLKIFPFFINYKL

SEQ ID NO: 143454 - protein, 71 aa, Heterodera glycines
MDFAGCKTDQILDMDMFLYDTQPATLSGLNEEFISGARLDNLVSTYTAIKGLVESLEDTDALDADPNVRNQ

SEQ ID NO: 143455 - protein, 112 aa, Heterodera glycines
MSKERATAIVVFCCLLLIAAAIGLVLLTLYLLQRRQRKALAAKLNALQQHAFDPVNAESSMSLNAEHGVEVPDSLRSGDSDEDDDEDYDAPPVISSRAKAAPPPVNEKAKKG

SEQ ID NO: 143456 - protein, 194 aa, Heterodera glycines
MNLWHLLFIIFFFIFVIKSGKIQPNFEEIFGQRWDKNESEEIVIIKIEQNDQKEQNETTGIDQIGGENGTDPNDQQKRQIILKFEAIKEKLKQKGKYKRKDQGKIERKIAKLLGANLQLIQKWKNELNLNKNKIKKQLYDEKKREFIERFDEFKELYGQGKQKEFAKELGISEDTFRKWKKELAPKYHKSQSRI

SEQ ID NO: 143457 - protein, 98 aa, Heterodera glycines
MGQKRREEKVIKIELNERNENSQSAVDQMGEEMGNDPNDQTRNYTDRTFLKEFYEMKKSEFIERFDEFKEFYGKGKQKEFVKELGISDIDKMEKRIVA

SEQ ID NO: 143458 - protein, 54 aa, Heterodera glycines
MCQELAEEAKQSIEIANNYRQEIGHIYRTAYSQPDLGIGDLANKLKETMRENQI

SEQ ID NO: 143459 - protein, 120 aa, Heterodera glycines
MQRIAEIKNFEIIEGGRVFIVRVRIENVVHVEYRACVLCRKGVCSCGVEKALTPYLKVSVADDTGILENVAFFDVRGKKNGMEELRGLSGAVCTMKIGARVKEFGGKKGIYYSLIDIVSL

SEQ ID NO: 143460 - protein, 19 aa, Heterodera glycines
TFAFSSLALPNTHTIFEML

SEQ ID NO: 143461 - protein, 19 aa, Heterodera glycines
TFSFSSLALPNTHTIFEML

SEQ ID NO: 143462 - protein, 19 aa, Heterodera glycines
TFAFSSLALPNTHTIFEML

SEQ ID NO: 143463 - protein, 19 aa, Heterodera glycines
TFSFSSLALPNTHTIFEML

SEQ ID NO: 143464 - protein, 19 aa, Heterodera glycines
TFSFSSLALPNTHTIFEML

SEQ ID NO: 143465 - protein, 19 aa, Heterodera glycines
TFAFSSLALPNTHTIFEML

SEQ ID NO: 143466 - protein, 19 aa, Heterodera glycines
  unsure (1)..(19): unsure at all Xaa locations
TFAFSSLALPNTHTIXEML

SEQ ID NO: 143467 - protein, 82 aa, Heterodera glycines
MLDLRKFVSFAYDKSPSGDEKPPPKKYLKTEKAPVAKKERNAKTAKPAKNRIESDSEEEEVSLSSESDASVSIDDGDDDDYD

SEQ ID NO: 143468 - protein, 60 aa, Heterodera glycines
MRRIKLQGRRGAEQLKRREERKAQTEKARQAYLAKKSMFFNGFLGPKIFQTNFSSPIATN

SEQ ID NO: 143469 - protein, 46 aa, Heterodera glycines
LRRFSKCHKRTQRFLLICNSCRNGAAVVGGGKFFPFFDGCHSENNN

SEQ ID NO: 143470 - protein, 45 aa, Heterodera glycines; identical to SEQ ID NO: 124527

SEQ ID NO: 143471 - protein, 142 aa, Heterodera glycines
MLAPSVLIILLFGLSFSIKVEKKKEGIIVTGHPSQSPKMSPTNVLVAPASTQPLTPSLVTIASPTTVSSGFDVGIIILLFCILIIVVIVMCLLCRLFYRTRQQQFVPSNIVPSPTVSSPRMPSASVLLPITSSVPMPILIGC

SEQ ID NO: 143472 - protein, 279 aa, Heterodera glycines
LLKIYIAIFLQIVFNNLFLSCHPNSDYSECGISDFEPLLANVPKMEIGTYNVYLGQAVEVYLGQAVENDNSLPWMASLIKGVKCSATIIGPNHILTAMHCVKGRDFEKLRISYGNEYVSSQPYKSAVVSIQLYPNAKYYRIYDNFGDETSRADLILHDIAIIKIKNPIKFTSNVRPIIKNPIKFTSNVRPICLFGFQKNKTLDSTRAKFLVRNSKSETTKFIIAGWGMTRPQCAKDQNKTRNDQLNYGKMRMISTQKCREMANEKIGVVRFTSFLILNY

SEQ ID NO: 143473 - protein, 110 aa, Heterodera glycines
MARHGQLAMVPGGHGKAKRNNLEQSFADDGGQKHMALKVVAKTVVRYAEMGQKFELELGTTVLNGQQPMRIGIGTELVIGNSTLAEGIRGEETVGDGTMFDGTNCCCRVR

SEQ ID NO: 143474 - protein, 189 aa, Heterodera glycines
MPKATLLLHDIAIIKLKKTIEFAPNVRPICLFGFGGDFESSSDEKFLEDNSKIKNSQFIIAGWGLTWPQCAKDQNKTRNDQLNYGKTRMISTQKCREMANEQKNSFEWSAGDDDAIESIESLLNEFETYGLDDKICVVPEPSIGEPGDSGSPLMLKIGTNNWIQLGVATKTSCNSKDPTSTEGLFGKCI

SEQ ID NO: 143475 - protein, 231 aa, Heterodera glycines
MKRTNASNITPPRAKRSMAPAQDLDPNAVALAEQERQRTLVFIGLPESNAIRPSERVQEDREAATKILDHLEVEAQPTAVFRLGRYDPQRTTPRPLKVVMPTTTHQHMALGGWKRERARLRSLQNLNRLFVRPALTKEQLKEEYEARFRKRQQNPAPVAPAMQPRQTNVPTPVKENAPNQKEASDDIYKPLEVFDQTILVCYEALKSLPPNDKIVHQIQSLEKQYPRLFNK

SEQ ID NO: 143476 - protein, 155 aa, Heterodera glycines
MDSFGTVAWILRPTAQTTGTAVGSMEYEEEENGTGKLVHSVTATVTTPTTAEFRLEKEAPSSEKDGDEEGSGGHGTLLFIESDDGEEEEEEDEDIEDTPVATDSPSATTATVVDDSSDTVKGVEQRSSEHSDVTDGAEGGGGSEGAKLLGVRRKR

SEQ ID NO: 143477 - protein, 24 aa, Heterodera glycines
MSRSSEHFGASECHPCHHLPFLLC

SEQ ID NO: 143478 - protein, 101 aa, Heterodera glycines
MATYLFIAAAGGALLGGAATLAGQRLLAAAAAPPPPQVAAAAALAAAAAAPGSSGGQKGAQEDGEERRRRQQEGQALEEGRAQHAQEEGQEGQDEGQEGVA

SEQ ID NO: 143479 - protein, 23 aa, Heterodera glycines
SNQRTASVCNATLWPLTYSSLLL

SEQ ID NO: 143480 - protein, 56 aa, Heterodera glycines
HFLWCVQSNAQKHEKLAHILRPNQSRPNWLANARRRRWKVARSVFSWSTWSCSCCT

SEQ ID NO: 143481 - protein, 28 aa, Heterodera glycines
IFFVCVSNIVRLFDRARQEKATVGTKFA

SEQ ID NO: 143482 - protein, 18 aa, Heterodera glycines
YREAIPEGFGLPINMSAS

SEQ ID NO: 143483 - protein, 41 aa, Heterodera glycines
ILYRFLNVWIFFWLTKTSSNLALSILIQIAPNFFYSLTRPY

SEQ ID NO: 143484 - protein, 202 aa, Heterodera glycines
NSKKFLNFFALSRPPGRWLPLLLLLDISALLAQFTVLYARHSAVYSMPGLAFVCAVCVSSAWWQNFVHPRSFLAPIRLLSVVGARLRECHSKTYVLVSPWKCVLFILCMLHLVSPWKCVLFILCMLHFVPPHVPLHALLQRDPFAEQLITISADHLNDSQIRAFQERMQDYERGAGAWRKIIHIYTNTITVFIELSPPPELE

SEQ ID NO: 143485 - protein, 74 aa, Heterodera glycines
MGDGFDGIRLLFNTWQTDLADRVRKLGLEPRQNKNRLSEMQQHFEQYVDVKIVAAHLGVSAQIVGQIYNYWVSK

SEQ ID NO: 143486 - protein, 321 aa, Heterodera glycines
MFKPSQIVGLVWTGALHSLALRVKVCLFLAAGVAVPSPNVPCLRAALVQRENNRDWLARRTAPSPPPERGNRTARKEPSISKELDPEQFEGEGFSCLAAAQAEAGRFKVFSLAFRFIGQFLLSLSLTGVFPEEILRNIFTMCLAYAAEGAESMKLAADHFIFLLTSKHMDYEIAIHLKKLDHTATDKILSRFEMVDQSNKSKERPSIRDEPFVIDITAIESKGAKPKKAGKGRRDLNVIYRIADGATYGLHNADNLCLFRAFEFLRMKFVLPRQRFAEYKKDERRQLENVQALCRACNIDMNLPFYCVVEYGDRIQAKLKK

SEQ ID NO: 143487 - protein, 80 aa, Heterodera glycines
MEKLKQQTVVPSANFDDAEICWISWLGYEPPSNLEGADKWDNWHALNNGWPTEETDEQKERVKIWVFGIFILFCIFNWFN

SEQ ID NO: 143488 - protein, 18 aa, Heterodera glycines
MSMRCKMMELTRRYAMTK

SEQ ID NO: 143489 - protein, 187 aa, Heterodera glycines
VFGAVPPNRCAQIYGETESFGNSFPIACTLILRWIFAPHNCLSTPNGHLKKLIFFVFGAVPPNRCAQIYGETESFGNSFPIACTLILRWIFAPHNCLSTPNGHLKKSIFFVFGAVSPNRCAQIYGETKSFGNSFPIACTLILRWIFAPHNCLSTPNGHLKKSIFLFSGQSPRTDAHPDLWGDRILRE

SEQ ID NO: 143490 - protein, 20 aa, Heterodera glycines
MCVIYPTDSLSWARQVWAGT

SEQ ID NO: 143491 - protein, 351 aa, Heterodera glycines
MGSDNALSCMMRRQKRKILGNVDCTDPLAFVIPDKLRLKNGEDIVLYDSRTVRIGEKDVVLVFGSERTLDILSKNSATWHLDGTFKAAPNMWEQCFVVGASVNHRMCIGVWGLLPGKHRRYYEEVLNFLCNRISPVAPRKVICDFEKAEMNAVSAVFPATNILCCMFHYGQNLFRKMKGLKLVQMYGEQSVRGEAVRHSFRNVLSLPLLPPTYVRRAFSVIVGTAPMEMEQFLLYFARTYIGMTQQQLLDGDNAFGKGLCHHPALSDFISEVSGSIDRQVDAARSARNFIHKRHKRYVLQDAVIMRILADATYNDDAEIHDVMTALGLQVEGYAGKLKDYENTEDSIMNFA

SEQ ID NO: 143492 - protein, 77 aa, Heterodera glycines
MDRNKIEILQKSRKRKFLDTNDNENETTSEHHEPNDENNDRDDDFEEEHAIVNFELGKTQKGGVCLWSEGGKFARKG

SEQ ID NO: 143493 - protein, 241 aa, Heterodera glycines
MAGEGQCNEAEEVILRSSDYAFMKKTETAFEFVVGMNGQTEDKTAPGANANGAFLCCKATQGTATLFIVGVANKRLMLAKDVVNYKFHQNISIDDFEREKQVLESVSAQGQKAGIGDNYGEKFFQDQMDANKMIQKGYVKLWTANKSLPPQNVPDLQKDTRPKVTAATEEMILALKVFQQFRNNKNCWASVEKELLKSQSFLSLAEPNGKDAMRKAAVRLCAEMEAKIEAQIDETAKKLLA

SEQ ID NO: 143494 - protein, 95 aa, Heterodera glycines
MFKIDFENKSVKINGQETENVTEQKIMNNTTPIIDMLNNDEVDNSASEYDTSSTSFRSKELTKNSSKLKKVRSYKKEGKSRVLINFLLFMFLLGL

SEQ ID NO: 143495 - protein, 23 aa, Heterodera glycines
MRLTPKWLCQNYPSRELSHFIEL

SEQ ID NO: 143496 - protein, 141 aa, Heterodera glycines
MAQSSANNTVGGTPKLQAQPNANTMGGTPTLQAQPNTNTMGGIPTLQAQPNAMGGMPTYYAVQQQQPYAQLQFVSQQACYCVCCLAYVPIADGPSNAQRGNEGKAAAIAHIERIGHRHGAVHGFFGGNFDQCSSVPDFAKS

SEQ ID NO: 143497 - protein, 76 aa, Heterodera glycines
MKMPNVSQLFCILIVFSTFIEKTIGVTKKGTASPLEKAEQKDDEPKLGKEDKKLVNNKKELLKKEGKIANANGPTS

SEQ ID NO: 143498 - protein, 17 aa, Heterodera glycines
MEKACKIWRDYIDNYWS

SEQ ID NO: 143499 - protein, 24 aa, Heterodera glycines
MEKACKIWRDYIDFSALELLELAS

SEQ ID NO: 143500 - protein, 147 aa, Heterodera glycines
MPVGENNISHSLHNFVSSARIETGIRPLERAARALQEVKKLFEFLQFCFHNFRKLFGIIMPKQNEIVLKYSFLDLTWFLDIEAVFYAISKTKKCLVVKTIFHISLHNFVSSARIETGIRPLERAARALQEGMERKNSYFWDFFRNQN

SEQ ID NO: 143501 - protein, 44 aa, Heterodera glycines
MKKTCKPQHFFLSEICPPPSQNITLFANVSKAPEGMQLCGAGAV

SEQ ID NO: 143502 - protein, 88 aa, Heterodera glycines
MPLQNEIVLKYSFLDLTWFLDIEAVFYAISKTKKCLVVKTIFHISLHNFVSSARIETGIRPLERAARALQERMERKNSYFWDFFRNQN

SEQ ID NO: 143503 - protein, 44 aa, Heterodera glycines
MENRQAFRDEFPLIFKRNVNVIQVSPQQNKINRVLAIWKRLSSV

SEQ ID NO: 143504 - protein, 128 aa, Heterodera glycines
MNVFQIVWCFAAILSMSNTAPNIKAKDLITKNESNSQHAETSDKTASSSQKNKSDENCSICLDSIANDDNSSLKTLLNCKHSFHHSCIDQWSSSPSLIWNLKKLNSMISPLVFILQFFQNSDNLIFFA

SEQ ID NO: 143505 - protein, 51 aa, Heterodera glycines
MCMVKWVVVFLVIVFILALITTIPPRNLITILTIKTIKSCHFWTKSIKKAH

SEQ ID NO: 143506 - protein, 185 aa, Heterodera glycines
MVTLIQEMKRIQPEGPYRLIGYSYGACVGFEMATQLQRSDGNESVEKLILLDGSHLYMQTYRNVYRVAFGVTGDTLVNNPLFESEIMCAMTLRFANVDYKRFRVEMLQLPSFKERLQRVVDTVMGTGLFQRSDTIAFAVDAMRHKFVMADKYKPKETFKGHITLVRAEQGAAREEDVGKDYGIGQ

SEQ ID NO: 143507 - protein, 21 aa, Heterodera glycines
VYNIKIILKEQLVKMHIIRND

SEQ ID NO: 143508 - protein, 74 aa, Heterodera glycines
FSWIEWGPTTQRMDRNRDKQRPNRDSTAYPSPGSAGKVGKHRPSRSYPPHSRQRQSSRHTSSRTDEPSAMGNPI

SEQ ID NO: 143509 - protein, 93 aa, Heterodera glycines
  unsure (1)..(93): unsure at all Xaa locations
QVKCPAGTTKFKLKGGLAFIPKQQQFGFSQRDPASGHIEPGSTFTLTWXNLGDLTPXHFLRLLSTGQWWLIAVXLGIIXLGGAFRLHQISPPL

SEQ ID NO: 143510 - protein, 34 aa, Heterodera glycines
MINDHQPPIHIHSWTKPVKNEANYNKKNNLKFPY

SEQ ID NO: 143511 - protein, 24 aa, Heterodera glycines
MEKACKIWRDYIDFSALELLELAS

SEQ ID NO: 143512 - protein, 56 aa, Heterodera glycines
MHSFSAQSSSVSSSLDSAKEEWLISNFDHANPSQRVMVLPRPASLHNDDYEEETAK

SEQ ID NO: 143513 - protein, 119 aa, Heterodera glycines
MPTNGSKGDDQQQRMVLSRHLASEGTANRPNAGTSTDWLSITYPMGNLSSSLRRSMPSVNSSADGTGAGAEHLVQRVGTARHSSFSTEDGAAMCQKEKQQNSVGIADSETKCEQLTLID

SEQ ID NO: 143514 - protein, 138 aa, Heterodera glycines
MNPNWMEQRFISSKEEGEEHGEKDGETKVEKEGTLSATANFSSTYVQYSVDGTNNGTSRPIGVPTIDEQTQIAAQYGLLTVEDEDEEDNDGQKKQSMEETNGANGKRYHLLMVEEEEDEEEEEIGDEERKSLEDTVDF

SEQ ID NO: 143515 - protein, 92 aa, Heterodera glycines
MIYPSLTQMGQDNGEDLSLYRYKFATRQANGIDNDTQIALEPEKAKMVDLYHAYLVRNKTDKQEIALQVEAFAMSLQMIHVNELTGSDQSDG

SEQ ID NO: 143516 - protein, 74 aa, Heterodera glycines
MSFLQNAWPIWHILLEFTKSKQQIMHSVSMEIMCIKWTQNRRDTVKWRQQGSDSSLDSKSVETGDKWFDREISK

SEQ ID NO: 143517 - protein, 258 aa, Heterodera glycines
SVQKQLARLLQLPPPIGHVVGMALDPQNRLVLFHRSGRIWDEQVGKTTNNNDSLGAIPNATIAVVDRSGLLLESHGQNLFYMPHGLTIDSEGNLWLTDVGSHQVHKLDKFFRPTMSLGKKLTPGSDAEHFCKPTDIAVSTNSDAEHFCKPTDIAVSTNGDFFVADGYCNSRIMKFDRNGKLISQFGHQNCDPKSGEFFVPHSIPKSGEFFVPHSIALIEDLNLVCVADRENERIQCFSVGLEGTTHKPKGRMCPGTFV

SEQ ID NO: 143518 - protein, 45 aa, Heterodera glycines
MTNGSGLNYIFPHNYTVDKIVFFLLLRMLIIKNFLYEYVIFNLTS

SEQ ID NO: 143519 - protein, 87 aa, Heterodera glycines
MAQPPASVPPPTEYRRENSNLNLAPKGATKDKIAGDGYSYTDDNVCVFNNVVTSRGPGTAFEFALQLVEMLVSEEKAKEISNSLLVH

SEQ ID NO: 143520 - protein, 95 aa, Heterodera glycines; identical to SEQ ID NO: 136988

SEQ ID NO: 143521 - protein, 71 aa, Heterodera glycines
MAGRDTTMRYNHGRFEKDNIDWKDNTLVCKCTTMARRGTIAGGTSITMSVTGTTIVRWKSCYRGIKRHNHG

SEQ ID NO: 143522 - protein, 51 aa, Heterodera glycines
MVRRNTTTGGRGATMVQKGTIMVREVQPWLEEVPCLTNLIGQLFFAKIINE

SEQ ID NO: 143523 - protein, 58 aa, Heterodera glycines
MANLITKNFLLATIFIIAEATLEDDASTGETSTKCHASKNDGTSLFREDNQEDICNFF

SEQ ID NO: 143524 - protein, 70 aa, Heterodera glycines; identical to SEQ ID NO: 129101

SEQ ID NO: 143525 - protein, 16 aa, Heterodera glycines
EAIPEGFGLPINLGAS

SEQ ID NO: 143526 - protein, 495 aa, Heterodera glycines
MPLFSGLRAFNRKICYELLIIAYEKTGQFGMKPDEKGRMGEIVYDSKATMYSSMPFHLECPKIEITHEEIVDDYVRDHTAMDSFLVTITPNHQKPVLDISDYRQYYSKKSLFDEDRTVRTFLEMCLSQFSINRDIYSPVGAGKLYEVSPEERVSAGNGIILRPGVAKVKVSPFYESNGLVPTIFAIMNNRMPQMNDWNHIRRVLVDANTVPPNERMDKILQCAFKMNVFNVDNPVLSAFGITVDQTSNRVVIGVRSSPRILYAKNQIINPCPDNTEWTKLGAQAQYLQTNELVNWIILTEERHLRPDKQSKEGLVKVFASKLIDKARKRGLELTNPIFMVFSRSGIQGWVEMLERCLNSNIEFIMLVVAKGIIFILMFNRLVDYKTEDSHGLLKYYEARYHVPTQHVSVEKVTEIVHKGKTQTLENIINKLNCKNFGLNYMPLVERSAERFALEKGNVLVIGYDVAHPAPTTPQERRMLHVKGATCDSFDPSTVG

SEQ ID NO: 143527 - protein, 121 aa, Heterodera glycines
MATTDWGQFDANGTDYDAIYDGTDDEAGTTDNGQGGNVLNHLLTQVEHSRQLLFLFIIEIPFQLTFIAEQVSHHPPISAFYAEHPASGVCCTSYIYTESYVAGLSSLGVRNIGRATVVLGN

SEQ ID NO: 143528 - protein, 386 aa, Heterodera glycines
FFGKPHRIFGFNTLNSTLNSFFNRFLAVLKYYLTSFARKSGVAKKPYNPILGETFRCRWTLPDVPLNTEQTTRGPFPGSASNQLTFIAEQVSHHPPILTFIAEQVSHHPPISAFYAEHPASGVCCTSYIYTESYVAGLSSIGVRNIGRATVVLGNVSDETYTATFPDAVARNCETYTATFPDAVARNCHATPWFELTGKVEVRCAQTKYVVEVRCAQTKYVAKIDFLAKPLVFGQAHQIVGQIFRPERKVPLMTLKGEWNGEIMLRPARGSFHLFTNVRAKPDVRKECVPVMEQEDNESRKECVPVMEQEDNESRKLWRHLTAALYTNNTQMATQIKQKQHFQQRQRDEEAERKRQGRPWSARHFHRTRTAPKWTYEMKQHTRNMN

SEQ ID NO: 143529 - protein, 25 aa, Heterodera glycines
MTAISAIPHPPPVPLNKVRGQREIA

SEQ ID NO: 143530 - protein, 489 aa, Heterodera glycines
IDLLLAQPGLVTSIVTLLKSDSIRALTGALRTVGNIITGTDEQTTTILDFGVLDDFKMLVDSDIHQVSRECLWILSNVAAGTAEHVTRLFSVDGLSDSVFRLCRDPSPRKRKEAYWVLVNAMMGAPMPLYDHLLSGGLANIVAQLLRENPDAALLERTLNTIRASLEDRPQSNRHFTMALFHHVGIVGQLLCVARGATTNNSAPSLMNALSVGRNLHNNKVLGSILAFRLMTVPAATTKRTRGARQFKCESKGPNRRRATQMKRDDMPFLIDYNVHICWQSYCIIPTFHMAVRFAPLYQTRSQFECLDGKKSIPFEQVNDDYCDCADGSDEPGQNRTQRNYLTLFRGTGGGDKPALSFPKDCCDGSDEWDSGTECPNVCDSLGAKAREDAKQQAEVQTAGYAKRKELAKEGGKMLSEKKSEVEKKQKELDELAELKKGTEEAKKAAEELEKEAKDREEKEWEEAKKERTEAEAKQMFDKMEKDGDGKCV

SEQ ID NO: 143531 - protein, 104 aa, Heterodera glycines
MYLITTLLPTHGSVPQNGNAQQQQQNVSFTWIFKKTVFVYGKTPYNKNLLQFHGKHAKNANFCKGLFLLGHHIAWPLCASLSNMEQIGHGRQQLDGGGPVLISA

SEQ ID NO: 143532 - protein, 84 aa, Heterodera glycines
MPLPSTSTISSVAVQNIAAYVADDNGAMVCLRAVYAMDRTAHFDHTVRHDGILWDLRFANPDHPPERPISEQPLGRYRAPSLLF

SEQ ID NO: 143533 - protein, 59 aa, Heterodera glycines
MNQTDEWNAYMNEQKIRGMDCAKKCKIIVSMIHESRPVVQALAIKSENYFDTNPNNPTG

SEQ ID NO: 143534 - protein, 47 aa, Heterodera glycines
IYFASAADDPLRMTNGISQINPWDCLDLCQNNFPILSLELGPPAGFR

SEQ ID NO: 143535 - protein, 222 aa, Heterodera glycines
ISKSIVGAVCAPKVTRWYYDSTQRTCQTFSFNGCDGNSNNFATQQDCKDYCRVESCPDGGEVWKEPNGAVRPVWKEPNGAVRPCTTNRQCPSTHYCTPVTVFSGTVYQTKSLCCPSKNFVCSQPKDQGVRCSSTRITRHFFNADTKTCPKDQGVRCSSTRITRHFFNADTKTCQPFEYNGCEGNRNRNNFATQKSCQNYCLSEACSPGTVVARDSDRWIREP

SEQ ID NO: 143536 - protein, 258 aa, Heterodera glycines
MQGGQPPAMNMDQHYEHLGVPTGFQRAQSADHVIQQMSDHVDNIDRSLLAPWQKFDAVNTFVLPSIAFHLKNGEVRKAPLNALDKKIVRVAKRWLNLPQRAGIEPLYLSNAMGGLALTPLNTLADLSQLVHGLRLLTSRDLAATTMDLLCTVVAKRLRRAPRQHELARYLNGSMDGDMNNESTDISSTWTRLRMATRRLRTKIGVEWSVNDGSMQLLLNGCQIQPKSAEFCLRSAIRDFYHRRLLSKPDQGKTHSVTS

SEQ ID NO: 143537 - protein, 91 aa, Heterodera glycines
MSASIPRRSSQDSLAEKVKSKELIYEARMKIQERLKELGFPVQNTTVKGPSGSERFRETVLKPEETSAFTQLHMENIKRLNEVFEHNLCNY

SEQ ID NO: 143538 - protein, 126 aa, Heterodera glycines
MDVKDSVGPSKIAVNCTICVPVWFGFVRVEADGESVQIEDNLSLKTTQFKLPTNGDDKNLRFAPREKSEGSETIRIAISNRKNQCRKGPPNHFGLFERRDLEFRDGDEGRIGHGASGGGQLGGGAE

SEQ ID NO: 143539 - protein, 21 aa, Heterodera glycines
MRTRPIWQVKQRLLTSQKKLL

SEQ ID NO: 143540 - protein, 91 aa, Heterodera glycines; identical to SEQ ID NO: 138859

SEQ ID NO: 143541 - protein, 240 aa, Heterodera glycines
MVLLSVFCAELLNCRVQQLRDRLNHPEDRTYIFNSLKGRKVTTTYKDRNGMTKTFFIGGLSEKGAALTMAYGRLSSPFNVNIAAHFYARHRIKLHHPYMHCVVERFTAGKEDRFYPMELLELADDNPMWRRWAGPMFTERMSTPPTRPDVQFNLGYCDDDDDDDDELIGDGRDQFSMAFSKIAANAIAIDLGTTYSCVGEFQRGKVEIIANDQGGAKRRKFDDPAVQSDMKRWPFKLVQE

SEQ ID NO: 143542 - protein, 89 aa, Heterodera glycines
RHPIVGELSPKATVMARMLIRALQVLTKPFPPFNQNTVVVVEYCTIPSPPFLQLLLWAGERSVLGKREREKRLQQIYGTTGGPNNFGIF

SEQ ID NO: 143543 - protein, 66 aa, Heterodera glycines
MPKQNEIVLKYSFLDLTWFLDIEAVFYAISKTKKCLVVKTIFHISLHNFVSSARIETGIRPLERAA

SEQ ID NO: 143544 - protein, 102 aa, Heterodera glycines
MATTAPAPSSAVTAAVAPFLPEAKCAANHHHHRHKANAIIVNVNNINRSSHHRKKVAAPKRKRTNNNNNNSGLVAAVAIGNAQNDGQPLVPPPPLQCHKCKK

SEQ ID NO: 143545 - protein, 58 aa, Heterodera glycines
MELTEHVVFLDTALKDISEFDSQQKQVNGVNVHSEDQSKLYILFNNSFVVFYDITSDE

SEQ ID NO: 143546 - protein, 87 aa, Heterodera glycines
MIRYYIQKRLKIFTLKFSDIGQSEADEQEEEDEDDEQQQKQHFSAAQLDLLERLFEKTKFIDFSTRSEVAKLVGITPEQVKVRGIFN

SEQ ID NO: 143547 - protein, 42 aa, Heterodera glycines
MAQFVIFNALEGPLPNISGNRLRASRPIFLLLIKGSASEIFK

SEQ ID NO: 143548 - protein, 128 aa, Heterodera glycines; identical to SEQ ID NO: 125618

SEQ ID NO: 143549 - protein, 74 aa, Heterodera glycines
RLFQGRYHKMHCLCVASWDHVLVRVLTLLAQLGCGVLVCWRELVVLIRVLRTVTQAHQCFACCGGVPGLLAFLL

SEQ ID NO: 143550 - protein, 366 aa, Heterodera glycines
MTKLDRRPLGNDDNELQQDDPKSALRESAQLRRSAFIGVAIGTAAMLTAVIAVPMLYNYMQYVQSSLQEELAFCHHRTQGLWDEYAKVQHLTGNERAKRSSYARAGGTGGGGGGYAQAGGSSGGGSGGYARAGGSSGGGYASSGGGGGSSGGSGGGSAGYSKFGGYASSSSATSGGGQQCTCTTGPPGPPGQPGTDGQPGNDGQPGGPGQPGADGQAPPQEYGGSCTPECPPGPPGPPGPGGPKGPPGNPGAPGSTPEGGYGASPPGPPGPSGPPGPPGGSGTPGPPGPPGQITGGGAPPGPPGPPGPPGQPGQAGQLGSPGNAQPGPPGPPGDAGPPGSPGNPGAPGGPGQAGSAGSGGGCVRTF

SEQ ID NO: 143551 - protein, 78 aa, Heterodera glycines
MTKNDFAIVGENILALFWRTRQIGPRGDFPFSGLWSIFFIEHSLFVPKFKIQKDLCPYVGIIYMFYVNFLDFSKNRYY

SEQ ID NO: 143552 - protein, 33 aa, Heterodera glycines
DCVENVLALANRYLLESVENRCVDFLMTKKKNS

SEQ ID NO: 143553 - protein, 124 aa, Heterodera glycines
MLVPTSQFPFANVFLAFNHARHFEEKEFALRCLDHIDQNAYSLLKSDAFLKIGTNYLCEILARDQLQAEEITIWNAALRWADEQCRQMGKECSAENRRAMLGPALFQIRFPLIQLEEFPRNIGN

SEQ ID NO: 143554 - protein, 19 aa, Heterodera glycines
AIEEAIPEGFGLPINLGAS

SEQ ID NO: 143555 - protein, 52 aa, Heterodera glycines
FMKLLSLCFSSVCSSIWSMNWSKMSKKVPSPLYPSALFLNSTRLSISLSKNL

SEQ ID NO: 143556 - protein, 35 aa, Heterodera glycines
MRRMCFKWGANANPKTATAKAFATTWAIVTALRDT

SEQ ID NO: 143557 - protein, 54 aa, Heterodera glycines
PVAPIRHTPDLHFPLFLQVFCLKTAKIWSFLVKKSSCYPAREKKLLDKFAKKKK

SEQ ID NO: 143558 - protein, 44 aa, Heterodera glycines
MKNEYKQKGRKYSRKEWHQNYAEISKKIGISRRIIDEWKKQFGM

SEQ ID NO: 143559 - protein, 95 aa, Heterodera glycines
RARQKIKRQKKQPEAVRRQAIADLLSGCPNEFGQVLKYIDDMKYTDKPDYDWIIATLRSSLSNAGVQEFPYDWETGKRNAAPGAGGGGGGDSYFN

SEQ ID NO: 143560 - protein, 532 aa, Heterodera glycines
DESNGDCMLICPECFCISEEHMKNERDELNSQQFYPVPHDEFGHHLWSNAVLVIGLLLRERLIHPSDIDPIYRHLPASQRPRNMPVMPSSAFHGRMKGFPVVQVALISESAQLQMMLSTYGITTQTPHEVEPVQIWPSWRMVKLYERLGRDEKLGLGGRPLRPLGPLNTSKIFRICGNTVVIYPLIFELKDFYTNADSSTLIEDIKAIELGKRVLDKKPTFCMILREENVAGEYFSNMLDLLVSLKNGFVNGVRVRLGRIHIDMVNPDDVEFDVDVLEEIDAKEALLRARTKLRKVPPEKLEGLLSEQQLSGMGDHELVGGAFIIIAVLQMRYPGTFVVQGGCPKASTSKIMTSIGLRNSSRPNGTYTDAIDMLLCFVMEDLKNRQKLNNGTAASPIKTNDLFAFANEKIERGTEPSTDKFVRQSLEESMMSDIANPENRQLIVELFCIVATIMERNPLLSQAFNMFCEERRVKDRVNMTPFYAIDDDPSAPSTSSYLIRIVVDKLLKDTNTKHTISLRNNLLQKAEEECSI

SEQ ID NO: 143561 - protein, 177 aa, Heterodera glycines
MDLIALFILVLVEMTVAGAQIIYTPHEVAFLQNLVFYIERTYRTPDFGIWERGTRYNRGNPELHSSSLGFVKAALESVNGFNAYGHKGTSDSVIYVGQSFIYCVIANCDAYFLFYKITDIDGHNRNRTTFETLLPRESNSKNTDASLILTIGWASFATHDDQKFETTLSKCLRHLEG

SEQ ID NO: 143562 - protein, 136 aa, Heterodera glycines
MVKIMKPGRVVIVLSGRYAGRKAVVVKSYDEGSSERPYGHALIAGIDKYPLKVTKKMGKKQVEKRIRIKPFLKVTSLQHLLPTRCIFEADLDKSLVNKEWIKEPRKKKNAIISVKKEFETSYKAGKSKWLFTKLRF

SEQ ID NO: 143563 - protein, 318 aa, Heterodera glycines
SGIYWCLAALKVLGENINDEEKLADLIKENQNEDGGFAAADGHDSHILHTLSAIQVAVIIGRLDIINLDATVEFIKSINLDATVEFIKSLQQNDGSFAGDHGGEIDTRFSFCAAASLYFLNRLGSIDVHKAVEFVINCYNFDGGFGTRPGSESHAGQVYCCLGTLSVCGCLEVYCCLGTLSVCGCLELIDVERTATWLAERQCPSGGLCGRQCPSGGLCGRPEKLPDVCYSWWVLASLAIIKRLHWIDGESLTHFIIASQDDEKGGIADRPGDESDPFHTVFGLYGLSLLGHKGLEAVDPVFCMTKKSLVNFAFAYAS

SEQ ID NO: 143564 - protein, 43 aa, Heterodera glycines
MAFFTNFLSIGVIFLANFVPQASPCTNVIGYVPGCCHDIVSLT

SEQ ID NO: 143565 - protein, 94 aa, Heterodera glycines
MNPKIIPNELLFEIIAFIRFNRKWAKCRVCFSFDQFLIRRQADWLKLIFTVVKNCKSLVRSLVNRIKQIPVNYEVHMDGVPQSAARHHAELTYI

SEQ ID NO: 143566 - protein, 67 aa, Heterodera glycines
MSSFTTSSSADEFSPLQPIFPNLSTSEEMSVLIARIAELNRAKTMEPSIASSEVFGQDGYGREFKHN

SEQ ID NO: 143567 - protein, 101 aa, Heterodera glycines
MPWHNSSATSLPGRSPSSLKRASLPPASAMFTPPSTLMPMPEQRIQLSGQCQACRLELSDQHKGIQCTAISQGCNRVFHWIYVLFLYYMMIFSCAELFNNI

SEQ ID NO: 143568 - protein, 49 aa, Heterodera glycines
MVGELGLTVSWRAIEWVGALAPGQSDSGQSDRGGQSDSEDNPTEMDNRT

SEQ ID NO: 143569 - protein, 19 aa, Heterodera glycines
KNSNFNLYQVKIIQNYLVF

SEQ ID NO: 143570 - protein, 36 aa, Heterodera glycines
NFLKYKPKLFGLFKKELKIFKIFIHLPFDRKNIREP

SEQ ID NO: 143571 - protein, 52 aa, Heterodera glycines
FINIFSQTALKRTKFYLQVILGTQMLSLSKREMNKKSKNIELLFKYAKNFRL

SEQ ID NO: 143572 - protein, 37 aa, Heterodera glycines
MFFCVKYILRDVWLFELRNSAIVIMTQLFISIRDNHL

SEQ ID NO: 143573 - protein, 174 aa, Heterodera glycines
MAAEALVKSELEKKEEEEPKKAEEAKKQKEKKLKELEKQAVELRVMLAEVENGGKTGKNPGKGDSPGRAKWGRKRGNSPLGQPERGRTGRRRHLIIGGGGGAIAAPSGGNVGNFVANERAGGGRSGNLVFNADGMARELSEDEENESDISIWPFAFIIFPLFSLFPRQFVPFGV

SEQ ID NO: 143574 - protein, 18 aa, Heterodera glycines
TIRASEELSNDTKIVGFG

SEQ ID NO: 143575 - protein, 24 aa, Heterodera glycines
KFLDFLFISLFDSESIREPYLTFN

SEQ ID NO: 143576 - protein, 47 aa, Heterodera glycines
RLSVKQSLPPQQFDVNGNLVTADRPTAEEETNNEASGFITENPLNLN

SEQ ID NO: 143577 - protein, 159 aa, Heterodera glycines
MPPLPQPTERDAKMEKHFNRRFGTRPQQFVSNKPIWARHRLSQNWSAGTICECTGVIYKVKFPDGSTNRFHANQLRNRENTANGHEPLNVLNEAFHLPITAPNVGNVGQDLEPRPEPINDELQDEIEPEQARRSPTPPQQQVPRRSGRNRRAPDRYSPG

SEQ ID NO: 143578 - protein, 124 aa, Heterodera glycines
NCSEEANPCDIIKEGFPKKCCRPRTKKTTNNSTERDPHDITEERNAKKRCSQKIKEIFESETTQPQPDNLRYPINEYISTNEFAHEDIILELPISEFTMEYIREYGLVRPLLFKEQPENLGMRS

SEQ ID NO: 143579 - protein, 32 aa, Heterodera glycines
RCLISRNKCINTEISGVPVSFCCCNTEDLCNG

SEQ ID NO: 143580 - protein, 142 aa, Heterodera glycines
WGPILRVLGPILRVFGPILRVLGPILRVFGPILRVLGPILRVFGPILRVLGPILRVLGPILRVFGPILRVLGPILRVLGPILRVFGPILRVFGQILRVLGPILRVLGPILRLGSVIRVFGPILRVLGPILRLGSVLSFLGTN

SEQ ID NO: 143581 - protein, 451 aa, Heterodera glycines
MKYYDVRSLYPHTNAVTAYPVGHPTRVNIIGEAEQAVDWRRADQVPVRGILKVFVVPPHHVDVPVLPVKFDQRLLFPLCRTCALQHPHGAVNEDYECTHREDDERGWVSTVTSIELEEALRNGYRCTAYYRSVEWDDTRWSDRVFRGYVAEFMAMKTHASGFPDEIGTTEEDQQQFIEECEDKFGIRIEREKMVHNKAKRTIAKLCNNSLWGRFSLRNGLSKMIVTDSPAELRALLDNPAVEVSSVDQLTDECVLVTYAAGNEWVEEHECSNIVLSLWTTSVARLHLLRLMQTVVRAPNSVLIYTDTDSVCFANREADGCPLETGPHLGDLSDEWPDHELVEFVSGGCKQYALRMRHHQSGEEKTVLKVRGITLSADACQLLHFDTFKRSVLHYAMCPMCHSNDDDDDDDDDDDDDDDDDDDDDDDDDDDDDDEDICSILIEYPNFLRPQH

SEQ ID NO: 143582 - protein, 402 aa, Heterodera glycines
MHREIRETMHMQLHRCSDSWCGPSDPIYGRCKKGFPAPYSKCTILRPDRPAMYFRPSPSDGGAQLEVNGLIYDNSHVVPYNPYILLRYRVHHNVLFAYGNKANIKYALKYPFKGPGHCYVECKEESGNKIGIDEPAQYAKMNFRGATEAYAIVHSMPFARLSHHVVKLAIHLPNQQPIVYRAFQLVSKAQQIQQGELPETQCSAYWKQWQNEWKNDPKFKDILFEKVPERFRWAKDKWVLYKRQQIKRPPIGRIVPVPPSDPERFALYSLMRHFPGDPDHLKMVNGLLCTSFTEAAIMHGLLEDNKIWDKTLAEAALSRWPDQMRWLFVSILVYGQPSNAIELWNKYKDQMYNPQGIITPAQHKVAELEALADIDWRLHSCFNLSCVHFSLPDPPTSIAKNT

SEQ ID NO: 143583 - protein, 126 aa, Heterodera glycines
DFVYPPPSPLRCTHQRSEGSVEGEVVDLAPVEADHPIGGFGKTISHVNCVLKTTKGSRELRLDPTIYDSLLKQKVTPGDIIYIEAGSGTVKRMGRSDIFANEFDLDADEFVPMPKGDVHKQKEIVQ

SEQ ID NO: 143584 - protein, 355 aa, Heterodera glycines
SKSPTNRCPLAMAPNARGDGTESLLIGRGMAIIQRNAEPNVNGKQLVVLPHQIVVDILVVLPHQIVVDIEFDCHSERFFWSDISGHSIRSAFLNRFFWSDISGHSIRSAFLNGTGLSSNFSEVLRSPEGIAIDWPSRIAIDWPSRNIYYVDSIKNELGVLSIDGRFQKALLTEGLNNPRALVIDLESALVIDLESRHLYYSDWSREGPKIGRVSLDGSANEIFISDDVHLPNGMVLLFISDDVHLPNGMVLLQQRRWLCWVDAGIQQLSCIGLDGTGRRVIYAPLEYPFGLTVNGAEERFYWTDWEDMKIHSVDVFAEGYTQFLPGGTDWEDMKIHSVDVFAEGYTQFLPGGGGK

SEQ ID NO: 143585 - protein, 91 aa, Heterodera glycines
MGLTLLATIPASSCLQSEQRELYIDNFTLMFFDSLMVQFNGTSTNCHRQQSIDFEDDEHEQQQQNQQHQFEPEELQFVERLSDGQFGSVYK

SEQ ID NO: 143586 - protein, 124 aa, Heterodera glycines
MRPTKFLASGFRVEKSLGFLVASTLGLTFFISQLTYRALDTRNDRMMAVKCIAVDGTSGTRQSLLNEIAILKETEAIKMLEICPINFISLFILLSRGVPMRTLSNSMRHFLWTINCSFAWSSKY

SEQ ID NO: 143587 - protein, 106 aa, Heterodera glycines
MALGRFPFGPGSAVMVPNLFTIESLISRPETIATVIRQPELSAVGYGFDRLIAGCLSLNPKERLRPEQIYQHDFLAAHRPMDQSLVAKFIAEKRQNSQFCGNNGII

SEQ ID NO: 143588 - protein, 44 aa, Heterodera glycines; identical to SEQ ID NO: 129045

SEQ ID NO: 143589 - protein, 43 aa, Heterodera glycines; identical to SEQ ID NO: 131356

SEQ ID NO: 143590 - protein, 84 aa, Heterodera glycines
KKTEAPPLSPPKSTQGKAEEPPSDVFSSDNNMDYGTLKDFDPNRFGAPPLKTQQNMEKNAPPLKVPEKRATAKKGRIKMDQLEI

SEQ ID NO: 143591 - protein, 25 aa, Heterodera glycines
MWSYVSLPMHRQIECGDLAFYNFQL

SEQ ID NO: 143592 - protein, 121 aa, Heterodera glycines
MDVHDEEVEIIGTRSNERQMDRAHRQEQQQEKFYSQQQMSEESEEALFCISKHDVKEISQVVKAMAFRDHCTLNVSNEGIRLAVDDQHNQQGSAYFRSEHFQDFNFRTQTCSIKIPMRPLM

SEQ ID NO: 143593 - protein, 44 aa, Heterodera glycines
MSGSEPVSNEILNKSKILGLDDVKIYIRYKALINFYNITQAWIA

SEQ ID NO: 143594 - protein, 58 aa, Heterodera glycines
MLNFLQSLNQTFAQQQQKAPDDEAEEGEEMKEQLAEPTIDALVEERMKNYFLMRNKNN

SEQ ID NO: 143595 - protein, 85 aa, Heterodera glycines
METGRLFFNLVQRGYIIGDRQINGDWHIKRANTPLLKDLEVKFGQKFKPTTGFEGIVQGIVVGEDGFVHVNGDYRRRTNMHPEGF

SEQ ID NO: 143596 - protein, 490 aa, Heterodera glycines
FTLFSALKANANVLRIWGGGFYELDEFYEQADELGLLIWQDFMFACSLYPIDPHFLRSVEAEIEEQVNRLRHHPSVLCWAGNNENELAVRSQWYPSWDYPEEAQARDYVKLYKKHIQTLAVKLDPTRPFLLSSPSNGIETEREGGVSKNPGDPAYGDVHFYSEGGVSKNPGDPAYGDVHFYSESVNLWKPSNFPVPRCSSEFGVQSMPLRGTMARWIGPSDWNYKSGTMARWIGPSDWNYKSGTLVSRQHHPGGVLNLPAIVSQHFNVFVVPPFSIPFSFAPLLHSSLSLSAPFFIDKFAFLSQIHQAIALQAQIEHYRRFRSHLDEAGLGHTMCAMYWQLNDVWAAPTWSTVVWAAPTWSTVDFDLRWKVGHHFVRRSFSPLIVSMVLLDSNGIFRLWTVSDLSLLDSNGIFRLWTVSDLSLSVQNAIVRLSLFPLRNGLSPLFTANVSVPNISPLSSQEIPLPKKFGKIPFLTSFSQMTYLTLSGSKI

SEQ ID NO: 143597 - protein, 246 aa, Heterodera glycines
RLINNHKKLNEKLRSILDNSRSGTVLFSFGTVANTRTLGESLRRMLLRTFSQFPDFEFIWKLDGESAENESELIKATPNVHTFEWVPQNAILRHPKLRAHPKLRAFVTHCGQNSLAEAAKIGVPIVAIPLFADQLYNAVLAKHRGMAVHVDIRQLITDKTGKVLGTVLHDASFRANAKLIRKKIALSPFGAKEQLVRWVEFAAEFPHLNELNLPTDAELGWVAYYSIDAILFSIGAIFLAILALFL

SEQ ID NO: 143598 - protein, 25 aa, Heterodera glycines
GVFIGHGSKCGQCVPIGNRPNRTLE

SEQ ID NO: 143599 - protein, 81 aa, Heterodera glycines
MAKENEKELNPELDKPNPEEMPLLENTPINDLVKKIDRSVGHTSKSDFSKQFSWLLKCALCIILPFMKPNTFSWPLTRTSF

SEQ ID NO: 143600 - protein, 66 aa, Heterodera glycines
HADGGQTNAMTTWGEGEASPGQFESLDQIPSRDTEILIKLNLKFKPNEIYLLLLFVFSFFKYQKYF

SEQ ID NO: 143601 - protein, 372 aa, Heterodera glycines
MVNVLGFPALTAPTSKSWVTGMPLGVQLIAAPFNEALLIAAAKELERGFETGHSEKVCAPLKDKDKGFYDECLKSEVVKQKGFIPKHLRPPWLALDIFGDNRAEKVDSNCYACYKGSMASGGKFDEEEYCACHYENKAPDIKFGNLFGSIQLSDKLDSCVDNFYKVALVHFYKNDPASEPEGAEFKRTLLLLDGCVSGVKTACKGKVKVEFTEPGTGFFSGNCYEEAKTALENDFELSKGNDLSGFSEKDENGTITEQADDSTVFTLPVLLQHRKCSGLGSATMDNTFKDITLTISGGDCESQSFKLKDVDASKGRVQEMRGLELRMSDGTAKQWTDDSGNYQYTKKDQLMLKPMENIDKIDEFGKFKNPSY

SEQ ID NO: 143602 - protein, 28 aa, Heterodera glycines
MKGEEGKVLGTKLTFMFEPVHNDYFLML

SEQ ID NO: 143603 - protein, 63 aa, Heterodera glycines
MQWKPEVRTKVIRRGAKVIRRGTTVIKGGTKVIKGGTKVIKRGTKMIRRGTTVIKGGTKMIKR

SEQ ID NO: 143604 - protein, 47 aa, Heterodera glycines; identical to SEQ ID NO: 138137

SEQ ID NO: 143605 - protein, 50 aa, Heterodera glycines; identical to SEQ ID NO: 125301

SEQ ID NO: 143606 - protein, 21 aa, Heterodera glycines
FLKILFISLLIEKHQRALFNF

SEQ ID NO: 143607 - protein, 117 aa, Heterodera glycines
SFAEAVVPVQFMVLSTLPFRFNHTVQLANEITQERLALTSRTRVDAAGEVQTIVMVLRSSMEFDDTQLKEWLNTTRINAAFHDNLVHIGFNDNEIGELPSPSADAESASRTRTTSRS

SEQ ID NO: 143608 - protein, 192 aa, Heterodera glycines
MLSEYKSNEIRPFRSSHTFIHSFPYFRLPLASTTQQQQQQTETIDAELCTTTDVICLLLNTGHISQSSPSSSAAAKAEDNKTHGPKPTQRLRLDGNIGVARSCRSGHEAGAGQHPVHQRGRHQISAPDSPSVRRGHRTGILHSAHGVSQLASDCATCLATVTGRDQHIGVPEEVRFGHAAQTRVADRAVRLP

SEQ ID NO: 143609 - protein, 47 aa, Heterodera glycines
MTAEEMASEEMKKVREQLTKETILEHQMSVQEGRCPLPKHWTVLGIG

SEQ ID NO: 143610 - protein, 22 aa, Heterodera glycines
SPLKALSPIMSPFLRMLKNNRP

SEQ ID NO: 143611 - protein, 77 aa, Heterodera glycines
MFEMFWFPGLGQLFGQFMVLRKVLGLGVNKSRSEKVVAKMRSEWRWARPSQVNANAHAKKSKTVAMDKMTQQRMCQP

SEQ ID NO: 143612 - protein, 20 aa, Heterodera glycines
MYLYKFAQLIFLQMYLYKFA

SEQ ID NO: 143613 - protein, 45 aa, Heterodera glycines
  unsure (1)..(45): unsure at all Xaa locations
CLSTPNGHLKKSIFLFSGQSPRTDAPRFMGRTNPSGVASXIALYF

SEQ ID NO: 143614 - protein, 88 aa, Heterodera glycines
MPKQNEIVLKYSFLDLTWFLDIEAVFYAISKTKKCLVVKTIFHISLHNFVSSARIETGIRPLERAARALQEGMERKNSHFWDFFRNQN

SEQ ID NO: 143615 - protein, 119 aa, Heterodera glycines
SAESLLFVLSFSATTIAIALRPPQLAKKDVSLPFHFGAFPSPKCPSVFAFAVLWPFGKVRSKAPPNCVANVSAISDGTFSADRGAARPPGPPIVPRFALHRLSIRSGGRRSVRRQSRHC

SEQ ID NO: 143616 - protein, 93 aa, Heterodera glycines
MSTPPKADDKKKEVGGIMNIGNTCYMGAALQALANVTALSNFLMENENRLPNNKLVMEYVQMIKSILVLRQPAAPFELKHWRNEVLAPKKGSV

SEQ ID NO: 143617 - protein, 67 aa, Heterodera glycines
MRIRMNQLLFTQTSRYCITDWDFIWGMSNCPFDSNMLILCHILKKVYYHLNQSTGLTTFESGKQNQT

SEQ ID NO: 143618 - protein, 20 aa, Heterodera glycines
VKLVLYNGEGLQNLERLYRF

SEQ ID NO: 143619 - protein, 36 aa, Heterodera glycines
KPKLFGLFKKELKIFKNFIHLPFDRKSIREPYLNVN

SEQ ID NO: 143620 - protein, 241 aa, Heterodera glycines
MSASIIKNGVLGFVRVLALWSRTLLEAISSGRDRDVFLWSGGLIEPSECLFRSGLINPNTGVFNDRANVQQPVPLYHALRRGFIKLPSMATGIALTLTDCVEWFFIDDNTGKFSDRFSDDQFSLFDAIHQPRPLVKSNVREIIDMANNRRLTVAEAVRANVLCQDTGRFINVHGHAESLRDAYQLKLVQKPQTLAEVIDSGSLDNDGRFIDGVKPRTLLEAICSGMLDPDVAHIRAGPGDE

SEQ ID NO: 143621 - protein, 50 aa, Heterodera glycines; identical to SEQ ID NO: 135818

SEQ ID NO: 143622 - protein, 96 aa, Heterodera glycines
MVRTFFHDNEAGFTKKYYFCELQFFAINELPWDIAVLKFYAETMGNIWDPLFTYLDEVITSLENGDMPAYITESSPKNSANSLEDLPSVEAPQSDD

SEQ ID NO: 143623 - protein, 18 aa, Heterodera glycines
YREAIPEGFGLPINLGAS

SEQ ID NO: 143624 - protein, 167 aa, Heterodera glycines
MNGQKDENTKSGTFQDQTIRSVRAVGVGPMIAGSPGPAQLGDQQQSCASTQQQFLAPVEIRQFPQNARLWTEQRPIGDGGAATQMDAQFHPTGTQSIMVPQHGQSTGRSLPTLSDAKWRRIGGISAAAAAQWQFPIAVQRNAIVHATNDVRLKAHSNEWKQRSFICI

SEQ ID NO: 143625 - protein, 18 aa, Heterodera glycines
ILFDRARQEKATVGTKFA

SEQ ID NO: 143626 - protein, 210 aa, Heterodera glycines
MIGFMSTNAQNPPQMQNAYNPQLQQPYLPQGNHQFGMINQAHIPQVVQPISQPQQQQINAAQNLARQNFENRPIENVIERGREPGMDQVAYALIISQIPALKVNEGAEKFREFFKRFDSNTGEWTNAKRISSLESKVFGRAERAFRSACSTVPFRYELIKREMLRQLEETDAREWNAFDQKVPLINPNRTTQIRNAHKIRNREIFSGKII

SEQ ID NO: 143627 - protein, 536 aa, Heterodera glycines
MPPPHEKTTLRSFLGALNYYGRFIKEMRQIRTPLDQLLKKDENWKWEAEQQQAFEKAKEIMTSELLLTHYDPSLPIVVAADASKDGIGATISHIFPDKREKVIEHASCTLSSAQRNYSQIEKEALALVFAVQKFHKMVFGRKFTLLTDHKPLLAIFGSKKGIPIYAASRLQRWALILSNYEFDIKYVNTAAFGQADVLSRLIANYPRPEEDILIANICTETECFINSVFQVQIDQLPLTAAEIADATAKDEILSELLRLPKNGWPNKCNDPNIAPFFPKRDEIVEVEGCLLYQQRVIIPGILRGRALKALHLSHPGIVRMKALGRRHIYWPGLDSEIEKTVKSCEECQNAQKNPTKSTLAPWTPTSKVSERVHIDFAGPCDDGFVYLIMVDSYSKWPEVCQMKSINSQATVGFLRSIIYRLGVPEEIVSDNGTQFRSADFAKFCTEFGIKHTFTPPYHPQSNGQAERFVDTFKRAMKKCSKNDKDWAEKALLSYRTTPNATSNGYSPDQLFFGRKLRTKMSLVHPRGEPIENIDHD

SEQ ID NO: 143628 - protein, 103 aa, Heterodera glycines
MNAAKLEQILNAVLTQSETRMQQLLGNAVPANNNLSNANLASSIDARISKFYYDAESANTFEQWFKRFGTLIEDDGKDLPEATKVRLLLGKLSDEDYNKYRDS

SEQ ID NO: 143629 - protein, 81 aa, Heterodera glycines
MAEETSKTSENIAEDNGIKVLDSLFAAVAHASKCLAFAAGTPNFCLATPAFLAVMPVAVLFRSYRRDGNAFTVQAAYNVIL

SEQ ID NO: 143630 - protein, 28 aa, Heterodera glycines
IFFVCVSNIVRLFDRARQEKATVGTKFA

SEQ ID NO: 143631 - protein, 178 aa, Heterodera glycines
MADPLNTRGSTLFQAISPECYANSGTFAHITGLMPNHEYRFRLAAMTATGDVLYSEPISARTRHEQAPVVYNSKERRELDGTHHQQQHNDNRQKNVQQKPIAPQLSAEEQPEETTATSRAMLPKAPNCSAPTFSALTSESARVAWKLVKSAEDGGTKELSPKVEKQRKTAKARRRHQH

SEQ ID NO: 143632 - protein, 113 aa, Heterodera glycines
MGTEFKGLYEEHKKSEKARKKYLKNQPKQPIRAAVANEFSRHKIGYGPDPYTDFYGSIVRIFFGRYGFFTDNSFPWFLVRNPYRYQVRNTDTDPYFRKIPISIDYQRNLFKNA

SEQ ID NO: 143633 - protein, 40 aa, Heterodera glycines
MQMTKRRTALSTPKQDVIVRGIGIIIVVKFILKIVTVYIK

SEQ ID NO: 143634 - protein, 66 aa, Heterodera glycines
MTIVTPLWVGAMDGHFEVCQALVKHGADVDLGAPQFAMSPLMAACNINARLDTGLFFISKHTQNLN

SEQ ID NO: 143635 - protein, 17 aa, Heterodera glycines
EYEADALKSDGELEREE

SEQ ID NO: 143636 - protein, 273 aa, Heterodera glycines
VEKILSKIYFNLKSPASFAGIQKILNAAKKIDPKITTDDVNKFLEKQKTYTIHKPIRKRFPRLKTIPSGFHTDQCDLCIFDQLKKHNDGYKYLLVCIDVLSRMIFSAPAKSKKSEDMIEAFDRVFEKSKIIPMKIYSDSGLEFQAGKIKNILRKNFIKNVMYSPDLHAGVVERANRTIKERLYRYFTKKDTLRWVDVIDKIITNINNSVNRTLGAKPSSINLKMPVRSGKNKFKIGDIVRITRKNKFKIGDIVRITRKRENFKGIPPNFTEEL

SEQ ID NO: 143637 - protein, 18 aa, Heterodera glycines
YREAIPEGFGLPINLGAS

SEQ ID NO: 143638 - protein, 118 aa, Heterodera glycines
MAHQMARAAINKGARVLSVLEKVKLVCWFEETHSFAQVARRYRAEFGMEPPQMDQVKKLHQRFLNTGSILNGTTTPQTMATALSAGIDDVVVNQSQQMSVVCDAGALDAEEQLRMARM

SEQ ID NO: 143639 - protein, 278 aa, Heterodera glycines
RAEEALGAETTPLGAELEKLCANAERIAVQQEKLMEKMELYKQKLSSGLAHGTAMLVASKVVGERTPFGEALQKTAQTLAALDAARRQLSKSDVKLGGTTTTISAIRKQLALLQTKRLDLDVFKAKFRRASTTEEKNAVRMFFVVVAAEFTIFQSFSDSAPIATSTERVHAPSNTAEGARLGLPEEYAEHEEEPAGVRGGPNQIPHDVSSGEIQQLCAAATDAFKRQPSLVEILPPVMVCGDVHGQFPDLMRIFNCLGTPPEKKYLFLGDYVDRGAPI

SEQ ID NO: 143640 - protein, 53 aa, Heterodera glycines
MDKQKKRTTENYEKELIINIIEFLWRGGVKKSFAICKGRDWHNPRLTAYAPIS

SEQ ID NO: 143641 - protein, 75 aa, Heterodera glycines
MMTTAAAMTTSTTPQLQHHHHHHQQQQQSIFARLSATIGHHSQSEQKLARMRAAYSGANEGGGGASANAKIQKAG

SEQ ID NO: 143642 - protein, 21 aa, Heterodera glycines
MRTRPIWQVKQRLLTSQKKGF

SEQ ID NO: 143643 - protein, 149 aa, Heterodera glycines
MEEWERSFQVAAKRWKNDGQGVPQHNRRPMGRVATPVMSYLDGIFQRRAKVPSVASMRVTNTAREWINRNRDEMGAFPPATAHRPALMQPKIEKHQAHVNDDYRERQTYPIRRHARDEGEHDRKHGRDEITGMTTFETVRLQPPIPFCV

SEQ ID NO: 143644 - protein, 295 aa, Heterodera glycines
MRTITQTTQPQLLIGIRKFWDFVTGFRKTERGTYIVDTVFGPIVCGERFQVSSGATPAPSVFMTLPCGEDERDQMPPIRAVEQFWSLEAIWIRDDPTDDADAQAVIQFERSVRQLNDGRYSIRLPWRECHPALPTNFSMAYRRLTTMLQRLQKTPEVLKQYTTVITDQLNAAIIEETTIGAGKHEHFIPHQAVITPKKLRVVYDASAHTRGAPSLDGCLLRGPVWLPDLADMLIRFRACRVPVIADVEKAGDIPISTPRIWAHAKPLLSRRRCTTPPAQIRLQLRGGTHSGHIRG

SEQ ID NO: 143645 - protein, 609 aa, Heterodera glycines
MRRALEDEEEAIARSRLSGSFGTNNSHPVGDDPPPLENRNMEEWERSFQVAAKRWKNDGQGVPQHNRRPMGRVATPVMSYLDGIFQRRAKVPSVASMRVTNTAREWINRNRDEMGAFPPATAHRLALMQPKIEKHQAHVNDDYRERQTYPIRRHARDEGEHDRKHGRDEITGMTTFETVRLQPAIFSGKPEDWTTFWAYFKRAVDDKPIPGFEKQLHLLRCLKEGSPARRAVEVYPPSDGNYPVVVQLLKERFGDTDDLQRAIRARLLHLAPAKDNVNSLTTMIDEFERCVCQLEQLGANVDDDSFGPLLEAKLPVRLLTELRIRESMMGSKWSVRDFRRAVSAQVRCMRSAESALAAMKDPEVRTDHRTERDHTGRGGKAGREPFKEHLWYGTANKTRAQPNGTRKEEQCGTSARFTGRTVARGNENGHTGGGGNGPRFAQNGLPPSFGRGNCSFCLESGHRPSECRAYPTPQERRKRLIEQKRCLRCLGSDHTFEQCQRTVRCDACRKDDHHWLMCWKNQPGNQSRLSGEPERKENNHAMLISGMDQPTHVTTARDEPNSRDISETNAGEQRAFTAFGSRVPAQQMIRRVTAAAEEGEERVPNNIAV

SEQ ID NO: 143646 - protein, 94 aa, Heterodera glycines
SVHLNNFYPKNFFGDFGADPLNRCAQIYGETESFRNRFPIACTLILRWIFAPHNCLSTPNGHLKKSIFLLSGQTPRTDAPRFMGRPNPSGTASL

SEQ ID NO: 143647 - protein, 228 aa, Heterodera glycines
MALAKCPASTVQILGAEKALFRALKTKKDTPKYGIIYHAQLVTQAGQKSKGKIARKLAAKVSLATRVDALCDESLGNGQGIEARVYIEQAIKEADARGGAKKQRFSGVKQAPKGAYTFKKGEVHHYDAKFDMTLKKGTEQAEEPQQEEQQSGKAKKGTKRMRSEGETEGGEEETEEHQQKEKEQKKVKLEETEGEEGEATRKKAREETEEPSGGEQQKGQKKKKKSKG

SEQ ID NO: 143648 - protein, 115 aa, Heterodera glycines
MGLNPPAFQSLGLNPPAFQSLGLNPPAFQSLGLNPPAFQSLGLNPPAFQSLGLNPPAFQSLGLNPWDSTPQHFNHWDSHPQNFNHWDSHPQHFNHCDSHPQHFNHWDSHPQHFNL

SEQ ID NO: 143649 - protein, 40 aa, Heterodera glycines
MCDRLTQIQDLVNDLANHMCNSVGVLQASAGPCEFGTAPE

SEQ ID NO: 143650 - protein, 302 aa, Heterodera glycines
MKQFCLSLFSIGVSVWLLTIFLLLMIMPSSIDGIQITVKADAMLTKESNQTTVVVQGSTTVKELKELIKKEAWRIQSEKKTFGIKNPDDGTVTVLQDSDTMADNKIEEGAVILVFVNFEIKVTAEENIFNEQSPIKTKIITVRVNGTEKVEDLKQKIIGKMEMETKTKIGTELTKISLQYGPEDDYVFLNDEKKIYYYQFQKSGIIRLSIGEFQIVVREEIENEVKNYPIWVKSNETVAILKKKIKSLVEIEPEEQTLSWTLNGQTFDDNKTLKFNLIENALEYYGTENNTTITLSREFKIT

SEQ ID NO: 143651 - protein, 219 aa, Heterodera glycines
MRPFAKNLCASMAKALGAAAPSALRELKLAGVRLLSNAITRLSSVAHLAVTAREVLQSDEQMAQMHADFARLDFAVLHEQVEWCCDWSSGWLRSLEEQFGAGLSQRRRLEEWADWLDCLAARVLQTPAPLTPARSPQDTPPTAPEAQFVRGKQLLLAWTFWSSLVLRDFTLRSAASFGQFHLIRLLFDDYLSISVERRLAQLSGQPAIALMAPEAKSRQ

SEQ ID NO: 143652 - protein, 179 aa, Heterodera glycines
MFPIGEKGQPKRAASFISLKGNDAEREEKQQKCQNGEMAQSRKRISFNLPIEEEGQQQQIKRRSENALGIVQQLRRWSTRDGEGGKRSKETDGVKNDTILEKGQARRTNSNASLLTIQKQQFKGIRRHGTIARILCRWNGQKQAERETAIDDSAQQKKTDDQNKTDDQTDQNENGGWAY

SEQ ID NO: 143653 - protein, 111 aa, Heterodera glycines
MRIKKIEIEGFKSYSQHEAVRDLDPEFNAITGLNGSGKSNILDAICFLLGITNLAQVRVHSLNELVYKQGQAGISRATVTITFDNDVPPDKQPAGYNKYKEIVVRRQVIVT

SEQ ID NO: 143654 - protein, 216 aa, Heterodera glycines
MNKLSENAFSEYNKFYLPKKVTDFNYDEAVKNLEKLFAKPQSIFIDRFECLTAEKWENEDFCQFINMHKQLLNNFKFVNLKEEQFKGLMLLTALKSSRDTVLRQCILSKLASYGESVKYDEVVEDCINFMTTITEAKMIEYSTSKLVVNAMKQNVNKREKGSNPKFQQGHTSAHTPKCWRCGKLYHSYKDCLHKSAKCHKCNQVGHLERQCDKVQE

SEQ ID NO: 143655 - protein, 219 aa, Heterodera glycines
MCYKSVLSGEENFPWKVSRRFRFFSYLLDKSGKCGKKVRIAMNGTQFSMGRECFNITPHSKIEIQFDANKCSAQINLNETNKPLLDFGKEFSDQFNFGPFLDDYAGLWLLGLDILPKFGPKTTEISMEKPKNCQLEMVGGVEIDIKTVPWTVLFQGLVKRNEQNKMKIFQNCASTFISPEFVLLAAHCFDKTKEGKYFHLGKKQKQFKCSLNALLITLL

SEQ ID NO: 143656 - protein, 178 aa, Heterodera glycines
YYFLFSCPDGGEVWKEPNGVWKEPNGAVRPCTTNRQCPSTHYCTPVTVFSGTVYQTKSLCCPSKNFVCSQPKDQGVRCSSTRITRHFFNADDQGVRCSSTRITRHFFNADTKTCQPFEYNGCEGNRNNFATQKSCQNYCLSEACSPGTVVARDSDSIRLIQCTNPGGTGRDGYSCFSS

SEQ ID NO: 143657 - protein, 95 aa, Heterodera glycines
VSPLLRDSQSKHPPPSLMDLASALKSPAEEQNEERRLLDDEVVQFIIKNKLTLINTLIKDCYYFLIEMGDEWKTAIRIPLPLAFVSRYLWATDKL

SEQ ID NO: 143658 - protein, 19 aa, Heterodera glycines
EPMNSCIGCKCRRCCTPNS

SEQ ID NO: 143659 - protein, 80 aa, Heterodera glycines
LMPALRCVAVERRALSRPFGRRTDENVHIGTIDALRLFRCPGTSEDGPILCLSGARDRQITLRKCQCGEMPASVSSPNDN

SEQ ID NO: 143660 - protein, 95 aa, Heterodera glycines; identical to SEQ ID NO: 136988

SEQ ID NO: 143661 - protein, 80 aa, Heterodera glycines; identical to SEQ ID NO: 142591

SEQ ID NO: 143662 - protein, 111 aa, Heterodera glycines
MTITSTTKKNSTNNTSPACQQVTKVKRTKKEQFLGRNCPGRNACRNITEVSLIKSIISDGVIGILFLGGMRDWVMPLDFGHADAEAKHLIHIVANCHREEYSPITTHCERE

SEQ ID NO: 143663 - protein, 191 aa, Heterodera glycines
MRTVGIRGQGQMPGGQEAEVQRVTNWGHFALYKQQQPQCIYDKAVMAIDAAHAHANAAQRARHVAAGVPEHGRAAAGAHHCVRQHFGRPTNGRGGGPADVRDWQGAEPGSAGVLLQNDEDHVQLAEAGRDANVGKFKIWHSQLAEFSAKHVKSSLKLLENAVDEQQLRTSGKWQFEQLYNNAQREGVCFAK

SEQ ID NO: 143664 - protein, 24 aa, Heterodera glycines
RTLSTAVRQRSSKIYSMPQILWAG

SEQ ID NO: 143665 - protein, 48 aa, Heterodera glycines
MTFYASLVGYTGRNNKILSVKSAFGILMSKSGTVNEILCFSCWIHGKK

SEQ ID NO: 143666 - protein, 48 aa, Heterodera glycines
MTFYASLVGYRGRNNKILSVKSAFGILMSKSGTVNEILCFSCWIHGKK

SEQ ID NO: 143667 - protein, 48 aa, Heterodera glycines
MKFYASLVGYTGRNNKILSVISAFGILMSKSVTVNDILCFSCWIHGKK

SEQ ID NO: 143668 - protein, 1120 aa, Heterodera glycines
MSGFIRSKIPLLNRVLRKEIQSTKTKIEENKFEFDQNNLDECTRVFNKTKEIIQKIEPNFEKLKTLHKKWQNLMRRMDKEEWNTEWKIQKIFREKHDYLKTIKETDEILDTLKDINLEVKRRLKVIKAKPSSDTDQEDESNDDEEENEDEEIEEEDEEEKEYDSDQEDDSPELTSNDQTNRKQTPFVNYRSRIKLPPQTLTHFSGKFSQWPSFWDDFKSSVHNDPNLENIQKLKYLRGLLHDEPYRIVSPYPLTNKNYPIIIKLLKSRYGNPQLIRENLHSELRNLRKPNESTSELRRFILFIDRIILQLQSQGEEINHPQIKQSIETKLPFNIRLKLREKFKLYSTKELMNFLNSHTQAREDIERMEDSNRQIRNFTPHRPPQNRPQRQSYPNYSQPQLKANHRNHQNMPLSPYPITSALTTKSKPVRLAEFKPKPSQPKPQTKIKFCRFCERDNHLSKECKIYSTTEKRSNRARELKLCLNCLKKGHHLKECKSPFSCFNCKSKHNTLLCTRKTNQFNQREQFTNVNVTQNPEEFEETQNFMSLDCDQTDEILQNDEEELLMTTEAPVLNPDQNRTQNEVIFFDNGSQKSYITDECADSLQLPTIDEKLLAISTFNQNKPKIISSRLVKIGIKTLNGEIEYVTLQTVEKITDVTKMVNRETVDIRKRKIPINHACPQILIGIDHYWHFMLPNSQIQILPSGFYSIDTKLGKILSGKGTIEDTNINLVKEKRKKDETNEILQKFWELENIGITDSPHLTDEDTALIHFDKNVIFEENRYYIRWPYKRETPNLPTNFGLCLGRLRNVVKQLIKNKQLENYNKILQEQMDTDVNEIADFKSKNLIHYLPHHPVIKESSNTTKIRPVFDASAKLRGSNSLNDEIHQGPKLLPDLCGMILRFRLKNFVLIGDLEKAFLRVGLNEIDRDTTRFLWVNQSYLDEINQKYREIEMRDVELRRFTRIPFGVNASPFLLTAVVNLHLSKTDEMFEKFKTLQIDEELCLSGKEKQFKELCTELKENAYVDNFVMMCDDEKEIKFKHYWSKEIFKLASMNLREFVSNHEQSNKEIQKMEGSEIPKITKMLGIKWNVDTDELELQIKIPLMSRDTTKRQILTMIAKNFDPM

SEQ ID NO: 143669 - protein, 88 aa, Heterodera glycines
MNAFLSLFGILLGLQFHAQIVSATVTASLKTATTWNGGGQYMVNFKNNDGSKTVCSVKFSLTPKSGECAVDHLLLAVAAAILLHVPLA

SEQ ID NO: 143670 - protein, 37 aa, Heterodera glycines
IKVNIEASNQVENVLFMLNISKQVRRKKGICLKMRSL

SEQ ID NO: 143671 - protein, 22 aa, Heterodera glycines
MNWSNGRWQAVWLVVSEEGKEL

SEQ ID NO: 143672 - protein, 57 aa, Heterodera glycines
MHPCLLGWKWADKVDDEADENESTRSNGTFACKWGGEAGDDEEEDESENECIRFNDD

SEQ ID NO: 143673 - protein, 45 aa, Heterodera glycines; identical to SEQ ID NO: 124527

SEQ ID NO: 143674 - protein, 104 aa, Heterodera glycines
FCVGFLLPSLFEYPKRTLEKIDSFVFGAVPPSRCAQIYGETESFRNSFPIACTLILRWIFAPHNCLSTPNGHLKKSIFLFSGQSPRTDAPRFMGRPNPSGIASL

SEQ ID NO: 143675 - protein, 22 aa, Heterodera glycines
EEIEKSIVSSRWQTEGYIGAMD

SEQ ID NO: 143676 - protein, 22 aa, Heterodera glycines
MARKDFRFPTFLGSEFRLPKIF

SEQ ID NO: 143677 - protein, 101 aa, Heterodera glycines
MDLSDLAVELEDSLNLRHDGAVSEEDWLFGPEDGIDTSAAVKTTEEKQNLDKWLRGAVEKVDFRTRSALSRRLEKKKRKADKEKRLKCSNNAENSLSMIEE

SEQ ID NO: 143678 - protein, 110 aa, Heterodera glycines
MVDQWRRRNVRPYKEEFEEAKRHSIHTMSGFIRFQTLEKSKLSIYPTNFLKSVAQKHIGDDVVNNRTIETVVGALVDLAALQSNHSLVKWMPHFQCPIPCEHRYTVWRNL

SEQ ID NO: 143679 - protein, 32 aa, Heterodera glycines
MFRFLLQFFAFLSVTIAQNFETGDNSTVHGCS

SEQ ID NO: 143680 - protein, 21 aa, Heterodera glycines
MRTRPIWQVKQRLLTSQKKML

SEQ ID NO: 143681 - protein, 70 aa, Heterodera glycines
  unsure (1)..(70): unsure at all Xaa locations
FEYPKRTLEKIDFFVFGAVPPNRCAQIYGETESFGNSFPIACTLILXWIFAPHKCLSTPNGHLKNRFFWF

SEQ ID NO: 143682 - protein, 24 aa, Heterodera glycines
RTLSTAVRQRSSKIYSMPQILWAG

SEQ ID NO: 143683 - protein, 30 aa, Heterodera glycines
KESRRRRALSIKNVLSRCTKKLSVGDPQKT

SEQ ID NO: 143684 - protein, 258 aa, Heterodera glycines
MSSKKLSPTEELEKQYRDYKAQFEEWKEKNRDSVGTEAYINYVKQFELWEKDVEKRRAALRQKTENERLATAEREAAKLKREAEEKKKAEEAAARAYAEEQAQYMAMHQRALQDEQLQKQRVRQQQSVPAQQHQSPMKQSLSTTQLDLLSSPVSDCKASPTQQPQQKTIPTNGKPDEDTSGADMLSAMQQMFSIVMGTNMAPSTNEKTVFENSSEMEENAAAAQGTSPQKLQQTQLEQTQPPQLWGTDGTTFTNSVGH

SEQ ID NO: 143685 - protein, 63 aa, Heterodera glycines
MSLAQELLADLEEDGDEEMQDLEVKKEEEQDEDYIDEVTEEKSFPNLSKYDRITDVAKLTSSA

SEQ ID NO: 143686 - protein, 95 aa, Heterodera glycines; identical to SEQ ID NO: 124528

SEQ ID NO: 143687 - protein, 124 aa, Heterodera glycines
MTQDTANDLGIDIRSRSNLRRKKDGTIETSDLCCLAPKCKNNVSKEMGYSILNCGHKCHWEEEYAKWVSGGQFKRCPNQRCKKNTIIKCSCCKKNIGYGLFECGCYCTKTAQDMDMHADKLEKM

SEQ ID NO: 143688 - protein, 68 aa, Heterodera glycines
MVEPFAVNDPVEQIRERLVEEFLDQEIFKTLKKKYAKRNSGISFPYANFYAKLEAVLITMNRVTNHTT

SEQ ID NO: 143689 - protein, 307 aa, Heterodera glycines
MFLSGKDDESSISAIDRKLWQGKTTIKISDLEKAQNDIGKLEDGVNRAFRYMNRSLNQKVNWVKDVVANTNANFETLKVQYETLTERVEMLEQDSDGTNSGGTVSITNQNRASRAPFVTPMGNAQPNQVVPNQVPIHQLLSEDEDDGPTLFGLNMLSSGPTVGSGLEMFCEESVFAFDDWAERFKDYLSVSGKAYTEQEKVTRLKLALRDTPRALFKELLPAQTDTLDSALSELRQKLDSPQRREIAKRTLSLCKQREDETVAQFLRRLTPVVDATNSSLTGDIRKEKICEEFLDRWKPNISFLIRL

SEQ ID NO: 143690 - protein, 35 aa, Heterodera glycines
MARLVNQFEKGAKCQKKNLKLFQVKRLIQVLKSIQ

SEQ ID NO: 143691 - protein, 447 aa, Heterodera glycines
MNHFGLSQFSIVTMLTLMMPLSADNMIIEVLYDIYTYPVLVNKKDTVATLKAKIQEIDKFGNIPIQNQVLFSGISDNVLADDKTMDEYGIGEETIYMEVVAYAGSNFHIHVNYRRNRISVLAKSTDTVKDLKKKIANIDELGNIPIQKQTLSKKITCTFWIELADDETIDKYGIGEGKELFLSSDEFQFLVEYKEKMNSIKVKAMTTLKEVKEKMTEITGIPSEKQTLYHFKFGQCNDKARVIDFVKEDMPFLTMSDGSGITVRWQDHWEFFVINVNSTDTVATVKRKIRAINKQRHKSKLNGVIKLSKCDFDCKYAKALRGGKTMDEYGIREGNTIFMEVVTCDESSRQWSFAAFEDGSNFHIHVEYGSRRVIVWVTGTDTVKDLKDKVRPFMEADWNKKFGDISLSKQHPSRADIDQLVDNAKTMDEYGIKEGDTIESLDAEELG

SEQ ID NO: 143692 - protein, 84 aa, Heterodera glycines
MSAGERRRILILVLLKLGFDSRNSYSYLIICKMATIFSLNKSHINLFSKTTKNIIVFVKLDFVRVRVRASELGEMDLKKYFKKF

SEQ ID NO: 143693 - protein, 38 aa, Heterodera glycines
MRIERARFDEVLVSQKKSKYLKIYKKFKNENSCEIFWK

SEQ ID NO: 143694 - protein, 26 aa, Heterodera glycines
KSVKNLKMRIHARFSGNNLNWALLSC

SEQ ID NO: 143695 - protein, 151 aa, Heterodera glycines
FQSLGLNPPTFQSTGLNPTAFQSLGLNSPAFQSLGLNSPAFQSLGLNSPAFQSLALNPTAFQSLGLNPTAFQSLGLNSPAFQSLGLNSPAFQSLALNPTAFQSLGLNPPTFQSTGLNSSAFQSLGLNSSVFQSLGLNPPTFQSTGLNSPEF

SEQ ID NO: 143696 - protein, 90 aa, Heterodera glycines
MAGTLDNKLYSWGMHKWAAEGQQPKENDGGADQSAKAAEDGAGGTSDCSYLSSTATSLTNSDGNMATPVEQPKQQKERKKRKKSKSTKTT

SEQ ID NO: 143697 - protein, 75 aa, Heterodera glycines
MDAVALVDANCHAIVQMVEQGEAKSEAEDGEDQQQQTLVTKLKTLNQAQREMIYDKENFKKIFKTENFEKNLRIL

SEQ ID NO: 143698 - protein, 40 aa, Heterodera glycines
MPTKTNLILHAGGQKDAQIDGIANDAQAKLDGENLKIFAL

SEQ ID NO: 143699 - protein, 212 aa, Heterodera glycines
DARKAYETRLKNATNGNNQADCRIKNLEKELKVLKRQLSALGDLLDQFLDTSLAMRERTRRMEDELGRRLERLDAQMRANLEAMGRQTHKNGNNEQRNEAEQTIETIHLDELSIADEVPLEQNIQQQPQPSNVSNCPANDEGGGGDGIGDELAHFLAGLTPVDEMGQLVLNKFKYSCEFAQLLYTGGGHVDSVFCNIFSGYPPTFFEELVEA

SEQ ID NO: 143700 - protein, 34 aa, Heterodera glycines
MGFDLWRKAQPESAKRPKRVLKRTKFIYKLNKAL

SEQ ID NO: 143701 - protein, 95 aa, Heterodera glycines
MAEVKNDFKTQKIWASVDETTDSKGRYVANLIIGILDGKLHNPHLVAVKFLDKTNHETVARFVNDNLRELILADDLWLLVTDAARYMVKAAQVWT

SEQ ID NO: 143702 - protein, 16 aa, Heterodera glycines
EAIPEGFGLPINLGAS

SEQ ID NO: 143703 - protein, 22 aa, Heterodera glycines
MTPALIALVLYALLPLVRGVVV

SEQ ID NO: 143704 - protein, 89 aa, Heterodera glycines
GAIIRCLSNIVFEHRVLGEHKDLSKDCKKQLRVAYLQQEQVDFDDKQHMDDADPQLMKKCAADLQRYNCMAQQRFEDVVECLRVNFDNL

SEQ ID NO: 143705 - protein, 79 aa, Heterodera glycines
MDKFTTGLGREKNSCKYDIGKYCGNQKGDKVLDCLMNTKIVRLLQKRCLKVVKERMLERVKDDRLNPSLLETCQKEAEQ

SEQ ID NO: 143706 - protein, 274 aa, Heterodera glycines
VVKERMLERVKDDRLNPSLLETCQKEAEQYCADDYKKINNPQYSQQQLGPIIATCLRTQFAKFGSGVHLSMGCKDELSKLILESEFDIQLDPALYKACRSTINKHCANAIIARGGNYDTVLECLKADFYANQIPDRDCAQQLARRTQESLIDIHLDPGLHEACSVDIQRVCRDVPPGQSRIIMCLVDAARNGQVHLSAACQTKLTDRNKLWQMAHDEYRMALPETWSEAYSIIVNHPKRTSILSYLGIGLLVLLLLGCCLGRLSKRTYNELKNR

SEQ ID NO: 143707 - protein, 38 aa, Heterodera glycines; identical to SEQ ID NO: 130615

SEQ ID NO: 143708 - protein, 154 aa, Heterodera glycines
ELNVEADDPLQSYKERFERSYIEGTEQFYKCRTAQLLEHDGVLNYMVYVDGKLAEEEERAKRYLDSSSPESIAKANIGHFVDSFKRLVGGPMRSSAGDRISRPTFGRWSDSDQKQRGKQAEDALPTDQSDTRRNSQFAQRLAQTHHGRRTRRHA

SEQ ID NO: 143709 - protein, 74 aa, Heterodera glycines
LFLEPIVAAQDFDVFVPMMMRKNIELQLQALKMIEHLNGLLPNSLKLGQEEADMWNSLTDEDDSERFIMISVLK

SEQ ID NO: 143710 - protein, 158 aa, Heterodera glycines
EPAAFDSTRGNLTVFLVRGAICLVYSDNERDSSLLNSWLIASGHNFLEGFSVFSRTKLSNNRSVMPLDVRGCTRATLAKSACLPSPKGVGKPVKICRDWDRTLQLLSVNEEFLVGASHQLALNTSLPFVHTARRCPGLSHFEKFGDGCSGRSVCRLEP

SEQ ID NO: 143711 - protein, 228 aa, Heterodera glycines
MESGKCVRRFRTHTDFVNGCHPARRGPSLVVSGCDGGKIIVPLPWASITYAFVQVHDVRRRGPVATFESVNNYQVTSVTFNDTAEQIISGGIDNVLKIWDIRRLGLLHILPGHTDTVTGLSLSPDGNHVLSNSMDCTARIWDIRPYASSQRCVKTLTGHQHNFEKVQLTVKMRPSPLFFGHQTDTEFHVDRVTVSCTFGTLVPETLLTSCPAIMAQLMQQIFTLRNQL

SEQ ID NO: 143712 - protein, 70 aa, Heterodera glycines
PCTSAMANSPKPSRAPSANGGLSNKQQSKLTIRRRPVPFRDALVVRSAAKKMVVNMTEVFKRPALPLVPA

SEQ ID NO: 143713 - protein, 24 aa, Heterodera glycines
LTHRPLRRKNQLNCTWSPKLNRRV

SEQ ID NO: 143714 - protein, 225 aa, Heterodera glycines
LWREERIYCIECFLEVSHKSNIKDLCKCFKLRNFVKIYCATCDRRIDPFVWVRRAREFFYHLACFKCEHCKRQLGTGDQYSLDDSRLLCQMHYTELVLGEQSESSSKQKTKRVRTTFGEDQLNILQQYFKSDSNPSDSNPDGADLERIAHLTGLSKRVTQVWFQVDLLRDPKATKRVNGNAYKRQHILQNKLVSKPRPNLSNCTSSHDTQLKGSIFEIISTIFMY

SEQ ID NO: 143715 - protein, 75 aa, Heterodera glycines
MYFPEDVDFTARIRSIVGSLPKEIGDFKAITLKEWEGGSDPQAKIELLRSIEADLKAERKLREERNEIKKKSKGK

SEQ ID NO: 143716 - protein, 100 aa, Heterodera glycines
FKIQTKIVFPPLVQAHSNAITKLDKTGNDMIQHDHYEKETIRKRLDRLHDLWDRLFAMLENKGIKLQQTLKLLQFVRKCDEMLYWIKDKSTARIAGRGFE

SEQ ID NO: 143717 - protein, 56 aa, Heterodera glycines
MREAKPAELEDVVSEMGIYGSLIGDQSNGRILHNAFDGHTIRSKAKGYFFLSSPWP

SEQ ID NO: 143718 - protein, 129 aa, Heterodera glycines
MASDAMTRRRTISGLEYEDFSQNEGKMLLEEEDEGGEGGGELLGGVVGRRNVVQVEHEHHLLEGSARLKGQRKGKSDGRSTDGQWHRLPIRYLQGAFPAQCDAFLNCRERKFDVILRLDRSQHPLTKSG

SEQ ID NO: 143719 - protein, 216 aa, Heterodera glycines
QHQINDLRQILDMKQEVDEAYLLRWLRSKEGKFDEAADGIRKDLVFRKAWGIRKDLVFRKAWGLDKIVNWEAPEILEKYCGYGFLILEKYCGYGFLSDHDGNPILMSLLGNTDVEGMLRSVQSKDYIKFSLAAIEKGITLCRERALQTTGRPFEQMMLVFDLDHISSAHYSSKQFASSFTTLVLLFQEHFPLVLRKILVFEPEMVRRLVIASLAIF

SEQ ID NO: 143720 - protein, 88 aa, Heterodera glycines
MDQKSRNMAIKYGPKIAKYGHKMAKISKYGHKWQKCQNMDINFSKLSAKFLQIYWLKLHMRYISKFFDSASHSPGKKYGFPCNSIPYL

SEQ ID NO: 143721 - protein, 48 aa, Heterodera glycines
LQIYWLKLHMRYISKFFDSVRRSDKDGFRFAISRSTFGNWSRIFSAIT

SEQ ID NO: 143722 - protein, 20 aa, Heterodera glycines
MFWFFKNDNVYTIFINYDNL

SEQ ID NO: 143723 - protein, 129 aa, Heterodera glycines
KNRFIFVFGAVPLNRCAQIYGETESFGNSFPIACTLILRWIFAPHNCLSTPNGHLKKSIFLSFGADPPNRCAPIYGETESFRRIFPIYCTLILRWIFAPPNCLSTPNRHLKKSIFFFSGQAPPIDVPRF

SEQ ID NO: 143724 - protein, 22 aa, Heterodera glycines
MVAEWTGSEVFSTEESVQLCPK

SEQ ID NO: 143725 - protein, 15 aa, Heterodera glycines
MTANLAWPLDESSKP

SEQ ID NO: 143726 - protein, 58 aa, Heterodera glycines
YFADEFTEHNHCRNIDLTIYTPNPKLSNASAHLFLGYDEQIAKGPWCYVEKVYGSNLF

SEQ ID NO: 143727 - protein, 78 aa, Heterodera glycines
MVFERTFQGEIVVKCQRRFEGERLFALPFSGYPRPRATFNPLPNMKSCDSGEGVMSLLKVQKWAIPRNVQKSKIKFFL

SEQ ID NO: 143728 - protein, 30 aa, Heterodera glycines
MRRDVASVGPGETDQNWGPILEWTGAYNKM

SEQ ID NO: 143729 - protein, 103 aa, Heterodera glycines
MHLALGLSRTNNSLEGWHAIWNAHLKGNQRLSGFVRKMIEEDDMWSQRIIDYQIAPADGIRGPHAARKGKYVRQDNNLNALLQDIGNRDPLEYLRACAYHLHF

SEQ ID NO: 143730 - protein, 76 aa, Heterodera glycines
EASSSSFLSFLPVSDRLVSNQRFFSFTPSYSSMAEQTAPTKTAAWLERLKSSPIDVLPIVGAVHWASRDRTKPPTR

SEQ ID NO: 143731 - protein, 117 aa, Heterodera glycines
MLSNFFCGEIKKLPVPTAASLILLLVLLSVIALVVIVTLTRRTKAVSSNKSETPEVPSDLADEAAESSDSDEGRGGVSTAPPDMESVVADEAAEFLDFDEGRGGVSTAPPDLESGRK

SEQ ID NO: 143732 - protein, 53 aa, Heterodera glycines
MSANNGTLFDNQLTIQKVLIIGLSVVGIVILIAIAVLLCWLILIIRRKCRILN

SEQ ID NO: 143733 - protein, 284 aa, Heterodera glycines
NTGTQMCGILNTGTQICGIPNTGTQISGIPNTGTQICGILNTGTQICGIPNTGTQISGIPNTGTQISGIPNTGTQISGIPNTGTQICGILNTGTQICGIPNTGTQISGIPNTGTQICGILNTGTQICGIPNTGTQISGIPNTGTQISGIPNTGTQISGIPNTGTQICGILNTGTQICGIPNTGTQISGIPNTGTQICGILNIGTQPTSISISGTQFSGIPNTGTQISGIPITGTQISGIPNTATQISGIPNTGTQICGILNTGTQPPNIQSLGLNPPAFQSLGL

SEQ ID NO: 143734 - protein, 208 aa, Heterodera glycines
MLSFIYADDVSGLNGDNAMAVLYAGEKFRNFAHQCLRYICQNAGQLFESEEFLQIDQNLLCELFENDQLVALRWADEKCRQNAIECSAGNQRCQLGPALFKIRFPLIPAIDFTTSIVPSGVLTNDELVSVYQFHSHPNLRDVPGLRPLEFPWHERIEGNRGILAMEIEKFSKFARERVGSSRFSDAVQTKGFEWKILAMLICKRNEKQ

SEQ ID NO: 143735 - protein, 81 aa, Heterodera glycines
MEIGVANVLSLIELFPKRSERRICRSKNVTMFLTRKRTTGALQLSFFLRCFWVTDYEYGIHFVIFKKLWKRIQTGSENAKF

SEQ ID NO: 143736 - protein, 125 aa, Heterodera glycines
MTKAVIRVSFAFYFANILEFFFPQNFIRWHFDGTFHRPKAFQIENSLLITKGVRSNNIQSKSNQFAKIPQIRIIGRHFDNVTQTFIGQISLVAHFLCLFNAFAIFSAFLGANFALFCSKERNLNH

SEQ ID NO: 143737 - protein, 51 aa, Heterodera glycines
MQSLKAIKQIHRPIVRKIVKLILIGFILKKFSFSTDEKCKAQKQSYKSTGQ

SEQ ID NO: 143738 - protein, 83 aa, Heterodera glycines
MKNAKPKSNHTNPQANSTENCKINILIGLIKKTVSQPMKNAKPKNEKNEKLLLYFKKTDMFHLHRFRSAGRVFRQFLCNFYFD

SEQ ID NO: 143739 - protein, 259 aa, Heterodera glycines
MQLASELVPKEPKDKTGKNYQKLKSLIVKFKKSKSENFNQNNQQENFEGRKSNNQTQQENTKFNLKSPIESKKTNFNKDVHNGEVSQIGNINVHKREEKKTGNINVAQQNDDVGQNTGRQNTNTQPNDDVGQNTGRQNTNVHNVEQTKNDTGRQNTYVHNVEQTKNENTNLAQPNDDVGHNTESQITNTQPNDDVGQNTESQITNTQPNDDVGQNTGRQNTNVHNVEQTKNDTGRQNTYVHNVEQTKNENTNLAQPNDD

SEQ ID NO: 143740 - protein, 53 aa, Heterodera glycines
PPDNKNSVQTLQQLIASQKDPNAFVFGTNMAGRVGQWLTKRSFEKTMDTELRS

SEQ ID NO: 143741 - protein, 75 aa, Heterodera glycines
DGHADADILANADVVIMNNVFTFFADHAEQVSCWQHLRAHLRPGTLLLHSPSLELVTAHLCPSALGFAFDDWLQA

SEQ ID NO: 143742 - protein, 93 aa, Heterodera glycines
MNDANGKLEAAQKQFEAILASFSPTADGNEQSQQQKEQFLRWVRQRLRRENAMPTKDTLQHSDKRHPTDLSVRKQLGRIAKRLRELVHMSMCL

SEQ ID NO: 143743 - protein, 70 aa, Heterodera glycines
MVNVKKGTVIRCDPAMRQFLKHLDETRALGRPFIVKDLDEFCLFVERDIVPMLEQRMDALMDALTPDTQT

SEQ ID NO: 143744 - protein, 104 aa, Heterodera glycines
MCRAMLRNVQIVVLDEATANVDIQTDERIQQSIRKEFADRTVLVITHRLTNVVTGLGRVLSMADGKLSDDNITTTTNHRPTSTTSTELPKIVVDEAPPPPSSPS

SEQ ID NO: 143745 - protein, 84 aa, Heterodera glycines
MFYFIATYIYLIFFSSFDKSIRKIENFVIILVCPDRELGAGRVGHSGTAVLAAQLAMEYAAQADGDQCAKCCAGGGQKSRTDRR

SEQ ID NO: 143746 - protein, 233 aa, Heterodera glycines
MDLWLLIFIIFCLFYGSKFGKIRSNFDEIFGNGWEKNENEKKMIKMEQIDHNESSAADQIGGENLNGRIDQQKRETIQKFEAIKERLKQKGKYEWKKNNKIEQKIAKLLGTNRDKIYKWKKELNLNKNKIFYEQKKKEFIERIDEFKYLYGQGKQKEFVKELGISNMTFRKWKKELMPNCHKTKNKYSNDDKLKKMKQYFKIKEGNPKISDEIIAKKLGIERATLIRWKKKFA

SEQ ID NO: 143747 - protein, 27 aa, Heterodera glycines
MHRIIAAVKKLVVGSVLAVRCTLCVLL

SEQ ID NO: 143748 - protein, 95 aa, Heterodera glycines
  unsure (1)..(95): unsure at all Xaa locations
LXEYPKRTLEKIDFFVFGAVPPNRCAQIYGETESFRNSFPIACTLILRWIFAPHNCLSTPNGHLKKSIFLFSGQSPRTDAPRFMGRPNPSGVASL

SEQ ID NO: 143749 - protein, 85 aa, Heterodera glycines
MAFVGFFRLLIGHVLIIERFIATMRSNSYETVPKCVFICTWLSITMIVIIGYYNRRIYNHQIEKAAANNYHIGQRYQENIKCLKN

SEQ ID NO: 143750 - protein, 135 aa, Heterodera glycines
MPRTRDVASLAYRLLAIFFGLLVLAFWFLYNSKKLINCENLLTDFVQMTFPSVTVDVFAYIFSFFELFTYGIVLAIAFLNLAVICPTKILHINMKSILISHSVALIVYLFGRAGIIAEKFLSNNQFVSTNVVLKV

SEQ ID NO: 143751 - protein, 39 aa, Heterodera glycines
CPFGVLNIPWEQKSNAELSTGYREAIPEGFGLPINLGAS

SEQ ID NO: 143752 - protein, 75 aa, Heterodera glycines
MPSSPGVSTRCCTSRPSCPTGCSPPSTWASRHRPGCTRCPPLWTNGPAHWHPNIWVPRCWRKQSRRPTAQRKCGD

SEQ ID NO: 143753 - protein, 32 aa, Heterodera glycines
VPSNATNDAFLCLDQPSSLLTDLDDVSCDPQQ

SEQ ID NO: 143754 - protein, 109 aa, Heterodera glycines
MIRRSATVIKRGATMIRRSATVIKRGTTVIRRGTTVIKRGTTVIRRGTTVIKRGTTVIRRGTTVIKRGTTVIRRGATMIRRSATVIKRGTTVIRRGTTVIKRGTTVIEE

SEQ ID NO: 143755 - protein, 286 aa, Heterodera glycines
KDTCITFMLDTNKTAEEGIEVIVDGRKSWSKIGKTLAKWQELSLGWNSNGTAAHELLHALAIYHEHQRDDAFYFIKVNPICRMDGNYQPFNKTDNFGFPYDFDSVMQYPAHIDKQGYYYLITMGRFYQRTIGQDKRLSFKDSAIINHMYCKGVVTITVMERKTSAKMEATQVQNNAMNAFVQKVMLVHIATSWHRPKKGEKAIIKLINLDEKALSCAGICGTNHVEINYRKDKRARGALLCCANGILQQNISRNWIEAEEADVDIIISARFATTDATELFALTYET

SEQ ID NO: 143756 - protein, 42 aa, Heterodera glycines
ANREKAGILNGIKNVKFDCQLSNVMPCFVEKFVKIGGFYETT

SEQ ID NO: 143757 - protein, 92 aa, Heterodera glycines; identical to SEQ ID NO: 125147

SEQ ID NO: 143758 - protein, 30 aa, Heterodera glycines
MKKYCEMCEGNTVGHFLYIFLISLHITRPL

SEQ ID NO: 143759 - protein, 105 aa, Heterodera glycines
MNNGYNQYSNGYNPYSNGYNGGYNPMNNAYNQYSNGYNPYSNGYLNNNGYNQNSNDCFTASMVQDQRACSAMQGQCSNPLIAQTCRQTCCNMQFASGVAFPQFGG

SEQ ID NO: 143760 - protein, 21 aa, Heterodera glycines
MRTRPIWQVKQRLLTSQKKML

SEQ ID NO: 143761 - protein, 76 aa, Heterodera glycines
YQKGRWRKIFLKIFPYILVISFCFWWGAWNSGIMRTRPIWQVKQRLLTSQKVRCRDETNQHCLPRGTRHGPPKEWI

SEQ ID NO: 143762 - protein, 75 aa, Heterodera glycines
HTSIIFFNYFFHFITQRSRLIRSSPNFAGKLLRTLQMLINFLRIFCLEEHSSSHLAHQHYFFLIIFFILSPNVLD

SEQ ID NO: 143763 - protein, 16 aa, Heterodera glycines
EAIPEGFGLPINLGAS

SEQ ID NO: 143764 - protein, 88 aa, Heterodera glycines
MFYSNYFQSVHNLNNIYHQIFRIIYRKMFKWTRKTKYNVIFLLALFFIIFQFMSNNLPPHGNDFAPEQTKSKLQYVLITAIYNRKSRL

SEQ ID NO: 143765 - protein, 29 aa, Heterodera glycines
MAKKKNGEIKKLITRIHVFLIKFFLFLNK

SEQ ID NO: 143766 - protein, 122 aa, Heterodera glycines
QIDHPSPNVQSNFIVKMLDPYKQQPNFFLPHPNHYDHPDQHRQRNHRQHGSAAVAGRHAVGPPMPPPPPQRVPSPNCCSSSAATSSVVSEPISLDLATEQYFGGAAQIMMRLTVPMMNITMK

SEQ ID NO: 143767 - protein, 81 aa, Heterodera glycines
MIRSSALLLISDKIVRFISLIDYPPKYCSVARSRLIGSDTTDDVAADDEQQFGDGTRWGGGGGIGGPTACRPATAADPCCR

SEQ ID NO: 143768 - protein, 63 aa, Heterodera glycines
MHLAQLITLLIFGVIFTSSVVRPSQKLVRQCSFTDEMSNFYASWHTNCRHWHSPRRKPKFNLT

SEQ ID NO: 143769 - protein, 96 aa, Heterodera glycines
IGMSVCARLDFPTAVESLYAQYACAMDWCTVVLSSWLLLWASSSFRQHLVDDFVPKWAKKWLLTNSTIANDNRIVAANGATIILVRPKNAKVVPTA

SEQ ID NO: 143770 - protein, 44 aa, Heterodera glycines
MQPESVRMPKEGADNVTKQIAILEQCLKGTKEAEGLKRKWEKSD

SEQ ID NO: 143771 - protein, 57 aa, Heterodera glycines
MASGAAPCSDQRNSAKAADKAPPPSQGHRSRKWATDGGAAAHCENCVVCGDRACNHQ

SEQ ID NO: 143772 - protein, 106 aa, Heterodera glycines
MVVPLEQYTDKVLRPLPLELANEFVDKCSDDNFHNRPSNTSNYCRQKIFSLTTDFNAAALACDCNTQGSLDFACAEYGGQCKCKPNVIGRKCDRCAAGYYNFPKGI

SEQ ID NO: 143773 - protein, 88 aa, Heterodera glycines; identical to SEQ ID NO: 124691

SEQ ID NO: 143774 - protein, 73 aa, Heterodera glycines
MGNEVNCFYSTDQAQQQFAGFDPLAQQQQHYQQNQQQHFYFGGQTQQQPQQQQFYFGGGDNETELIGLKSTFQ

SEQ ID NO: 143775 - protein, 226 aa, Heterodera glycines
AVIEKLKLDTHSIIVFFVDPLRLGRVLSSSNKVTPVFMVKLISVFACVQVNVAINCSAFVYRSQLRSIEYMASSKHGRDMSQLSFEQFEEKRSKEISGMTFREEQNHNYNAEQVNKKNAIYSILSKAHNPWPFILFGPPATMAYNRNKRLDCISYLAKEAKNRFFGIPDRHNLKMFRVIISTLSTSSYLVSAGGLRGFFTHLIVDEASQATEADTWIPIGWRNSDT

SEQ ID NO: 143776 - protein, 308 aa, Heterodera glycines
MHESRREFNFSDSELLSMMAILHVGPKVDTKGLRNAFFIQIKEHHSDKGGTVQKSQEITRAYRILKQYIDAAILLPGSKNENTFGKKDKGQNAGPSTSRSGCRPTAQGAQRPPDEFEDFGDFEDAGGKRRRRRGGGSRYNNNGHRDEQANDRGNGEPSDETNDANATGKASPAQKFINNYTYAPEDFSTYNDPMERRDRQKDGVRKLRGGLLLYKDFQRGQTLPPEFQEMGTVYSEDDLVDNPIFEHILVKLQIPLANANSMHAFVEKMRTFVHICWAFDGGASQDARIVLQKAQIVQVSQDDDSIYE

SEQ ID NO: 143777 - protein, 68 aa, Heterodera glycines
MCNNWESGDFHPNAANVLEAAVAIVFLGSGIGLLAALMIGIAYHFQSLFFITLRGWLLKRIQFSKQQK

SEQ ID NO: 143778 - protein, 46 aa, Heterodera glycines
KKRSSANDGTSPQLKNIVGPAAAEKGTDGQKEPCICERDQALVVCR

SEQ ID NO: 143779 - protein, 31 aa, Heterodera glycines
MKRFTSLVPKWFPKRNGMSTLWKKSAARYYV

SEQ ID NO: 143780 - protein, 81 aa, Heterodera glycines; identical to SEQ ID NO: 128717

SEQ ID NO: 143781 - protein, 81 aa, Heterodera glycines
FFAYQIFAINAHLFKKYSILLKCSVFCYILRIAVHLKESVIEQISQISRKVQAVAVKIVYIKTMAIRISALGPFSKLMCFY

SEQ ID NO: 143782 - protein, 200 aa, Heterodera glycines
MKQQQSKEQPLRHQQVPPVFEHPFSMCVSGCPGSGKTKWVLRMLSNLDTLAGPAHLSGVLYCYGEVNEDVLRLQQLETETGEEEEEEYKGGQPRRRWVRPCHALPDEEAVKRAAKACGGRLLLVLDDLMVGMRNKILDLLFHRGSLHLGRHVVVLITQHLFTRDLNIQNNVAQSLVLLRIPAATLHGSENPQIYSFFIKC

SEQ ID NO: 143783 - protein, 274 aa, Heterodera glycines
SKPKKGSQRDIRQKGTGKWTGIAALEYGIPVTLIAEAVFARCLSALKKQRMDASKLLPKAEAVFARCLSALKKQRMDASKLLPKPSKKASDLVKDSKKFLNSIGSALYASKVVSYAQGFMLMAEASREFDWNLNYGAIALMWRGGCIIRSRFLDRIQNAFEKNPSLVNLLLDDFFMKAIGDAQDSWREVISTAVDSWREVISTAVQLGIPMPAFSSALAFFDGYRTEALPANLIQAQRDYFGAHTYELLAQPGVAVHTNWTGRGGKVTSNAYSA

SEQ ID NO: 143784 - protein, 189 aa, Heterodera glycines
MQKGSKLIAYFNFFKEYPNAPKFKYIEMPTFCTYDNKTKKWKWPRKKTHKVIGRIYTVNPKNRELCYLRYLLLHKQATSFDDLKIVNGIKYTNYAEACLALGLTRDDSEWDKCLNEASQFKFPRGLRNLFVNILINCEPKYPSLLWNEYKDALSDDLKKNYPKDIAYQMVLSLLNQGLLKFEKSLKDFE

SEQ ID NO: 143785 - protein, 201 aa, Heterodera glycines
FLCFFIMFASCWYYALIACFLTMSIYKYVEWKGAKQEWGDGLRGLALTTAQYSLMKVEDKDMHPKNWRPQLLILVPQLLILVDGKYSKEMIDLRSLNLLNLAGQLKAGKGLAITVAFVRCSSTRSNVQENRKKADEIKDRVQQDMGQARLRGFGKALLYTESQAQCQISLAKVNIIGGIKRSLKSRGFCVLNSELHSKFIL

SEQ ID NO: 143786 - protein, 73 aa, Heterodera glycines
MQSIVLERMEAEQRQRSVAAAAAAHHHGMHQQTPPHQPMGCTSVPPPSHHPLAAAAMMQAGGAGGGMPPPQGM

SEQ ID NO: 143787 - protein, 227 aa, Heterodera glycines
MELNSVPGMAMCTASAGGAMDAGQMLGMHPHHHHMGGGGGGGGLPNGTPCNAGPGPPPHQQGMIMDDGGGGGPSAGMAPPYGQPGAPHQGPPPDFFYQQGPPGGAGPPMGPNFGPPMFGGGPPPMSAHHQQQQQMLMQHQQPGTAGLGGPQMVGGGGGPPAQYQQQQNDADQQQQQQHQVLQMGSSPESHEQWWEAFAQEFFDESGRMSITLPEFSPEQGGHIRRDF

SEQ ID NO: 143788 - protein, 72 aa, Heterodera glycines
MPTKKTIETEEKRPKLGTNWRKKQSKLLIMLRPTNEMAKGTENESKKTKSTDEPMAKRVAQVPWTLLKAQKQ

SEQ ID NO: 143789 - protein, 19 aa, Heterodera glycines
EPVNSCIGCKCRRCCTPNS

SEQ ID NO: 143790 - protein, 219 aa, Heterodera glycines
AIDHHQHGHLHDDGHGHHHDCGGHQHSHGERHETDGKRAASTLPKIGRATGYLAFLNDPKIRLWTYAVGSTVLISAVPCFLLLLIPIKENTAEDSPLLRTLLAFGAGGLLGDAFKENTAEDSPLLRTLLAFGAGGLLGDAFLHLIPHATPSGHSHSHSHAGEGHAHGPHDLSVGSWVLVGFMTFFIVEKSVRIIRGNDPPGHGHSHGDEKRKKKQAKFS

SEQ ID NO: 143791 - protein, 34 aa, Heterodera glycines
EDISCRLKWDKNVNSLDELDFDYNTGTQVIRWES

SEQ ID NO: 143792 - protein, 136 aa, Heterodera glycines
MDAQIAAVLARFDAELCATASGTLCRNALKPTLLGFDMIAYKCVRVGSPSLSLHYVPEETTDAKQMFNKLMFMDDLDTEDGPSHDINGEEIDGQNAEEITFARTCEGELLIRVREKSFNFLKKEWVPSPNGDNAEL

SEQ ID NO: 143793 - protein, 105 aa, Heterodera glycines
HLAYAFVPHRHPRFRENWRSFLGLQRNSRRSLWRHILLPSSHATPYSLNAASAFDEEQQRLVTVKTDIGNGHSTTQQQEGTPLIADSPQSSTETNNSADGNILMI

SEQ ID NO: 143794 - protein, 160 aa, Heterodera glycines
MLCKCGECFECEDEKRRLKRNRELNTRKEQIKNCTGNHLAPAMMELKRRNMELFKKAYRPVKGVINKITGGPWNVECEVCHETFTYFMVEWENSRTDFSWGPGRTMVEADNINQKEILAHYVGQNDLLQNEVDYYQNLGNNPPLNVSPMGEDAIMLTRDD

SEQ ID NO: 143795 - protein, 118 aa, Heterodera glycines
MSECTVVTFLIALLAIICYANFCAAVSKQWTLLDLDDMEGMRKDTQHGKWRNKRDGTAVKEYNAKNINYTEFYARVVANKCLLTVNKTQEEVERAEEEEEENVANGKVGILSLTNEKK

SEQ ID NO: 143796 - protein, 150 aa, Heterodera glycines
  unsure (1)..(150): unsure at all Xaa locations
TERRTANPSLEASSPTYSNKRVNADQIRQLCPFPPHXFTSSLTLSSKCFATFPHGTCSLSDSWPYLVLDEVYHLIWAAIPNNPTPRHVKMGRHRQLDRSCTFSGAPVKGNLNKRANPSSRSIRYTSQPQRSCDSALDSSQFTRRYYGNPR

SEQ ID NO: 143797 - protein, 43 aa, Heterodera glycines
TLPKFESVRRIAPVESTNSAIGENGATAAAEHGNGIVVKWQFQ

SEQ ID NO: 143798 - protein, 44 aa, Heterodera glycines; identical to SEQ ID NO: 141399

SEQ ID NO: 143799 - protein, 71 aa, Heterodera glycines
CFVQFKARIIYEDFISILSPKEVSLDSRVREIINRNMVSPSAHTFDEAQNQASGAIIGFWMDPSISFFGIL

SEQ ID NO: 143800 - protein, 193 aa, Heterodera glycines
CHLFRIICLQPGTMATALLSIDNYSTVFSGPFEEVAAWGVNFDRLMKNKNGQKYFAEFLKSEYSDENILFWQACEELKRERNTEKIEEQACEELKRERNTEKIEEKARIIYEDFISILSPKEVSLDSRVREIINRNMVSPNMVSPSAHTFDEAQNQASGAIIGFGWIHQSAFSGFCDNRVYFRIGQGVKNQNV

SEQ ID NO: 143801 - protein, 167 aa, Heterodera glycines
KRSGSPSASSSCRTTSGDSNRTTVTSSNSNNNNSSRSATNGATHGRNTTPTAAAQIGGPNAAETVALQLFVHRKWRVSRVGGGRSTVYSRVSTPPLEKGLPLFGVVVQLKGIKIRVGRRAGPMDGEESGIGKEIPRPKFCREWLEKFKNGAPQNVVGRNVVGRLFEP

SEQ ID NO: 143802 - protein, 70 aa, Heterodera glycines
VLHDASFRANAKLIQKKIALSPFGAKEQLVRWVEFAAEFPHLNELNMPTDAELGWVAYYSIDAILFTISA

SEQ ID NO: 143803 - protein, 24 aa, Heterodera glycines
ITGVSIIAVLFLVFLMPSQNLVRF

SEQ ID NO: 143804 - protein, 27 aa, Heterodera glycines
MHRIIAAVKKLVVGSVLAVRCTLCVLL

SEQ ID NO: 143805 - protein, 46 aa, Heterodera glycines
MCENRLGLSFHRCKEFIFILLILVIKMFLKLNGSPDLIECKKPEFE

SEQ ID NO: 143806 - protein, 244 aa, Heterodera glycines
MNRRWICNDVWMDIFPSFDRPQLGLKLALLSPRFNALVDKHFDGKSELTIWRPIEISKDKGPEPKLSVRMDDKFVPFPLPDRPLPSKIRFKWLRIDYIDHSVIAFLRSNQQIFDKRGTNLYLWIPSSHSTNGQPILDIFGREIWPIFSANIRHLCFPHGDHLDNLLRRISPTILTDLNQLNSIHSFDLLPAAIGDGFDGPNSTTSAGQALSKWLHSPRKDGQPKRLRCDNYNAQANTDWINISR

SEQ ID NO: 143807 - protein, 158 aa, Heterodera glycines
MKIALGKEERRKRKRGKGKIRSKEGEKEEEKDEIAVGKEERRKRKRGKGKIRRKKEGEKEEEKDENSIGEGGETEEKERKRKNSKQEGGEKEEEKDENSSGEGGETEEKERKRKNSKKEGEKEEEKDENSSGEGGETEEKERKRKNSKQGGGERRGKG

SEQ ID NO: 143808 - protein, 35 aa, Heterodera glycines
MDMTKLTTAIEKAEGCKCNLVEKIEKELDDVEGIK

SEQ ID NO: 143809 - protein, 152 aa, Heterodera glycines
MLYNAFKPRREAGQFQNFVPHFTVESPSTLLDNYVSMSTVAFGQLWNGKMEISDGLLIMLYNAFKPRREAGQFQNFVPHFTVESPSTLLDNYVSMSTVAFGQLWNGKMGISDGLLIIQYNAFKPRREAGQFQILYHILLWKVQVPYSDTTCQ

SEQ ID NO: 143810 - protein, 97 aa, Heterodera glycines
GGTVPKFCTTFYCGKSKYLIGQLRVNEHSRLWPVVERKNGNIRWGALFSKNSSFRLTIPPFCALFRFKIESFFWSFEINCEKYTKIILAFNYAVQCF

SEQ ID NO: 143811 - protein, 49 aa, Heterodera glycines
  unsure (1)..(49): unsure at all Xaa locations
IVKNIRKLFSLLIMLYNAFKPRREAGQFQILYHILLWKVQVPYXDTTCQ

SEQ ID NO: 143812 - protein, 120 aa, Heterodera glycines
MSISTDSTNSVEFSSDDCGESFIDQQKLKQIGEKFAKMELVLKNTKLELKNKGLQEKLKQQETKALLAKIEAENGKMKREIEKMPEKMDEKEEQYMDKLEELQKNVIFAIFLFLPFEIEL

SEQ ID NO: 143813 - protein, 30 aa, Heterodera glycines
MKQQQRLCGLKLTNRTKQLCGDCVPVNMSQ

SEQ ID NO: 143814 - protein, 280 aa, Heterodera glycines
MQIPQNPLPKKVVGFEDITKREANDFWVFPLCKTIPSSFYRYINDNVITFLHCFRPLFAACQINFAIDDTLTIFNSTLEPILRNIWAVIATNVCAIQLSAEVFRRLRQFVPSILDDCPSLRVFNAYYFGFFTQFPCDDSATASNGQAVAKWLFTPRPDNVPKVFKCWLQWDDGHLASSIEDFKRFLIVFLILGIYHASSPVNFIAVIRFPPTFADSVLLFDLTNGFTHEQLTLTWMNDIGRFLLIRRPIVRDENKWAKWEKEAIGWQFYDQWNRIDIRSS

SEQ ID NO: 143815 - protein, 319 aa, Heterodera glycines
MFVICCAILLKYWDRFKKPPKQQRGHRKIEKVPETVLTIEKVPETVLTIEKVPETVLTICLDEMSSDNQNEAEEKMTKAIFISADCWLCVFHLLPPRQLGLGISMISHRFDFYVDEHFKTRKWTLDFVRIWRKFEADGTQEMEILNCRWKSMQIPQNPLPKKVVGFEDITIRYINDNVITFLHCFRPLFAACQINFAIDDTLTIFNSTLEPILRNIWPMIATNVCAIQLSAEVFRRLRHFEPSILNDCPSLRVFNAYYFGFFTQFPCDDSAAASDGQSVAKWLFTPRPDDVPKVFKCWLQWDDGHLASSIEDFKRVIIV

SEQ ID NO: 143816 - protein, 125 aa, Heterodera glycines
MLGKNIHGIELTATFFSLLRQFAPSILNDCPSLRVFNAYYFGFFTQFPCDDNAAASDGQSVAKWLFTPRQDNVPKVFNCYLGKDDEANLTFKVEVLIDLALLWALGFSDKNFGMPLNGDVFLYIL

SEQ ID NO: 143817 - protein, 129 aa, Heterodera glycines
MNQQLYENAPGNTERYRPLRVERPVVAENQHHLVRQNPPPHAYAHNDDYYAQRFKAQNSQQAPQFQNHNQNVPIRENHPNQFEQYQQPVHPGLVFDGMMAQAIRSLDSFSYTMTLNSIPNLDGPADQTQ

SEQ ID NO: 143818 - protein, 19 aa, Heterodera glycines
GLLGSWVRVPPGELPFMFY

SEQ ID NO: 143819 - protein, 103 aa, Heterodera glycines
MELSANDEQLEYEEMDADNEQNANGVVLQQNLRENMGSQVWGEQIGGVVEVGTVNANANDGPIFSTPHDSRDFGLLQRDLRLHFSENLSLILDRNQRRDMNVK

SEQ ID NO: 143820 - protein, 55 aa, Heterodera glycines
MALNGTYLLNLACTAPTPCMKFELYSPNFALFNHYFSGSVSLLFFFKSAIKNTYL

SEQ ID NO: 143821 - protein, 234 aa, Heterodera glycines
MLSCFEDIIAIPCGTLLASATGVITKVMESEKKVSVVLVCGSGENFVVTEFKQNSANALQKYLSVGNVLKLQSVKAQRFNEKFDGQKFFQTPFPFEFVVTKHSKICLVKTEVLAAEKFTQLVAGRFYKIKCVLTTPFSLIGEMFAAVVGDLCGKRADLFISGEKLPEMFGQLDSKDQLELKRCFVKIEDECMQLNVLASDVNVCGCKVTIGDKLVTPVKRKSDEAILSPQSAKK

SEQ ID NO: 143822 - protein, 183 aa, Heterodera glycines
LNHQHFNHWDSTHQHSNHWDSILLHFNHWHSTHQHFNHWNSLNPPAFQSLGLNSAFQSLALNPTAFQSLGLNSPAFQSLALNPPTFQSLELNPPAFQSLGLNSAFQSLALNPPAFQSLGLNSPAFQSLGLNPPAFQSPGLNPPESITETQFSGISSNATQIKQFSDILPVSQSPDKKLCQIHH

SEQ ID NO: 143823 - protein, 217 aa, Heterodera glycines
VTGRSPMVRRHQTQNQHIPPPNHQKVISALASSRLQCQNQQPLSNSTQQQTMPKSNASGSRPGSLKVSYRGERPYGSAADKIHRHGNQATTSTFSPADVDTVPSSAVGPPVEPFLRRVGSTKHRIQRPPPVPDEDGFVRMSPRSIKHKQPQEKPQKNVEDEAIHSRLEQSNSLSVTAQQQQPQQSKRIASGKKDLHAFSFLIFCNISDKRQCHQSQW

SEQ ID NO: 143824 - protein, 179 aa, Heterodera glycines
VQNVSKQRPEWMELELANRYLGFSVAVYGWPFYVLTNCACCSWCLLCRHLCTLSKGIVSEEIVVVADNCCACHQSAFMLRLDSHCRLCFLSFRNRLFEVPFAVLVDNKTRAIVVTIRGSASSASFMDLITDLSLSDELLECSVDVDSDPILCNDKELDGRGEVRVHKGMLRGARRVPPK

SEQ ID NO: 143825 - protein, 283 aa, Heterodera glycines
WFNTSASARVVSSADEAFTPSFEQSALSPPLSQTHMNSISSQGLAEPSVMNNSNTNLQTFREVLFNETVLKLLRRYEFVGSIGSGAQGLVICCKDLLTNQRVAIKRLTRPFANVIHAKRGRSKLRLCFSIVVHLIHLAYREFEIMNLVNHRNIIKLLNAYTPQSSLDEFSDIYLVMECMDANLCSVVQMGLDHERLSFLLYQMLCGINHLHKAGIIHRDLKPSNIVVDMNCQLKILDFGLARNSGESMLMTPYVRRERPYAPKGSASIGIFMMRSKGVATGAR

SEQ ID NO: 143826 - protein, 122 aa, Heterodera glycines
MNDLTDLFNAQSSSQDILRERQRKNMENWRKRKNELPEAELNAFKEKERKNVENFRKRQRNKETRLYLAANNPNKAVFYALSPFEIKCKECKAVHFIEENSINSCQKNKIFTVVVKMENLRH

SEQ ID NO: 143827 - protein, 93 aa, Heterodera glycines
LRSKSSSNNFSASNSFYNRFIHPIMNAKIIRVPKIACDLRLEKNGVSKNRNYAQKASQPILAHPIPSTIAFIHPIMNAKIIRVPKIACDLSLA

SEQ ID NO: 143828 - protein, 43 aa, Heterodera glycines
ENVFFLLTFFSEEGYEQSLIRLMLGDKGIGKKNISTISRETVQ

SEQ ID NO: 143829 - protein, 111 aa, Heterodera glycines
MVVVSIEAQNGEQQRTLTIMPHRKQCFVEVYCNIANTDGTSTVLAFGTGQKEAGTAQIHLSLFDGEKANKCFEQNIHVKIFDENKEQNFIFNSSEFFNVSKQITIDLTKPN

SEQ ID NO: 143830 - protein, 183 aa, Heterodera glycines
WICNDVWMDIFPSFDRPQLGLKLALLSPRFNALVDKHFNGKSELTIWRTIEIRRKDKGPEPKLSVLMDDKIVEFPLPDYPLPWKIRFKRLQMWYIDHSVIAFLRSNHQIFDKRGTNLYLWIPSSHSTNGQPIWDIFVREIWPIFSENIRHLRFYDGDHLDNLLRRTSPTILTDLNQLTSIYSC

SEQ ID NO: 143831 - protein, 54 aa, Heterodera glycines
MLLDRKELERPKTRISQQCQDLIKYLSSQTDSPNDFAKKLESAPPVKELGDLNF

SEQ ID NO: 143832 - protein, 45 aa, Heterodera glycines
MKLLAAQIVHLKLQSAVLVASRPFFALGIILSIGIEFRKNCQSRE

SEQ ID NO: 143833 - protein, 375 aa, Heterodera glycines
GPTDIEHVQRMEAVFSRLQQNDLRIKKEKCSFLKDKLIYLGHVIDKTGISPSPEKVKAIKEMPEPKTIEFESFLGMVNYYSKFVKDLAECVEPQTSPEGVEWDWSDEQTKAFNLVKEKLTSDKVLVHYDPKNNLFLATDASITELEFNYFGIEKFKQYLYGRKFVLQTDHEPLKKFTANRRPVVAARRLHRWGLILIETQKDTLLKLVKKFVKEGWPNKVKEFRPFYIARNSLEIQSGCLMLGIRTVIPATFRPEIFQLIHSAHPIVRMKSLARQKVWWPGLDKAIEEIRKSCRPCQINASEERKVPLHPWEEPERPWQRLHVDFCGPFWGFMWFVMVDAKTKWPEVIKMKTTNTNTTIYEMRRIFAIHGLPKRV

SEQ ID NO: 143834 - protein, 18 aa, Heterodera glycines
MVCVFRDLKQKTFFDVQI

SEQ ID NO: 143835 - protein, 127 aa, Heterodera glycines; identical to SEQ ID NO: 138408

SEQ ID NO: 143836 - protein, 88 aa, Heterodera glycines; identical to SEQ ID NO: 124691

SEQ ID NO: 143837 - protein, 18 aa, Heterodera glycines
PVNSCIGCKCRRCCTPNS

SEQ ID NO: 143838 - protein, 25 aa, Heterodera glycines
AFIPGSINKFPWTWTSSVTSSTTSI

SEQ ID NO: 143839 - protein, 45 aa, Heterodera glycines
NVSKKDWHDMFTTNNRIASWVVNGCEKLLLELGLELLDHVTDAAN

SEQ ID NO: 143840 - protein, 230 aa, Heterodera glycines
LKFCRFTMSNILTVSQYLMPNCFVIGVAGGTASGKSSVCGRIMERLELHGSHKRVVIVAQDSFYRDLTSADEIAKARRGDFNFDHPNAFEHQLMLNTLRQLRQGKSVVIPKYDLKEQRRCVFHRKTIQKNLVPKFNKNMKTFYEKNKQNANIWSGFENAFLTIFSCPVERDTTELGRPLDQVLHQYLSLVKPAYEDFCLPTKKYADVIIPRGAENDVAIDLIVQHIQEIL

SEQ ID NO: 143841 - protein, 92 aa, Heterodera glycines; identical to SEQ ID NO: 127421

SEQ ID NO: 143842 - protein, 96 aa, Heterodera glycines
PPPTLGSASPVLSSPQHLCLRPHLHKSINSPNFFNTQTSCMFIHFDSCQSLEKLRPRQRWHPSSSHHRSMPSTSASKHLNPDGRAPHSEIASFFQP

SEQ ID NO: 143843 - protein, 356 aa, Heterodera glycines
MMRLSRDYDCIKEGTELNGFKQRGPDVYFAKRDIAGSPDAAQPILLMKPEGHKVMFMIAHPDVDTNCDLLRINNGTCSSTGNQKGKDARLLVKHGTPAHNLMKCVAGSGGLPGWAWALIVTAILLLIALLLAITCFMVLKRRKNQLRQPPRSYWSNPSAGRGGGQSLWARTTGNISRLLIIRGRGRKAAAAPAVAGGRGGGGIEALSKKRSDWFGGSTARSGYAAEHGIETPQSTQESLSNGKDKRASRGSSKPTSRGSAPTSHGSSKPTSRGSAPTSHGSSKPTSHGSAPTSHGSAPGASKPTSHGSSKPTSRGSAPTSHGSSKPTSHGSAPMTTPSGGFKGMMARLMGQKTGTS

SEQ ID NO: 143844 - protein, 93 aa, Heterodera glycines
MNSHILHLVFTLAGTVDDGSAEQVLIPDLLTFEDLLCDLDVWRKASRDVWKLLLEHFFELLTEFASVFCAYEEPIAEHSLHNVKPLKLANEQS

SEQ ID NO: 143845 - protein, 146 aa, Heterodera glycines
NGLSKNRNYAQKASQTILTLPIPSTIAFIHPIMSAKIIRVPKIACDLSLEKNGLSKNRNYAQKASQTILALPIPSTIAFIHPIMSAKIIRVPKIACDLSLEKNGLSKNRNYAQKASQTILALPIPSTIAFIHPIMSAKIIRVPKIA

SEQ ID NO: 143846 - protein, 45 aa, Heterodera glycines
MVFPKNYDFYNTPLADLRNSLAFPTTKNIKSALTLITKNVQQIFL

SEQ ID NO: 143847 - protein, 148 aa, Heterodera glycines
LGYLSKENRVFACDKDHNIVSFKLLLSVLEYQTAVMCKDFDTADQILKIIPENLHTRVAQFLEKQGFKKQALAISKDPQHRFELALSLGDLPAAYEMAKQADSEEKWKQLAHAATIKSELRLAGECLAKANDFGGLLLLASCAGSNRL

SEQ ID NO: 143848 - protein, 62 aa, Heterodera glycines
LLITLYNAFKPRREAGQFQNFVPHFTVESPSTLLDNYVSMSTVAFGQLWNGKMEISDGGALF

SEQ ID NO: 143849 - protein, 123 aa, Heterodera glycines
MILISDRSGEWSVSETNISIKLTCPKRPPTIRSLDIRLTVFDPIRGQNFAFEKQIYGFELPTVGENGREQSVEIGRIKAKNAGTRGNGTAREEADQLITYALLSGNECAFQYLNGFRKLGTKF

SEQ ID NO: 143850 - protein, 791 aa, Heterodera glycines
MDLRISTPKNLLQYLVNQYNRQQARQNPNAQQKTVDDIGSVVRLSEHNVNSLQYWKKMYEDCNTVFARCHDAKKARLFITFTNNREWPEFKENLHKNGQVFTDRFDMWMRVWSSKIAEFREELYDKKFFGTILGYGESMEFQGRGGPHAHIVAQTDLDAVPYVIQEYIWAHIPSLPDKDDDTPIAKMHREIRETMHMQLHRCSDSWCGPSDPIYGRCKKGFPAPYSKCTILRPDRPAMYFRPSPTDGGAQLEVNGLIYDNSHVVPYNPYILLRYRVHHNVLFAYGNKANIKYALKYPFKGPGHCYVECKEESGNKIKIDEPAQYAKMNFRGATEAYAIVHSMPFARLSHHVVKLAIHLPNQQPIVYRAFQLVSKAQQIQQGELPETQCSAYWKQWQNEWKNDPKFKDILFEKVPERFRWAKDKWVLYKRQQIKRPPIGRIVPVPPSDPERFALYSLMRHFPGDPDHLKMVNGLLCTSFTEAAIMHGLLEDDKIWDKTLAEAALSRWPDQMRWLFVSILVYGQPSNAIELWNKYKDQMYNPQGIITLAQHKVAELEALADIDWRLHSCFNLSCVHFSLPDPPTSIAKNTDAAIEEFFFGDDDLNLPPGQPNPRPQPNTPPPLNSDQQKVFDAVLLAIQSNPRDSTVPRRFFIYGDGGTGKTFLFGQIIRRLRKAPYTYKVLATASTGCAAILLPYGKTAHSTFRLGREVSLDKLPSIPLESFFARRIREAQLIIIDEITMLHNTVIEVIDRVCKEMAIRQHKDLLFGGKTVIFSGDFKQSLPVVPHEGLTAQ

SEQ ID NO: 143851 - protein, 21 aa, Heterodera glycines
MKPLRRECATIAASCPCGYGG

SEQ ID NO: 143852 - protein, 105 aa, Heterodera glycines
MDAIKKKMQAMKIEKDNAIDDNAIDRADAAEEKCRQTQERLERVEEELRDTQKKMMATENELDKAQEATENELDKAQEDLTAANNLLEEKEKKVQEAAEKVHNLL

SEQ ID NO: 143853 - protein, 37 aa, Heterodera glycines
KTGASRPFFNFVETLGRFAASGRALRARFLILWGTFG

SEQ ID NO: 143854 - protein, 141 aa, Heterodera glycines
MEWKCDGSGDCRNGEDEKDCPHPGCKADQWQCDKYEWHSVSCIHEYQRCDNITDCSDGSDERDCPASPVNCEVNDGSVFSCADGRQCFPIARKCDGNYDCRDLSDEKDSCATNHTVGDRFRGCWDVSQKPSNGNFLTENYS

SEQ ID NO: 143855 - protein, 429 aa, Heterodera glycines
NNLWSTLGCQSGCVASPGGGVCTCPQGYKLDERFQRTCSDINECAEFGYCDQTCQNHRPSFTCGCLGSCFRLQMVHGPGNSNMSLRGYCVSNEAEKMRLFVARREGLYRVNPANKDEQAVKIASGEFIYGVDFDYEQKKMFWTDRMAHSLFRADITPTGDIEKIKKLDLKSLIYPRNLAVDWITKNVYVIESGSRRIDVVTYEGDKRTVLLADALTLPLDIALDPLRGDMFFSNQLRLETAHMDGTNRRVLIESHTHQVGVVVDIAAKRVYWSDPKVDRVESIDYSGNDRRQIASGRDFAPHPFGLAMFDQFLYWTDWTRLGIMRVEKFGALSEVIWSMKDSNVFPSMKDSNVFPMGIAAYHPNAQPGPKQSECFQQTIENPCAKSDCEGMCLLSKDSVGFGVGFRCACPIGQGMANGQTGSSAIDEWT

SEQ ID NO: 143856 - protein, 65 aa, Heterodera glycines
FGHFSEMANPIATKKQKVKLSYEGHLYTFAKMSSDGMTKFWRCEFKKSISHYFWSFSGEFLTTIE

SEQ ID NO: 143857 - protein, 25 aa, Heterodera glycines
MGEGPPRGREAAEKGSETHQILFTC

SEQ ID NO: 143858 - protein, 90 aa, Heterodera glycines; identical to SEQ ID NO: 137676

SEQ ID NO: 143859 - protein, 100 aa, Heterodera glycines
MSLLQLKHKELDLNVRNKAGLYAGYISFVMREDLGMVMCLLSYGAGLDEQADSGKMTALHFAVSKRNLQITRLLLCLGADPNVANAHGDSPRHLAAKLNE

SEQ ID NO: 143860 - protein, 112 aa, Heterodera glycines
MSKRSSLIGATNNFRIAETIDLVKTLQNFTPKDELKALMKIKILDLNEKVKFHLLLTFAIRLCVQIEPKYFNVEHFVEKLLKRNEVEIPSFIEKKKRIMYKQKIYSKLLVNY

SEQ ID NO: 143861 - protein, 120 aa, Heterodera glycines
MSRKQPNNFANFAELSSLCERLRSERLLIDCEQIVLRNLNSKVFTLGILRQLINSDLSVSPDNCCQLISNLNSSNFVEAHKILNQHAAELSHVFKLLMGAPRAVAAFINAAEKIPTQKGF

SEQ ID NO: 143862 - protein, 27 aa, Heterodera glycines
MIFLFDYVKAHDFVNLFFLSLITDQWL

SEQ ID NO: 143863 - protein, 149 aa, Heterodera glycines
MHELMATDNPSDYLVEQFESKKKSAKGEHLEDPDKKSGAKKGSKKNKSANEQRKDNYNKIMKLLMQQKLHPFDFLAGTAQTEQGAEQFQIGGIQYIISGQIANKKKWEKKVKGKLKTQSEMDKANDTCGRLAKLVANTLYDNNTDPQVL

SEQ ID NO: 143864 - protein, 19 aa, Heterodera glycines
TFAFSSLALPNTHTIFEML

SEQ ID NO: 143865 - protein, 19 aa, Heterodera glycines
TFSFSSLALPNTHTIFEML

SEQ ID NO: 143866 - protein, 19 aa, Heterodera glycines
TFAFSSLALPNTHTIFEML

SEQ ID NO: 143867 - protein, 19 aa, Heterodera glycines
TFAFSSLALPNTHTIFEML

SEQ ID NO: 143868 - protein, 221 aa, Heterodera glycines
MTSSEKGNHYAIPEPKTTRTTTTTSVGGNNSNATDYYEARGRSSSSAMPTIGALLAEFDDELAKRAQMALPSPSQAANAIEYEALLLDKLAKKGPLQSEREIRRSPRINDRGGGGDQKSFWPLQNAKMLMEMDEQQQFNEMIVSEKEGRQHMAMAKGEDNDSEQSITAGGENPCDNNSEMTHRIWLAVENARLASAAGTERMPQKAAKTPRECVRVCTNLL

SEQ ID NO: 143869 - protein, 22 aa, Heterodera glycines
MVASNRPEKSQKRQVKWAPCEG

SEQ ID NO: 143870 - protein, 39 aa, Heterodera glycines
MKRRKFYLYKLIRSAPNFAGILKGREITYFKYYLVSSFK

SEQ ID NO: 143871 - protein, 52 aa, Heterodera glycines
MPILVGLIYYANNLLMLPPISRSLFGANCAEFVHTFTPHNLLFRSVRNFNIF

SEQ ID NO: 143872 - protein, 24 aa, Heterodera glycines
MGKDGAEQRPNDQPLGCQVPKLRS

SEQ ID NO: 143873 - protein, 168 aa, Heterodera glycines
MGIPDTLVSAERRLQMGDTVVVSKFEWKEGFERLSYDLNPVDSLRSWFVQGRINVQAVAIKVEVIKLVIGSFQPGFVTDLKRYRGGDFRSATVISAQMLRPQTIYARQLTEISPGRIMLNQLLYLNLAKITSPQEWWMGENYILPLVTPFLKGNEIRSHGKTVVIGAK

SEQ ID NO: 143874 - protein, 357 aa, Heterodera glycines
METALAVEKVIETDKTRGISAGLEEEFERGMELGEGQSVERNTENIEIETIQDFTATQFSNVSWSEPRAIASPVPMSSNEEHGAEGGVLKYLVCQTDVKSVVGGKMSGQGPFFMGIPDTLVSAERRLQMGDTVVVSKFEWKEGFERLSYDLNPVDSLRSWFVQGRINVQAVAIKVEVIKLVIGSFQPGFVTDLKRYRGGDFRSATVISAQMLRPQTIYARQLTEISPGRIMLNQLLYLNLAKITSPQEWWMGENYILPLVTPFLKGNEIRSHGKTVVIGAKESLDSFCFPLNQFSVRLMGAAAAVQRSFEMEKLAKQTVNVQLVWQRPEVRPDEVQTNLKKAQRVSFEWLINNKSAG

SEQ ID NO: 143875 - protein, 83 aa, Heterodera glycines
MKEFHFRVTFFRPILKKSWILIPFYIYLGPNSFCPRNLISEFHVYFLSLPICPKIIGISFPSFTFLLSNPILSRNFGVSFPSA

SEQ ID NO: 143876 - protein, 18 aa, Heterodera glycines
MLLITTFVGQQFFINLKH

SEQ ID NO: 143877 - protein, 118 aa, Heterodera glycines
MSEPIRTALGIMVENLIGRLNELLPIVRAQQRNEEGLNKLREDRIFLTDLLERIEQKNREWDTYIREIGEEAQNEENERYRLFTHNGRHFYEWAERGREMVSRINIILANEDGESLAE

SEQ ID NO: 143878 - protein, 572 aa, Heterodera glycines
ASKDAYATCVYLRSEEKETEIQLLYSRSRLRPRKMKISIPRMELLGVLIGTRAIKFVKTEIGITIDGMYLWCDSKPVLSWVNSNCDQPRFVANRLSEIKLNYGLEFGYVSTEQNPADVASRGCTPKELKTHPLWWTGPEWLKKAQLHWPNEMNFKIIQSGDPQDNCQGCQKSFGVIEDREPEMELINFKNYKEWHKLVKIFARMLKIVNKWVQLIKKQTNLKVSEGEYITPMDYEISEKILLKLGQKGWKEYVGKNNQIRWEKDIDGLIRLKTRIERSATPKSFHNPIVFPKGSKILEILILRAHKNVMHERVDATLNNFLSEFWAPGVRNAIKQVLKNCVICRKNRGPPFALPPMPPHPKYRVRRSNPFEFVSLDYLGPSVIKSKNKGEPSGKYWIVLITCLTTRAVYLEPVFDLTAETFLHVLRRFASRRGKPKSIMSDNAQTFKLAAKAGEIPITHVSIEPDGERALRPIDFINPGAELGIFLSKNGNENDQDYRTGQASLEERLKERWKRTIRANRNQWDSQGPKITKIIGKQNWAKWGWLKMIYIQGILGRWDEMLKSNGIPGVIRS

SEQ ID NO: 143879 - protein, 20 aa, Heterodera glycines
MNQIKVDQEESTKLWDWPLQ

SEQ ID NO: 143880 - protein, 156 aa, Heterodera glycines
MTVVMNTLNWKLTFLFFILSKNLFVYVYGLLDSVSWHNGINSAIFEGQMSNERAEKQAFGIMCSMKYEKKIPAKFEKLRQNFCEQIENGISIERTLENVHEMVTNLLQNVAINQLISENGQQLTKNEFLTDKNQANVDKIYEHFKLEMVQFFGALM

SEQ ID NO: 143881 - protein, 21 aa, Heterodera glycines
MAISFFSWGFDRKLGTNICLL

SEQ ID NO: 143882 - protein, 19 aa, Heterodera glycines
PLSFSSLALPNTHTIFEML

SEQ ID NO: 143883 - protein, 19 aa, Heterodera glycines
TFAFSSLALPNTHTIFEML

SEQ ID NO: 143884 - protein, 19 aa, Heterodera glycines
TFAFSSLALPNTHTIFEML

SEQ ID NO: 143885 - protein, 276 aa, Heterodera glycines
MTAKIIRVPKIACDLRLEKNGVSKNRNYAQKAPQPILAHPIPSTIAFIHPIMNAKIIRVPKIACDLSLEKNGVSKNRNYAQKASQTILTLPIPSTIAFIHPIMSAKIIRVPKIACDLSLAKNGVSKNRNYAQKASQTILAHPIPSTIAFIHPIMNAKIIRVPKIACDLSLAKNGVSKNRNYAQKAPQTILALPIPSTIAFIHPIMNAKIIRVPKIACDLRLEKNGVSKNRNYAQKASQPILAHPIPSTIAFIHPIMNAKIIRVPKIACDLSLAKNG

SEQ ID NO: 143886 - protein, 67 aa, Heterodera glycines
MDFHQQQQQQQQLLLAAALWPPQRAAALATMLRSNNGTTEHNNGTNGITSNNNNGTDGVTANVADSS

SEQ ID NO: 143887 - protein, 136 aa, Heterodera glycines
SKLCKIATTNSAATEAKKQIAQQLARDQQILGQLLRNYDRRVRPPIEAGANETGAVRVSVNILVRMLSNIDVVDMEYSLQITFREQWVDRRLAYAQLGSPSPPKFSPSPPKFLTVPHEARIWLPDTFFPTEKDAHR

SEQ ID NO: 143888 - protein, 20 aa, Heterodera glycines
MTIGQWHKVPTDQFIYLFVG

SEQ ID NO: 143889 - protein, 40 aa, Heterodera glycines
MNFGVQFVKNQGANTCFLAAFSIIFQTVIVVAVVPICWDE

SEQ ID NO: 143890 - protein, 51 aa, Heterodera glycines
THPISLVSLHGPTYWQPQKGGPGWQSDPSDGAQAGAGGSESDRLVNRWETI

SEQ ID NO: 143891 - protein, 24 aa, Heterodera glycines
MGCLIDDGLDGSITRSVPILQNYS

SEQ ID NO: 143892 - protein, 66 aa, Heterodera glycines
MKLKSIWITDEKKGEHVGLAEERKCVRDVVNAIGSADEAQMGGRNGKNTPNNENEQHNRNEEQKHL

SEQ ID NO: 143893 - protein, 87 aa, Heterodera glycines; identical to SEQ ID NO: 142730

SEQ ID NO: 143894 - protein, 88 aa, Heterodera glycines
MCRADGGVCPLAILCQKLAFNVRQVGANWRRNNLFCYIDLCMVHYAKDAFKNVSNTCSNNRSDREEVYSVLEHYMGQWGVNGATFGDL

SEQ ID NO: 143895 - protein, 140 aa, Heterodera glycines
MIGMLWAYYGTAPPPLKVKQLSLCFLMQRAPHVGAVIVEQTDDLFLTKNGRPRRVMSCQQLRKLLNGLVASVCNNSDHLDEADEHYDYDDIPPKSQEHQQLRVGTALTKKGGMSRKIGAFKMSGDFQSDTAREYKNEDDD

SEQ ID NO: 143896 - protein, 111 aa, Heterodera glycines
MEVKYGNVDKNLKYGKLKTINIRMIPILKITDEQKSYGHSHLKLYETPLYELLSTHFWCHVKEWMDDKMKMMTEKKGRSGGEAGTKEGKGATNNRLRHFPVGLRDQPMESS

SEQ ID NO: 143897 - protein, 254 aa, Heterodera glycines
FLDIRLPSSAAAAADQQRQPIFGLSPQQLRRSEQKANPRTDQGNSQIPKDIVDKMTNFMSISTAILCYLRAIPLILASAESAVVKVPDIEVGAFKVMLSFIYAEDSNGLNGHNAMAVLYAAKKYNISLLDNACLVFPISQLNNVFLAYDQACLLNENNFALRCLDYIDRTAETLFRSDAFLQIDQNLLSKILERDQLNISGELSIWNAALRWADEKCRQNGTECSAENRRAALGPALFKIRFPLFAKEQFSEKI

SEQ ID NO: 143898 - protein, 23 aa, Heterodera glycines
MSMGPPSFTMFGDALLSLHRSAP

SEQ ID NO: 143899 - protein, 29 aa, Heterodera glycines
PTDAIEAWAELVEMMFSNVRDGLSHFSFD

SEQ ID NO: 143900 - protein, 42 aa, Heterodera glycines
AKIKKMSHNRDLYLLMYCTFVCIYHLLCIITLFPSVFRNKLN

SEQ ID NO: 143901 - protein, 29 aa, Heterodera glycines
MWHPSVDNPSVKDNPSVKDNPSVMDNPSV

SEQ ID NO: 143902 - protein, 145 aa, Heterodera glycines
PFLVRGAICLVYSDNERDSSLLNSWLIASGHNFLEGFSVFSRTKLSNNRSVMPLDVRGCTRATLAKSACLPSPKGVGKPVKICRDWDRTLQLLSVNEEFLVGASHQLALNTSLPFVHTARRCPGLSHFEKFGDGCSGRSVCRLEP

SEQ ID NO: 143903 - protein, 221 aa, Heterodera glycines
MSAKIIRVPKIACDLSLAKNGVSKNRNYAQKAPQTILALPIPSTIAFIHPIMSAKIIRVPKIACDLSLAKNGVSKNRNYAQKASQTILAHPIPSTIAFIHPIMSAKIIRVPKIACDLSLAKNGVSKNRNYAQKASQTILAHPIPSTIAFIHPIMSAKIIRVPKIACDLSLAKNGCWWSSGAEWRHGDWWFDSAWVQQFLLFLLIILKYQKVVKNKFKARNN

SEQ ID NO: 143904 - protein, 18 aa, Heterodera glycines
AGGQVVQNGAMVTGGSTP

SEQ ID NO: 143905 - protein, 103 aa, Heterodera glycines
MVPNLYPFSELQFARFPSHPIPSTIAFIHPIMNAKIIRVPKIACDLSLAKNGESKNRNYAQKAPQTILALPIPSTIAFIHPIMSAKIIRVPKIACDLSLAKNG

SEQ ID NO: 143906 - protein, 221 aa, Heterodera glycines
FQSLALNSPTFQSLGLNPPTFQSLGLNPPTFQSLGLNPPTFQSLGLNPPTFQSLGLNPTGFQSLGLNPPAFQSLGLNSPTFQSLGLNPPTFQSLGLNPPTFQSGLNPPTFQSLGLNPPTFQSLGLNPTAFQSLGLNPPTFQSLGLNPPTFQSLGLNPTTFQSLVLNPPAFQSLGLNPPTFQSDSTHQHFNHWDSTHQHFNHWDSTHQHFNHWDSTHQHFNH

SEQ ID NO: 143907 - protein, 80 aa, Heterodera glycines
KNRFIFVFGAVPPNRCAQIYGETESFGNSFPIVCTLILRWIFAPHNCLSTPNGHLKKSIFLFHKYFFRKCSETHQILFTC

SEQ ID NO: 143908 - protein, 155 aa, Heterodera glycines
WSYFDVEENNVKPYKTPAMSGGLLAVSRDYFREIGEYDMGMEIWGAENIEFSIRVWLCGGEVLVAPCSRVGHVFRMRRPYRGKPGVDSSLYNSLRTARVWLDDFEKKYTAIRPAAKRTDPGDLAERLKLKEKLNCKPFEWFIENVEPKLKPSHDE

SEQ ID NO: 143909 - protein, 65 aa, Heterodera glycines
MGERQNRTDEKVGQNGTSEVSNEGQTDETNGYLLENNLEISQKVHNVFEKINSIFNESPAHLLTE

SEQ ID NO: 143910 - protein, 254 aa, Heterodera glycines
AQPKEVMLPVQLNKTRAAAARNLYGLAPEQLLAYASYMPRMPPFYGPTVSSHGHHHGLLTAYPTVNPGMFGNGFPHPPHQPGTITGTNAFGMATSGRSSSNNNGTTGLNARDFAAAQLVAQQQAVYEAAMVGIHVGSEPKINPSYCQVYANQLSSLAGGGAGGEFGGGPSTASPFGGRGGHHQHMPQPHQQTAFVTSAPQQSHAHHHHFASLPPSVLAAPPVHFHHHQQQHLPPPPPGGTPSGGVVPLNFGKSS

SEQ ID NO: 143911 - protein, 221 aa, Heterodera glycines
MSEDGGEKNGEEANRRKDNERGANENEETEGEEKDEEGREESDQQDDNLTVQQRLQHQPNSVPKKQSAKECLDDKTNNKQKTPSAERKLGGGSSSSAPLTEATDAESQATTTNVDEKGLRDYFCKFGEVNECMVMRDPTTKRARGFGFITFADPTAVEKVLANDCHELDGKRIDPKVAFPKKQQPKMVVKTKKVFIGGLSSNSTLDDIKAYFAQYGKVTKD

SEQ ID NO: 143912 - protein, 18 aa, Heterodera glycines
YREAIPEGFGLPINLDAS

SEQ ID NO: 143913 - protein, 30 aa, Heterodera glycines
MAHYNRRAAGNALRGMQIHGTAPFPGFVPK

SEQ ID NO: 143914 - protein, 21 aa, Heterodera glycines
MRKKMFDRARQEKATVGTKFA

SEQ ID NO: 143915 - protein, 41 aa, Heterodera glycines
FLKLHYFIFLAKLIHKYFFTNCSETHQKLFTSYFRHSRCFH

SEQ ID NO: 143916 - protein, 48 aa, Heterodera glycines
AWAYHTARHAQSFKSADCVSDLLSKIFPDSKIAANYGSKQNKCAAIIT

SEQ ID NO: 143917 - protein, 117 aa, Heterodera glycines
MDSNQITRILTSSEITSRKFLGCFSCDQLPEPMAIRFPASLIVNLDPHQFPGSHWVAIFVNGLNKKVDYFDSLSLPINELKVSTDFWNIYLQFINNFEKKCQQTFGKIYLQFINNFE

SEQ ID NO: 143918 - protein, 33 aa, Heterodera glycines
MFGKFLPCLNISKICNVLELFPGLIVSEYYIYS

SEQ ID NO: 143919 - protein, 26 aa, Heterodera glycines
MSSISQNISPEEMDKIQTLREMVKDQ

SEQ ID NO: 143920 - protein, 60 aa, Heterodera glycines
  unsure (1)..(60): unsure at all Xaa locations
PEKMPTLVVFKIFRNSDFFINYLFFAKLILQYFFRRVLKRTXFYLHVSLGTMMLFLSKRE

SEQ ID NO: 143921 - protein, 18 aa, Heterodera glycines
MRTRPIWQVKQRLLTSQK

SEQ ID NO: 143922 - protein, 53 aa, Heterodera glycines
STGYREAIPEGFGLPINLGASVRGDCRENKNKSIFSSVLKGTQTIMGSKNPTQ

SEQ ID NO: 143923 - protein, 197 aa, Heterodera glycines
RKERNVFCEKHFPTNANAVFAVADNEPLETHPKTPTAAPGGMTPQPNGRVSPVACNIIQKGSVKAKDWDRIVKITQTPLSLRKSMGDSSKCPLRQQRSFERARTILFPCETTPQTTGKKIVTRSVTKKLDRKKEDEGQTTPTRKKTDEDRPNEKCTPPTTNVDRPTALPLSILKSDRKRSRLPTDSLCISGPRTIRI

SEQ ID NO: 143924 - protein, 202 aa, Heterodera glycines
MEHQSFPSKKLPSELVSELIMCLPMMRLFDGIAEKNRWSSKIDPVNWKFEILRQSREKEYNKFKNRLSVINAKFNSACEVRKLNFEQDYLDSAYFPVNEQCAAVSKLCGRVIEYVVGSSNPFSVRKRISLGTMQPTDLPACLKQPARVMVRGGIHPQIRSDENEVYHLYNSNLMKKVGYISMFYHVRIGDCVWLSIDLVLYY

SEQ ID NO: 143925 - protein, 77 aa, Heterodera glycines
MIGLATKEMPLYGRVGTYPNSYGHRSDGLFWVNDSVDFVALFPSEDGPLFTCVTLHDSEDKIEANFGPEFNFNLNTL

SEQ ID NO: 143926 - protein, 236 aa, Heterodera glycines
MSSNLMGSPSCFFHPTAEQAVAAEEVDKYEVFSWHGDLSDQLAAQFLVTDQQLLKECREKLANSELRETKLLCKNGELNAENKALKAELEKQKLMTEHSQIKAKVDKMEQENQQQLDKKYVSFDVFNALVERIKRLENQQLKQNKEEDKKAEEKQQKESVGQQKLDGKYAVVDKNNVLVTSSGDQSPPAVVSAKVAKEVPNSKKQNDWDAKVCHKDIEIIGEKQLTINCKGNRFGN

SEQ ID NO: 143927 - protein, 421 aa, Heterodera glycines
MKNHYDKHPKVTADKFKIGERVMVIFPGVNTRAAHRKLLWNQFGPYKILDISDSSAKLVPVDKPNFEPISVPIERLVKVPEGVPDISTLPRGKNPFKNQLNALLSVVCLVYREMDIETCEENGQFTQTKSVKFGNGTIKMDEFQKTENMGQLFIGQLRTIANSADGEVRVKDNADHPLVWEMQCGGLGTEHRNCVQLTAADLDPVLEKAGLGLKVIGREEKMENVEGKVGFKVIGTPMKALLSNFLLKSGAVSSVAGGQKLTQLVISAPVGFELIAYSGGREDLVKNGFFPTENDIESAFTAWVERCAVTREKLMKTGYTPIEVPMPNVVAELPESEKMGWHEMLKKANFILEKVRATIIHRKQLLVETATVIIGDSSAKQLIKLWPKSQFIGAENGTITEVIRAFDGAILSSKVKVAIVM

SEQ ID NO: 143928 - protein, 156 aa, Heterodera glycines
PSSDRKRCHAWPFLVRGAICLVYSDNERDSSLLNSWLIASGHNFLEGFSVFSRTKLSNNRSVMPLDVRGCTRATLAKSACLPSPKGVGKPVKICRDWDRTLQLLSVNEEFLVGASHQLALNTSLPFVHTARRCPGLSHFEKFGDGCSGRSVCRLEP

SEQ ID NO: 143929 - protein, 34 aa, Heterodera glycines
LSKLRTHFLIREQMDGTTQMIFDLICTNDKFYSK

SEQ ID NO: 143930 - protein, 44 aa, Heterodera glycines
QMMELLAHANVNELRKTNEVTDFTHCGQQIESQTDESETESNSQ

SEQ ID NO: 143931 - protein, 311 aa, Heterodera glycines
FQSLGLNSLAFQSPRLNPPAFQSLGLNSLAFQSLGLNPPAFQSLGLNSLAFQSPGLNPPAFQSLGLNSLAFQSLGLKTPAFQSPGLNSPGLQSLGLKTPAFQSPGLSFYAFQSPGPNLTWSFGIAIIETQFCEIPITGTQFCDIPITGTQPSSISITGTQFSCISITAFQSLGLNSLAFQSLGLNSLAFQSLGPNLTWSFGIPITGTQFCDIPITGTQFCDIPITGTQLTSIPITGTQFSIIPIPGTQSHQHSNHWDTILHFSRILRHRNHRELSSPTFQSLGLNSPPFQSPRLNPSLFQTMNSMLRIHRH

SEQ ID NO: 143932 - protein, 83 aa, Heterodera glycines
MAIPVSNAFVERAFSLCGAQWTDKRNSLEVETVKSLVQVKVNFDQKCSEMFKFLFSRPELLKKIAGEIPTRKLMILSGLTLAW

SEQ ID NO: 143933 - protein, 121 aa, Heterodera glycines
DDGIGGVGENENDHLVDEIWRRVFCTKSQNLGKLKATQSDGKEAKARKVKEEQQQPDNEVQLGKIKIEPLVKQEDRMPQTNFQKKVPKTDAQFCDDNFENPMNKLHIPVECEQQKQNNICK

SEQ ID NO: 143934 - protein, 43 aa, Heterodera glycines
MRRLPLRAVTFARSTTKELAMCAATSLKGMASFCLGMMNIGTH

SEQ ID NO: 143935 - protein, 257 aa, Heterodera glycines
MTTPLNFDSPDSPPPHQSPLLRQPPLAPQQQQDMGRRVVVYTPSEGTPSPQQQDLRQQVLARNAQVLAENQAGLRDSPLVQQAHDLELPNEFHTPQIVVQTPAPRRQLEQQPIFRNILQLTPQRMAQLMVLRQRAEDLRDREEDEEEERVSEEQVEEEDEEEERDEEEEGEERGEEAVTDESSDTESNASEQGAGVAVAKARNRVSSSTSSESSASASPSPPPSKRAKTSTASTSAAAASKQQPPKNKRKKTAVKVL

SEQ ID NO: 143936 - protein, 154 aa, Heterodera glycines
MPIFFTLVMEVELLQIAESADDEDEEENKNHKEKLAKILNDLTQTNDIGQMLLAAHIKIYKNELDAKKALIDEISINLNQIKAIAGIFQQKFLKIRELMSFVEAESVEIKLKKLNELAEKTQKIVKQLKIVKKLAAVLSKKTTEDSLSKGLWIV

SEQ ID NO: 143937 - protein, 90 aa, Heterodera glycines
IIFIQKIFFWVFGAVPLNRCAQIYGETESFRNSFPIACTLILRWIFAPHNCLSTPNGHLKKSIFLFSGQSPRTDAPRFMGRPNPSGIASL

SEQ ID NO: 143938 - protein, 282 aa, Heterodera glycines
IPITGTQSTNIPTAFQSLGLNPPTFQSTGLNPPAFQSLGLNPPAFQSLGLNPPTFQSTGLNPPAFQSVGLNPPTFQLTGLNPPAFQSLGLNPPTFQSTGLNPPTFQSLGLNPLTFQQHSNHWDSIHQHSNSISISGTQSTNIPINGTQSTSISINGTQSTSIPINGTQSTSISISGTQSTNIPINGTQSTSISITGTQSTNIPINRTQSTNIPTAFQSVGLNPPTFQSPGLNPPTFQQHSNHWDSIHQHSNQQDSTLLHYITGTQFFCISITVTQSTNIPIT

SEQ ID NO: 143939 - protein, 55 aa, Heterodera glycines
MFTEVLGQIGFRLSLVFGGSVLSQILGQMAYGIASASEVAFFSYIYARVEKSQYR

SEQ ID NO: 143940 - protein, 24 aa, Heterodera glycines
MEKACKIWRDYIDFSALELLELAS

SEQ ID NO: 143941 - protein, 41 aa, Heterodera glycines
GDSIHTPATFQVIFHRIGHTKVKRRPSTEKSFDQTDQIRYP

SEQ ID NO: 143942 - protein, 80 aa, Heterodera glycines
MSHEKISLIYLHACALRLTTELGILINELEEIGTEWTSADAIDEAPKPRKALFFLDLVFPAFLSGIHKIQVQIFQNAQLY

SEQ ID NO: 143943 - protein, 237 aa, Heterodera glycines
RVHGLSRRRSRISNTTNVVVKGEFSSGGGSTTAAAAGALKLSEKTTLVGGKSPLPQPPSFAAAQWAKQCCVNVNLDILAQRSRNEPINSSNTSASAINAGSSSTNFYTNKFCSTVADVARLVNQMHEQQLRNQRKAAEEEEEERRRKNGIGKAEQKHQQKQGRRRSTVMEACDDEEKNEEKKVDKKKDGHKICGHNDGMPILEKQQQQQLLEERQQLPQQQQQSIDDNKNITSNIVN

SEQ ID NO: 143944 - protein, 99 aa, Heterodera glycines
YVDDIRVTVRLVSPAFTCNSQPKTASSQSKSYSFADRVIETLSLYVQSVEIFFESDSGTDFDFGGSISLYSLALESISPNWSEEKDVDTNLTRQSVPRR

SEQ ID NO: 143945 - protein, 83 aa, Heterodera glycines
MTSILKNQIIKHLSAFARNLKPEQITMELLRGKGQLRDLELNEEVLAEKLELPPWLKIVSARCDRVSIKIPSWNKLRSAPIQL

SEQ ID NO: 143946 - protein, 78 aa, Heterodera glycines
PKNSYLFFLIFLPQTWYQQLPSFVWPYQTILRYLKRKQKKFLTKKWLSLFSHFFTANLVPTVAFSCLALSNNLTIFET

SEQ ID NO: 143947 - protein, 23 aa, Heterodera glycines
RKIGTNSCLLLSGPIKQSYDIET

SEQ ID NO: 143948 - protein, 69 aa, Heterodera glycines
MSPAEPFLESGESDLFAMAVKFQTDNGQPIELKAVYQVALSLFDGLFPTIPRTLTHRRKPFRRKGKADR

SEQ ID NO: 143949 - protein, 146 aa, Heterodera glycines
MKNPFNMPKPIIANPNDVPKQKNAKKKASKNDGGQKKEKLVVSRPSSPNGVPIEFELEINEYTNGQLINKNTISGQWDKRNEKIIDEMLKNKKVGVTQLGPIQSKADILPLKPGQFETESHFFSDNHANSQQSTVASTSKNQVRNF

SEQ ID NO: 143950 - protein, 168 aa, Heterodera glycines
MASQIPKILPTLLFIAAAFLLNFGCCQQNESQTTETLRARNASSSTETLPLNITTTKKETTVATPSTTEAGTEAATTDDTNDEQSLLFWILIGVIVAIVLFLVLLVCIVCCMRGGSQKDARETVNGKSGGAVTKLTMNGDNADSTCASQSASVPDEGWFAPESLRVIL

SEQ ID NO: 143951 - protein, 247 aa, Heterodera glycines
ISITGDSNHQPLKGSGLNPTAFQSLGLNPPAFQSLGLNPPAFQSLGLNPPAFQSLGLNPPAFQSLGLNPPAFQSLGLNPPAFQSLGLNPPAFQSLGLNPPAFQSLGLNPPAFQSLGLKPPAFQSLGLNPPAFQSLGLNPPAFQSLGLNPTAFQSLGLNPPAFQSLGLNPPAFQSLGLNPPAFQSLGLNPPAFQSLGLNPTAFQSLGLKPPAFQSLGLNPPAFQSLGLNPPTFQSLGLKPPAFQSLGL

SEQ ID NO: 143952 - protein, 79 aa, Heterodera glycines
MCSSSNGVATEAEVPLGFVSFKMTLFKESESDTAALRKRREDASTPRPRNTEEETDDWEECEGEADNEAKAADKANDGQ

SEQ ID NO: 143953 - protein, 66 aa, Heterodera glycines
LGPLVTSESSTLLGSLSPKERIPLHQTKFAIEIGDKVKCLSYSEVRNTYKEELLQYFEERAKIDEE

SEQ ID NO: 143954 - protein, 21 aa, Heterodera glycines
MRFGISAMKPMFQSDETKPKY

SEQ ID NO: 143955 - protein, 47 aa, Heterodera glycines
QDSNVPLRPKFFSISGKKSKFFRKKYQSIELEKLCFGSGLRFSEKNR

SEQ ID NO: 143956 - protein, 44 aa, Heterodera glycines
SQFFDLLDWAELVKSAPPESANTVASRAALLVNAMYEQHGVFYV

SEQ ID NO: 143957 - protein, 215 aa, Heterodera glycines
RAFNQSVDKKSFKSFIIGNIEFLSTSLQFYLIAFQTKGQAQQADQSKLFCYDFDDKCRLFCYDFDDKCRWRNMEGFLMDDFDWYQGAGFLDENRLSMSNINFELSDGFYGITATDKIELSGAKGILVSDVIQCQTGNAELRFITPVENNDPGPAYIILPDLGGDPLQIFIIFIQAHNFVFNSAALQGGFAIIDNLEYYGEFCDNEGKKKIDKINK

SEQ ID NO: 143958 - protein, 52 aa, Heterodera glycines
MQGYSPKRVLNRTKFLLQERVLKRTKFYLHVSLGTLMLFLSKREMNKIFKNF

SEQ ID NO: 143959 - protein, 21 aa, Heterodera glycines
MAVSFFSWGFDRKLGTNICLL

SEQ ID NO: 143960 - protein, 19 aa, Heterodera glycines
TFAFSSLALPNTHTIFEML

SEQ ID NO: 143961 - protein, 19 aa, Heterodera glycines
TFSFSSLALPNTHTIFEML

SEQ ID NO: 143962 - protein, 19 aa, Heterodera glycines
TFAFSSLALPNTHTIFEML

SEQ ID NO: 143963 - protein, 180 aa, Heterodera glycines
FIKTCNINHASLPEMKPFKIKNKDGLSNDYTDFWVDYEPIRHCFWVDYEPIRHCTSDRPICESRFLFCDRSVFLFCDRSVWRCRSRIVLGGNCTGFAGTEICYGSVCIQARPKVNLAFDRIKFSAESLAHHEVVWAKSWLLEEGARPTSSGIAHVVVREEGAARERSAFVPRHTQYPELP

SEQ ID NO: 143964 - protein, 49 aa, Heterodera glycines
MENKMAKNKLSLLDYRIDNSIRLYDEIKSFKNRQTSKQRRTDRSAIKFN

SEQ ID NO: 143965 - protein, 106 aa, Heterodera glycines
IIFIQKIFFWVFGAVPLNRCAQIYGETESFGNSFPIACTLILRWIFAPHNCLSTPNGHLKKSIFLFSGQSPRTDAPRFMGRPNPSGIAYYSLYFNSALDFSSGIIV

SEQ ID NO: 143966 - protein, 195 aa, Heterodera glycines
MAKLMKMVKRINLKKLSVFSAAKALDTALLGIEIAFCPFANVWHNAQGKHEGMANFVVQKFASLAFAILEIKKPAKDLIKETIKAIRKRFEESDKKHLTMAIEVVDQIENIISKILIFPRPENLQNSEMLVNLDFYINYFSQIMLICSPSAVAALTDSAPMFKKLHDKIQFFSFSLVTQFKGIAEKLRNGEKRGN

SEQ ID NO: 143967 - protein, 70 aa, Heterodera glycines
NAKTKPKDKTGNLDEKKEAKGRQREKQQKEGKADHRNAQFHEAQTVRGALLCVFKSKRQNENNGKDPEGK

SEQ ID NO: 143968 - protein, 58 aa, Heterodera glycines
MSAFFAIFSPAFIFAIVATVVLGLITDDSGGAEKRVEESEEEKKVRRRTVTTYSRVQY

SEQ ID NO: 143969 - protein, 75 aa, Heterodera glycines
MYIFAKVSQALKMVPPAVPGEAGEPGRPGNEGLPGAQGAPGAPGSAGSPGQPGESGQPGHQEFLKMNLPKKNFLI

SEQ ID NO: 143970 - protein, 129 aa, Heterodera glycines
MERLGIRLNSVREFAFDLEHTLPNHKTQQTCLLQISTRREDFIIDILNPQVRNRMHLLKKAFENEGIMKVAHGQNDVHWMKRDFGILTVPLLDTFTVGLANGNNSIKKSIAPTFILNAIVLLQSNMSMV

SEQ ID NO: 143971 - protein, 232 aa, Heterodera glycines
MSILWNVSKKSRIKIKQFQNSDFPLANGSDGKDSSQFVAGCESSSVKQTVTEDCYIGTAYTEQELATLCHEHCLRAPPNGTIEGLKRVHLVCSYNSRPWLCPCLAEWVADTGALYMRGEHNEHPTEAKPTGEEEEKEKAENNENGKEEKERHRRGEGERKKWGKRTLKKERSSSREDEEQTEGQCTEERARGRREKNKRQNYGVKKERVKKERNEGTADNEQMGQHNDQQRN

SEQ ID NO: 143972 - protein, 81 aa, Heterodera glycines
MDLLQLPSISDDELDYDLDVPADGVNATLKTQRASNNNEAGRLCLVSSVFQNSHKFVLISMVIRRFFNFISKPFRTMMARH

SEQ ID NO: 143973 - protein, 88 aa, Heterodera glycines; identical to SEQ ID NO: 124691

SEQ ID NO: 143974 - protein, 93 aa, Heterodera glycines
VPPKRTLEKIDFFVFGAVPPNRCAQIYGETESFRNSFPIACTLILRWIFAPHNCLSTPNGHLKKSIFLFSGQSPRTDAPRFMGRPNPSGIASL

SEQ ID NO: 143975 - protein, 104 aa, Heterodera glycines
MISSSYFEECNGTECLYALFSKPKLQNEDDLPYKIMEDKTFCQKASEKLKKVIKIKSENENAREMFDKVMKEMSEKAKKMYKEQKYIGTTYFTKFIWNSPFLQG

SEQ ID NO: 143976 - protein, 69 aa, Heterodera glycines
MTVIVFLIDTSASMMQKQYLGTTLLDFARLTVEQFLKQRQRDPASSGDRYMLMTFEEYPCNIKVICCHF

SEQ ID NO: 143977 - protein, 64 aa, Heterodera glycines
MPSLIFYSLPFLMLANLAIFFGQALFRFIPHILFVFVSIFIVGMVNGACCNFFGKIHQQVKLSL

SEQ ID NO: 143978 - protein, 63 aa, Heterodera glycines
MSDDKKSPKFYATVLDDIGSYLVRAVPLYIKKIADEPSPPADNENDTITRKRRFRRACCLMYL

SEQ ID NO: 143979 - protein, 79 aa, Heterodera glycines
MPIAPFELMNEVTNEKLTLIKGGAFRWLLKRCPIVGETAAVVQKQQKKDEKLDRLNGVYFCLYDAIFSTPGHIDQRKKK

SEQ ID NO: 143980 - protein, 225 aa, Heterodera glycines
IWDVLAREIWPIFAKSIRHLGFRNSDALNNLRSRTSPTILTDLDQLVSIDSGALLPDGIADDGPNATAGQALAKWLHTPTKNGQPKQLHRNNYFGPPKLEWVNNFKETFRRATTSVSYTIQLYIIVEPMPIEPFELVNERTNEKLTLTKEIDEFDVNVCNWLLQRCPIGETATVPAIKWEESVNPSANLNNVTFDLWSFDKSIGPLSPPAEEKEEEADQSNENVV

SEQ ID NO: 143981 - protein, 287 aa, Heterodera glycines
DVWMDILPSFNYAKLGLKMALLSDRFDVLVDKHFDGKSELTIWRRIRIRKDKGPKAKLYVDHSVLAFLRSNKQIWDRSGIKLDLFLPLYMTDVKLIWDVFTREIWPLFAKSIRHLSFHADNLENLRRRISPTLLTDLDQLYSIDSGALFPDGIADDGPNATAGQALSKWLHTPSKNGQPKQLHRNNYFGPPKLEWVNNFKETFLRATTSVAYNVRLELLVASQMNIVEPFELVNEMTQEKLTLTKDEEIWLLKRCPIVGETATVQWEKDENLDNLNGVIFHLYHDCI

SEQ ID NO: 143982 - protein, 78 aa, Heterodera glycines
MSFAKLLAESSSDDAEETSHSKSAVKAEPDESDDEIDTEYHKPSEVANKQSKKKAMADLLSKRRNKIQGNWRERRVGG

SEQ ID NO: 143983 - protein, 25 aa, Heterodera glycines
TCTCGVVVKLSTFHNFSPGFNSPLG

SEQ ID NO: 143984 - protein, 139 aa, Heterodera glycines
MDRLDTVIASLLNCPARNLCDCLNHPDEIQKTTYKNQLDEYKDFEYGGITRESARKQMAYNGFKNVTVDQHFYVRHRICLRYSSNPCVIEKHKNGNERFYPLELVKVKDNDIIYLGQNFPKPLIRDDNMFIDDQQYLNW

SEQ ID NO: 143985 - protein, 112 aa, Heterodera glycines
KTLQTTYKNQLDEYKDFEYGGITRESARKQMAYNGFKNVTVDQHFYVRHRICLRYSSNPCVIEKHKNGNERFYPLELVKVKDNDIIYLGQNFPKPLIRDDNMFIDDQQYLNW

SEQ ID NO: 143986 - protein, 272 aa, Heterodera glycines
MSGPIRMRINPSLRKLTERLVEIRPVIDAQQRDPEGIDLLRNSLVKIKRSVTFIDERIEQWRTYMTEIEVDERAAEEALFVNMNANQRHVTEWLEDAREAIDEIEIILVNEADDGSDTLSVELGAQGNQQRINQNENERNEQRIVNRERVEAPPVYYPKLPWPNFYGDTMSWPVFWQAFQANMGDKPIPEAQKCTYLLLSLKGKAARAMRGYQPTAENYNLVINALKRLYGNEKVIKEALQNELLNLPQANEAAISLRICLEDVAQECASIK

SEQ ID NO: 143987 - protein, 131 aa, Heterodera glycines
MLSFRRVPKLFALEVTWPTISRAYAKNKIGTTAIVEGEAEYKKVAQRVKEKLDIIGQQKYFHTVIVFPNWSNAFQLAILAKQSHYFFLDGENEIKENKINVIVVRCETDRFGRAIQAGQWFTQTVENQMKT

SEQ ID NO: 143988 - protein, 182 aa, Heterodera glycines
ACRDARRGRRTVGRCRAGGTPIIELNSLGNSKHQLLFTPPRAAKYKLYLYCSELVVPSAYPLLAIAEKNGQTAAEERDELSKVVLRGEGLTTARVKESAEFIIDASEMHEQVGKINAALLGERADGIYTPLMGGTYQLIVQIDSKNVPGSPSTVQVHYHQLPAELISVDAKPLKFGVINEDI

SEQ ID NO: 143989 - protein, 69 aa, Heterodera glycines
MVFPVLFLFGCIFLVAFPIICLCPVLSVTSIFGVCTFLSKYVAFVSLIKLFLFLVCVIRKSNTEARRCR

SEQ ID NO: 143990 - protein, 38 aa, Heterodera glycines
EISQILPRPFGVCDDVDIPPLPKPLKHRNNGAHCKRQH

SEQ ID NO: 143991 - protein, 78 aa, Heterodera glycines
MNRKADTKNHKYYVNSETFNQINRQFYLAFKDVHPSWSLIGCALIFGIIAVIGIIFNSSVIGVTFLTKCVISVDKFLE

SEQ ID NO: 143992 - protein, 33 aa, Heterodera glycines
RLIEPVKSFRMISRLFDSVNNFKSYIDSKLAQT

SEQ ID NO: 143993 - protein, 76 aa, Heterodera glycines
MICSSFLLLVDTVADGESAKIVRHGCASKSLQKAIFSQLKKHLLSFLLKMSSLDERVQHSDALFVTFGLNQLNQQQ

SEQ ID NO: 143994 - protein, 231 aa, Heterodera glycines
MTMPSNRRFPPMQTLGCCLSVTFLQIGSCQQYAVRAMPTFVILLNGQEMGRVQGADPAGLEHLIASLANSPDIGKGSTTKKTLEAHVANSEERRWLERLVSQSQRMSIYEDEVSQTLALSLIPAEELREKATTNGEVNQYDLAKGLLGWFHGFFSWVNHPKCEKCGVEGKPGDRGVPIYLLVTPLNFFCYINNQIGKHFKKPKGMEIEENGKATSSEDSNMKWKTEEDNLS

SEQ ID NO: 143995 - protein, 120 aa, Heterodera glycines
MGMNALLNAAGISGGQAFPNIGTFPVHQHQFDLQSLAAAAQPHHHQQQQQLSSALNLQALVGAGAVHQPPTPITSAAAPNNIPGISQELLFQATLLAAANLNNPGLITSNTTPQQQQRPK

SEQ ID NO: 143996 - protein, 37 aa, Heterodera glycines
MPNNTLMGSKSYIYGFLNKRPAYVMADSGVLFLNFSV

SEQ ID NO: 143997 - protein, 236 aa, Heterodera glycines
YIDHSVIAVLRSNHKMFDKSGTKLRMGMLYSDMADDRQPIWDVFVREIWPIFASNIRHLDFIDADHLDNLRRRTSPTILTDLNQLSSIDSVLLLPDAIGDNFDGPNATAGQALSKWLHSPRKYGQPKRFRFIDINEHVSLHLINNLKEEFMRATTISSVSYEIHFSVHVPTKPMVPFELVNERTQEKLTLAKSNELDNIWIMKRCKIGEAAAVQQQKKDENWNYVYFWLYSGTNCI

SEQ ID NO: 143998 - protein, 103 aa, Heterodera glycines
IIFIQKIFFWVFGAVPLNRCAQIYGETESFRNSFTIACTLILRWIFAPHNCLSTPNGHLKKSIYFCFRGSPPEPMRPDLWGDRILPDSFPIACTLILRWILLP

SEQ ID NO: 143999 - protein, 36 aa, Heterodera glycines
KPKLFGLFKKELKIFKNFIHLPFDRKSIREPYLTFN

SEQ ID NO: 144000 - protein, 50 aa, Heterodera glycines
MTAQWERNKVTTPSNVRNANIWVTNQRIFANIGKMIFWRYEILVAYFCTD

SEQ ID NO: 144001 - protein, 44 aa, Heterodera glycines
MHLSIRLPDNRTVDNWTVDNRTVGQSDSEDNRTEVDNRTEDNPT

SEQ ID NO: 144002 - protein, 52 aa, Heterodera glycines
MSLGFIIKALARNRSKRRFSMSSSSSSPSRRPVSTPELCQEKYVKRYTIQEF

SEQ ID NO: 144003 - protein, 16 aa, Heterodera glycines
MCFIVQLMWGHAKLNK

SEQ ID NO: 144004 - protein, 296 aa, Heterodera glycines
MSDKPSAEDGEHEQQKKMKWEIPICADDWLAVFALLPPRQLGLEIALLSPRFDRMVDEHFKTRRWALKYFRIKSKIGENGTKEMRIKNFNRKVAPIVPIPRIPLPDKVVDFSGISIRYIDNDVITFLQRFQRLFASCAINLSIKTKSGRNLKSIERFIWPMIRQNICGIIFCKAKDFRRLRKNAPSILRHIFRIDDDKSPRKIPLQSVYFDKGELPKLPTAVESAHDNGNANAKVPLNESEALTKWLFSSRPENDLPPKVLRCRVYNSDIESWIARIEQYKTVMVNFGFKFVLFVV

SEQ ID NO: 144005 - protein, 105 aa, Heterodera glycines
NLYVSKNRNYAKKASQTILALPIPSTIAFIHPIMSAKIIRVPKIACDLSLAKNGVSKNRNYAQKASQTILALPIPSPIAFIHPIMSAKIIRVPKIACDLSLEKMV

SEQ ID NO: 144006 - protein, 46 aa, Heterodera glycines
MEKIYYLSVLFIFCFAFSAFSVISLFITAEALPYLKSSGFEADLYQ

SEQ ID NO: 144007 - protein, 77 aa, Heterodera glycines
TLNSPTNRLLAFNAALEIAHQSSYFTFLFLSLTGQTFIDYKLAVKIGTLSIIGYNGVFPAMLCTAIDRLFCVIFPYL

SEQ ID NO: 144008 - protein, 295 aa, Heterodera glycines
RDELRNEKETLSNLQTQRKKSDERQSQTDDEPKQRMTEQQIAEMVEQNVQLKTELNEREEELYRLRNDKVLAEITTSEGHSKVSQSGKTTEKNGGKGRGRGQTRHMEGTMPSEIIQSLLPAKFTLILTQTQRPPSDTDSATSNNDWERMGKEEIEVEGVSSSAGSEEKETAMANRRKKSSELSDFSTQTDEVSFSIRKTRIVKKIFLGMFKTQFGEDKSEERLNLLEEELDKANSKCEGMATELANANLRIGDAFKIKEQLEAEADLIGPRENGEVARRFAKTPRTLAHYGGAFL

SEQ ID NO: 144009 - protein, 830 aa, Heterodera glycines
MPSKDRELKRRKQEEHLRRTEQSVIPGRSPIPNCPPQGNSNCPILDNPLSADGNGAASPRGFNTPNLSALQLSTPASSIGSKRRGRPPKTGAESITASQNSVSSIDTQITPATQNIGTSPCSKKGKVAEVNRPKFATEAIASTPVSTQKSRGRPSKRSGGPGRSKTDASISEGSSMDQSSEAGTNVAVLPNVAEKIDFNTVQINFATTRNFSCKIWKWAAIGLYERDGETPLAPRSGPRYIETCWNDLTQFLNDGFAATYLAYLATISQRKVVVVDPMVWSNGLDRVMPYKNMTFGYDPNVPAEVILLPVHFPGHWTLIVHDVQFGTHFADSLPTTYGRLDPQLTNKIKNIISDILPSTVLTGIFNAVNLTAQHDGNSCGYFVCLYAESWLMNNRTFVLPDLSINYEKRRILWHINELYGTDNVPYHPREGVPTPCPIVYRHADEVQSTSKAAELMEVDEHDDIMIIEPQTSGQAVDAILTQAQVAGENQADTLGLVSESCIPQEPIAQADDVIFIRPKTPPRRSMRVQKRHSASVSRSPSPAPKRPPPANSLGVATPITRRCSAFHKGWQCAAAAAKHFPEYCDSGKLGDKKCADCAAHLFSHEDSSICCRKGRVVLPMLNPHPDELKQLIVGNKQSREGKEFVRHMSRYNNLLQFASVSAGNKPSPAGGPMAVILNGEFHRRISSMQAGTTQIPGFGQLYILDPVEAMEQRRNNPRFTGEKITNEDEFVQGHQLNEQTLEILEQMIQLHHPAAQAYKQAREQLTELLQQQTPEELRFFRMTLLNERRAPAGLKDPKLHPHQIITPSTGEGMFAIHADPTGAPPPKGIW

SEQ ID NO: 144010 - protein, 151 aa, Heterodera glycines
MGLWSTTTCPLWDCGQQRPAPYGIVVNNDLPLMGLWSTTTCPLWDCGQQRPAPYGIVVNNDLPLMGLWSKRPAPYGIVVNNDLPLMGLWLITTCPLWDCGQQGPARYGIVVNKDLPVMGLWSTTTCLLWDCGQQRPAPYGIVVNKDLPLMG

SEQ ID NO: 144011 - protein, 80 aa, Heterodera glycines; identical to SEQ ID NO: 142591

SEQ ID NO: 144012 - protein, 22 aa, Heterodera glycines
MLFGLKHLIDDDDCGRGGSKRC

SEQ ID NO: 144013 - protein, 41 aa, Heterodera glycines
IFYRFLNVWIFFGLPKLHRTWFFLFSFKSPPNFFYSLTRPY

SEQ ID NO: 144014 - protein, 37 aa, Heterodera glycines; identical to SEQ ID NO: 132994

SEQ ID NO: 144015 - protein, 97 aa, Heterodera glycines
MPIEPFELVNEVTNEKLTLTKDGTGEFNWLLERCPIIGETAAVQKQQQKKDENSDANLNKVFFRLYDDIGVTKLVLGLGFKVSGFYRGKKRTNTKHS

SEQ ID NO: 144016 - protein, 114 aa, Heterodera glycines
EMSLFTKCPDGFTNLQLIELFRLDWRRIRSEEDLLAHSDHLRDGPLGRGCLIGPTNSADCLHCFERLRRAIEQVEAVHWAFANLLNRFDCRLAKFGLASATQPFSPNTTCHNCA

SEQ ID NO: 144017 - protein, 55 aa, Heterodera glycines
MKNFTKCINLKTSKVIFLISSQKEMNLINKHKFLNNNSTIYQLSVFIWKNLKNKL

SEQ ID NO: 144018 - protein, 74 aa, Heterodera glycines
MNAAHVECQRLITGFKRRAAETCEAPVTIRAQVVQNTCTPVLAAFPSKIATKSDQTIKEVSRSRCTDSPTLLPL

SEQ ID NO: 144019 - protein, 37 aa, Heterodera glycines
MLAKTEELDESLRSIEKLLQQIKDTKRLLDKFEEHIV

SEQ ID NO: 144020 - protein, 178 aa, Heterodera glycines
YHWHWESATLTTSRGLELSASDQVRVRELSASDQVRVRRQAAAAWQVTLAWQVTLVMSQVFHLFVMSQVFHLFMCTTRRISIFQHGITNLVSIFAIIIEILLLNLFVYTPAFQYLMNIQSPPMFVWLFAPVVGLYLLIFNESRKYFIRNHPNNRIVRLLRKYFIRNHPNNRIVRLLKF

SEQ ID NO: 144021 - protein, 202 aa, Heterodera glycines
MADAMQDGARWKKAKTAINVLGNLLLAESLDTTSATPLKNDVADIKKEEEATVAEEHKEDDDDQQKEDLGDIDKTLDDFFNSIKASTANIDKDICFKLPFGLIISGPSSSGKTQFLLKFIAESDHLITPKPVSMLYCFGEMNAAVPVLQKAGVDVYAGVPSEELIKRLPKPLLLVLDDLMLSVDERYLSDLFTRKAHHHQFC

SEQ ID NO: 144022 - protein, 81 aa, Heterodera glycines
MASVSNDYRQMKTVPPPSSSISSRKPNPSNQTGQGKRIVDSLWDLRLDSILGDQQITEAVHQLIVAIIIIALISAVLYLEV

SEQ ID NO: 144023 - protein, 114 aa, Heterodera glycines
MFGPQQTGLINQSAFLRQLDSRTANLDTFVLKSSTNVVPTAASVCAGDSGTTDGAMTSCTRDADKQQQEELTIDQIQYIMQNEHVSKEREQEVRRTTRSPSPVVSPDFFISNFC

SEQ ID NO: 144024 - protein, 130 aa, Heterodera glycines
MWSFFFAMIVLSLLCFLSLFGAEVKIRKYLPMVVQNSRLFRREDVSATKRKLIQIREIGKSFCQRHDSCQSRAVPFTPPASFSLNHCPTLIPLILCSPLIPFPRRCSAKPINYAANNKLTGTSMSQEGAV

SEQ ID NO: 144025 - protein, 223 aa, Heterodera glycines
MNNHFIVLVYYPKIQKKKRRESKANRTDGERETNREKGKANVKKRDKGAKRGKVNAKKRDKRSKRGKANAKKRDKGAKRGKAKEKERDKQSKSGKANAKKRDKRSKRGKANAKKRDKGEKSGKAKEKERDKQSKSGKANAKKRDKRSKRGKANAKKRDKGEKSGKAKEKERDKGAKRGKAKEKERDKQSKSGKANAKKRDKGAKRGKAKEKERDKQSKSGKAL

SEQ ID NO: 144026 - protein, 82 aa, Heterodera glycines
MPTFARQFGTGTEGGQRSGGARDSAARRHRQIGERVGGPETHDSANANAPINGGQIGEHRTEEPTIGATFHRSVGHVTARKV

SEQ ID NO: 144027 - protein, 38 aa, Heterodera glycines; identical to SEQ ID NO: 130624

SEQ ID NO: 144028 - protein, 38 aa, Heterodera glycines; identical to SEQ ID NO: 130624

SEQ ID NO: 144029 - protein, 51 aa, Heterodera glycines
FEYPKRTLEKIDFFVFRAVPPNRCAQIYEETESFRNSFTIACTLILRWIFA

SEQ ID NO: 144030 - protein, 23 aa, Heterodera glycines
FTNHVSNVPFATRRLRLALVRLS

SEQ ID NO: 144031 - protein, 90 aa, Heterodera glycines
MGPKIVIYLLGIGVLWIFAVVQCLPVNGMSAYVVDDRPVHLSLKRAIGIYWNAIQYPGIEKRTAYPYPSPTDIKYIGFGRKRATFDGADK

SEQ ID NO: 144032 - protein, 49 aa, Heterodera glycines
ALQLHEPCCSGLSQIAHLKHDLWIVSLSTTILSVGGTSFSHIWHNGLLK

SEQ ID NO: 144033 - protein, 76 aa, Heterodera glycines
MSSQQQQLDVLIVIDGTNIDKPCAFGVSNCQSLNDVLREVDFRQILRNDFMLIQNLATFCFSYLTRQIEKFRLFLN

SEQ ID NO: 144034 - protein, 20 aa, Heterodera glycines
KVISTRPIWQVKQRFLRRQK

SEQ ID NO: 144035 - protein, 105 aa, Heterodera glycines
ILRWIFAPHNCLSTPNGHLKKSIYFVFGAVPPNRCAQIYGETESFGNSFPIACTLILRWIFAPHNCLSTPNGHLKKSIFLFSGQSPRTDAPRFMGRPNPSGIASL

SEQ ID NO: 144036 - protein, 142 aa, Heterodera glycines
ITDAMIDFLPIDNAEAIVAQLSDPAIRIVSMTVTEGGYFINSATGEFDPTHPAIVADSKDPANPRPVFGLIVPALSRRRANGPDPFTVLSCDNITKNGEMARNACVGMARALGQQELADWINERCGIPERNGRSDHSDDRGY

SEQ ID NO: 144037 - protein, 235 aa, Heterodera glycines
SDSGIMSDEGGACSHSNSPTEMGTRSVPLLHANAEAVAPARAAQFSANLFQFPRPTAQMPTLAQHHHRVQAVHSPAPTPAGHGHAQSQLSPLELVLQMQHQHNQQQQLQQQQQQHLHPFASLQQFSPIPKSDSVAAGVADEVNSAPAAASTPTLIMPNDAIGGAAANNNAFLPCELQQLLAIAALTQQHHQPQQQQPMVPVSAANGTNTNNNSNNNLPSFHSLPPPAAPDHNTMT

SEQ ID NO: 144038 - protein, 298 aa, Heterodera glycines
SLSDFFSRSTHTNNWALLVCALLVCSSRFWFNYRHVANVLSLYRSLKRLGMPDSNIILMLSDNIPCNANIILMLSDNIPCNARNPSPASIFNNAFAHQNLYLEDTEVSIFNNAFAHQNLYLEDTEVDYRGYEVTAESVVRILTGRTHTDTPRNKRLLSDSQSNVLIYLTGHGGDGFLKFQDAEELTNVDLADAIETMHQQNRYNELLLIADTCQSESMYQRVYSPRVLATSSSLVGEDSLSHHVDRVGEDSLSHHVDRSIGVYIIDRPQPSGTLYFLIRYAYHMQQFLDTRVTGLNSN

SEQ ID NO: 144039 - protein, 243 aa, Heterodera glycines
MVANGLLDNPAMFAGHSSTPKQCVRDWLNLELSECIPFDLFHQQLIFMLRSSLPKQQRNIFNALKSSAAALSVRDGKLFVQNRGFELHKNVHLVAFGKAAPAMVHGAERVLGEHILRGIASVPMKIDGPTMSQGGHVQTPIAILNDLEILDKVPIRLVDALRSAHLEKDQYDPSPTDALNVIIASNSILLDNLANQINDSLSISPFIVTNRLEGNATELGIRFSKLIKQSMVNGKLDRSIMIA

SEQ ID NO: 144040 - protein, 20 aa, Heterodera glycines
MSKMNSHPEQESVVNTCNLV

SEQ ID NO: 144041 - protein, 186 aa, Heterodera glycines
MEIRGKIGENGTEEMEIVNSDGKELPTPHYPLPNKVIGFKLILINFIDQNVLTFPGHFHRFFATSTTKLFIRTENIQILEFLMRNIWPMFKATIRLIYFHSIAFGQIRQFAPLMLNDCPSLHVVDFDGGILPEFPPDDSANASDGQAVAKWLFTPRPDNLTKVLSVKITFVEQLLATVEHIKAVIN

SEQ ID NO: 144042 - protein, 136 aa, Heterodera glycines
PGKKNIIADVLSRSGTGNEIEEGEQNSEEIAFIGKIRTTENDLENFGLMEERQEWVEQTKIGEMKPIYEFLERKVLPNDQRDQQRVIGKCHKFVVFKDLLYLSEKEGKMRLFVPQKFRNELVKNRHEGICAGHMSG

SEQ ID NO: 144043 - protein, 70 aa, Heterodera glycines
KPSSFSEASRLGFSAIGSTTPKRTWKCGCWLSCSLPMLRRRELGRPIENGQTNEGINHFILMCFQNKLPN

SEQ ID NO: 144044 - protein, 44 aa, Heterodera glycines
VSFFLFSLVNYLNFQFFSFFRKNFCLFSAGTASDNVFYLFRKIN

SEQ ID NO: 144045 - protein, 53 aa, Heterodera glycines
LFFEKFFVFFSAGTASDNVFYLFRKINFFFFLIYFNYISSLNFLINIFKLSPY

SEQ ID NO: 144046 - protein, 61 aa, Heterodera glycines
MLGYDISWAAFNIIEVMSSTRYSEKRIGYLAAVQAFNDETDSKQQKLALNFAVICEGNLGD

SEQ ID NO: 144047 - protein, 58 aa, Heterodera glycines
MGKRKLLPKIHGKNGVKERQKKREERKAQTAKATEARLVKKIFSRCPAQHRSRNGTTI

SEQ ID NO: 144048 - protein, 151 aa, Heterodera glycines
MPLSNADAINLCFHPSFFSENRLANIKLVMEYVQMIKSILVLRQPAAPFELKEVISSRTNLFADSFQHDCQEFIQFFVDALHETMKGVLRKNDGAGGGAAQRDDQNWRNAIDMMQQHWRSEVLAPKKGSVSSPEKETPSNVRPMKYAFHSP

SEQ ID NO: 144049 - protein, 119 aa, Heterodera glycines
MVKMQLVPDGTFRKVRNNIDRLFDKNLTDLIRGIRNNKENEARYIAACIDEIKVELRQDSIFVKANAIEKLAYLQMLGYDISWAAFNIIEVMSSTRYSEKRIGYLAAVQAFNDETDVCV

SEQ ID NO: 144050 - protein, 368 aa, Heterodera glycines
CINTVIAILISISSEGPGDYTPSIQLCVQKLGILIDDSDQNLKYLGLLAMGKILLTHPKAVQAHKDIVLRCLDDKDESIRLRALDLLEMLSPGIFHVKAARFTCIFYFQILFTIFMGRGNVLLPSSGWDELTGQNSFSPHFYPSVNNVTAVLDAMLRIKLSVVPGPLLSVFVQNIAKLYTFQLCKLEADDDWDGIETLDNLLTSKLPEYQYTDHLEAQERTCNLIAMLKFASKMHTTNVKIGEALTKHFDGELNPVAAKAQRKVPVPDGLNLDECINEIDDSSVEDEMDEEEYDEEEEEHEQKKHHDGIMPTSTAHRQNDHQQQHYAIGNSSSSIGRAKGQQMKHREQSPDDAYHGGGGGGAPRVASE

SEQ ID NO: 144051 - protein, 181 aa, Heterodera glycines
MSAQFREVVKQMLAKRKMLFHHFSYGKLGSGIAMGSGCGGGVRPRVGSGARRSEEAERSSTSMMARKTSSSTATMGLIVQQKQQKDTVIWRNGVGAGAIGSGGGRDEMTAKLIKNNNGGENNNYVGGGGYLARQITTVTTIGEEGGKEEEEEEEKEEKNDDVIEEEEEEEEETDEMDECRL

SEQ ID NO: 144052 - protein, 190 aa, Heterodera glycines
MLNKNLAQEHFIAAAFPSACGKTNLAMLEPTLPGWKAGFFGVAPGTSKKTNPMAVQTFQKNSIFTNVAETSEGKVYWEGLEDEICDRNDVTITDWMGAPWKLGSPTPAAHPNSRFCAPAKQCPIIHPDWESPNGVPIDAIIFGGRRPQGVPLVFESFSWEHGIFTGACLKSETTAAAEHQGKTVMHDPMA

SEQ ID NO: 144053 - protein, 222 aa, Heterodera glycines
ATMDPAKLTPFKQTPGVSASLRQISADAFYVVNEVVIKRLGPIPILKGDFHLLPFGDFHLLPFKVQRFVAEKAELCRPRGIFICDGSEHEAEEMTDLLVERGVLTPLVAYENNYLCRTDPRDCARVESKTWMVTREKYETVTHTPAGVEPIMGHWMPPAQFADELDTRFPGCMAGRIMYVIPFSMPLMAGRIMYVIPFSMPLGSPLSKIGIQVQKMQLINKF

SEQ ID NO: 144054 - protein, 45 aa, Heterodera glycines
IFKCLHFFWLTKTSSNLVLSILFQIAPNFLFQIAPNFFYSLTRPY

SEQ ID NO: 144055 - protein, 93 aa, Heterodera glycines
MQKLKDLVKKKKLDNKFKKLGGGRQLGGPAQQQRTEQAAGRTTSSTRSPSPAAQQRRSDAELIAAAAEKRMHGKQQNDPNAGLTPMQKMVRMQ

SEQ ID NO: 144056 - protein, 63 aa, Heterodera glycines
MEVRIFWQSVLAQYSNNDFWRRAYCCGSTARANIGRSIFKLEVTILGFLVLKIPVLLICNCNQ

SEQ ID NO: 144057 - protein, 118 aa, Heterodera glycines
MDWMPALVTDILLSMDDRFLFLSCWLHGDVRQYDISDPFDVKLVGQFFVGGSIHSKSGVEVLEDKELKAQPDPLIVKGRRVEGGPQMMQLSLDGRRLYVTNSLYSVWDAQFYPELIKS

SEQ ID NO: 144058 - protein, 32 aa, Heterodera glycines
MRKAKCETPKNANNAKGEMRKAKPRPIPDLNH

SEQ ID NO: 144059 - protein, 45 aa, Heterodera glycines
MSITQNKVHIHDQRPKLRITFFILIIEMHNKNHKILPIFLHFLII

SEQ ID NO: 144060 - protein, 77 aa, Heterodera glycines
MRNRSMFLLNPHGLLRGDDCKWQKRLLLMCEQHFTLSHFEAVQVGPVDFASPAGQRTVTTHFWSLQLKQTQQQSPLS

SEQ ID NO: 144061 - protein, 49 aa, Heterodera glycines
ANTESGDCCCVCLSCNDQKCVVTVRCPAGEAKSTGPTCTASKCESVKCC

SEQ ID NO: 144062 - protein, 222 aa, Heterodera glycines
MYINFTFPKTVLLLKMNTLEIDKILSTSPFTKQTYIGCFAADQIPNMEMVKFPNCLVMNIDPITSKGSHWVCAYSPSPSHIEYYDSLGIWPPPSIHIANYLSRFKQIRYSIILLQSPNSSVCVVVMCSSFCLIDVWELPLKRFFFTKMHVDFDPHQVDWSTFSHEFIQYGGYNIFRGVPYQRGAGIGSVFRSLMRFKGPIGKQIGSSIAFKGLESGNRVLTN

SEQ ID NO: 144063 - protein, 196 aa, Heterodera glycines
MQKRKLAPVPASEGIAVAVIVVDEKAVELARNGASAKNSSLPFLPIAVFGFVVIVGAPPNRGALAIELVSVNELDAVLFPYGEMSSTDCAADRLRDRPLTCGCEPEKEGIGAGRESNSKKVLQYPEFISKKAGKPETIMFYSALFRHGIPGELGGGVSLTITPPFQTHKWRKNYAKEPTFVENEGGFFVVVSFGIK

SEQ ID NO: 144064 - protein, 100 aa, Heterodera glycines
  unsure (1)..(100): unsure at all Xaa locations
FPXAPPQPPPRPLSRFSLALSRKRRHPPLCLPPSPPSLSAPPNSLLLAPPPPVALSSVRPPPTPSRQAHNHKLTVDLVSDRLHNQSMTFRRMERELRPVH

SEQ ID NO: 144065 - protein, 86 aa, Heterodera glycines
IIFIQKIFFWVFGAVPLNRCAQIYGETESFGNSFPIACTLILRWIFAPHNCLSTPNGHLKKSIYFCFRGSPPEPMRPDLWGDRSFG

SEQ ID NO: 144066 - protein, 49 aa, Heterodera glycines
MFAFFLAYQNFIEPGSFYSLSNRPKFFLQPRGREAAENCSETYQNLFTS

SEQ ID NO: 144067 - protein, 133 aa, Heterodera glycines
MAISQITEFFPISQKTFESTLRRFPDSLLGNPEKRKELWNDQLHEIFLDRSSQCFEAILHVYRSGGQVIRPASIPVELFIDELVFYELKDDVWANFCESEGCRVQSAYRKPSNKFQRKLWDLVGTAQMPNSNI

SEQ ID NO: 144068 - protein, 142 aa, Heterodera glycines
MTPINGTITVSVVCPFLCTIMTLLFPEIAAAPSAADQSSLIMKQFFDFVYKNKAEELRALLNSLPGDELSHLLYIQYAPKGTEKRLTPLLIATVGNKPEVAAVLACQQQIRTLALKSQKDKKCLGTLSQRHGLCPSFCQIGR

SEQ ID NO: 144069 - protein, 38 aa, Heterodera glycines
  unsure (1)..(38): unsure at all Xaa locations
IFKFFIDFXMFAFFLAYQNFIEPGSFYSLSNRPKFFLQ

SEQ ID NO: 144070 - protein, 201 aa, Heterodera glycines
MFSSIIFLYFACLLPAIAFGVLNDDNTGGGINVRKGILAQAIGGIFFAIFGGQPMIILLTTVPLAIYIKVIYRISESLGYDFFAMYACVGLWCQFFLILYAATELCSLMKLATRSAEEMFSLFIAIAFTVESIRAIHTSFMNNYEVCEDAQAAAEQAELAHRHQQQQLVQHQLNLSLLQKIINPELHHNLTQVMMIGLGNN

SEQ ID NO: 144071 - protein, 88 aa, Heterodera glycines
MRPNVPLFRVPEFWRLSWQAILTKKRLCPALGHIRGGLAQHVPVHCWAAVDAWRAAPFAAAFARAGRRGGARRAGPRARSVSDWLIRE

SEQ ID NO: 144072 - protein, 43 aa, Heterodera glycines; identical to SEQ ID NO: 131671

SEQ ID NO: 144073 - protein, 57 aa, Heterodera glycines
LTNKDDVGKNTFELEKSKRAMEKEMEDLRMQVEELEEAVQLAEVQRLRMEVNIQERG

SEQ ID NO: 144074 - protein, 234 aa, Heterodera glycines
MKEGFLLTRAVRANYEDKCPAGPPGDAGPPGPAGPAGEPGKCPPSPGDDGDTYQPTEDGGKGVTYEEGEEEHDEKLEQDKYQPRHHLNHYHNNKHGKGGHRYAGHGHGGRGHKHRHLYGNNRHGGGGDESDESGAHGGRDKDGSYETSSKTGHNNKKYGSYEHGSAEEGKAGHKHGYGYGESSASVGGDGSYERGRAHKHGGGHKRGSYERITEAPPADGNDEEYERRVRVVRA

SEQ ID NO: 144075 - protein, 108 aa, Heterodera glycines
MSRDYSTLRRDLFSNEEEYLLFIAIRAGQRTADLGRRIQRMRDGLPPPTLFVNDRDLWTVLEHKEIKYKTRMTLEFLFECRSGFELCRNGLKSRFFQPSKLLKSYIVQ

SEQ ID NO: 144076 - protein, 52 aa, Heterodera glycines
MKFSKKFTFMQQKRPNGLKLRGFQSRDNIELLFLPLIQSKCTLCGFEVHFNV

SEQ ID NO: 144077 - protein, 83 aa, Heterodera glycines
MAVVIDHCAVPAVYGLLPSKTLATYTRFFETIRQSVGNNWFPYRIMSDFESGAITAAGNVFPNSIRTGCLFHFGQAIWRRIQR

SEQ ID NO: 144078 - protein, 136 aa, Heterodera glycines
TFVCLNKLRPRASEQRDNCSSYSFGWPPPPSDPLAEERLLAQLFLCTRTTARVRQDSLYGDYTLAASPASTQLRTTHSSFWTQQQQQLKAQQQHHAQQRDNPLQQQQLAMEVVEKDETPKREPTLSDSKQRTAAEQ

SEQ ID NO: 144079 - protein, 99 aa, Heterodera glycines
MSKCINEFLIWNIGLFEKNKIGKVGICLVCKEQNRQKSEFSINDSSTKSLIVHLNSSLHKGSEYDKKFQQLETEWKNAKQKKHKEQPKIADLMNITSSR

SEQ ID NO: 144080 - protein, 43 aa, Heterodera glycines
MNKLCHIFMVRLIVSIIFIYFFIGPISSLFRKRNIIISSTISR

SEQ ID NO: 144081 - protein, 23 aa, Heterodera glycines
MPSTSEKVAEVHGTKEPICPIKT

SEQ ID NO: 144082 - protein, 317 aa, Heterodera glycines
AILATLIVVPQLYQQINEVNSRVFDGVQAFRVNTDSAWTELMDVQISVAFRVNTDSAWTELMDVQISVTPPARPRENPFNSIFLRQKRGNGGLPPQCVCQLQQPQCPPGTPGPPGPPGPAGQPGGPGQPGRPGQPGQQPPCPQASAGCPSCPAGPPGQPGGQGPPGPPGGDGQPGQPGQGGGQGPPGPPGPPGPGGNPGQPGGPGQPGQPGAPGTKSSSVPGPPGPPGQPGGSSVPGPPGPPGQPGGPGQPGGPGQPGQPGGQGPPGPAGQPGGPGQPGGPGQPGAAGQAGQPGHDGAYCPCPPRTSVFARRSRVKV

SEQ ID NO: 144083 - protein, 82 aa, Heterodera glycines
MRIDEAGRFLKVVKEFSQNFPTVRGLLPSPSNETLDELLRCARESVKILIESDAVTDYDMTMLRGALFGIYYYVMYHFPTPA

SEQ ID NO: 144084 - protein, 104 aa, Heterodera glycines
MQDTMCSSVEHSPQQMARASANGGGGDGGGRVAMLAATLADERGDSGPASVGSGIGRGRRGAPPRHDPPPPPGANAPPATNIAGQRQQQAATIIGTKTRRGRDQ

SEQ ID NO: 144085 - protein, 461 aa, Heterodera glycines
MPRSRPHKQKMPCHDHISRKCHATTITRSVMDELGMDELGLWMSWPGTNIVLLVINQPADQVDVLHAVRYVSCSSLFSDHRRPSNILITMPINLTSKSQAHERDAARHGCGCAGQAGVHRTVRESRDPMTSLSPPPVHRLLDGAFGAAAAGGRSASSTPPAGAETVAADSPLRYLTSIYVPEDYTGAMEHNNSTFRLTTAEITLLAISVLLVFGVCAMLFMLLRCCKNKQQQTITKSDVEYMLDAQQAGPRPYNVELITRKMAQSDAAAVARRMPKALEQCTLSPESRATMVASAGIYSGGSVGGDGSACARTAATTMPSDTAATASGQQRRGGGGAGQHTDTATEARAVVGSHHPVADSSTTTTTTTTTTTSASSDCSSEEAGDRSGSGGEFSPQQQQSQQQQLKRAGGSGEDSRSELQLLPTTCCWYGDGTAGAEMAAALARWTNKSSSSSHKSDALST

SEQ ID NO: 144086 - protein, 27 aa, Heterodera glycines
MDEIVLSKIRNIGFILRLMNKIEANLW

SEQ ID NO: 144087 - protein, 196 aa, Heterodera glycines
  unsure (1)..(196): unsure at all Xaa locations
IGSSLHTDRSRNTNRPRISRNGSVPGSDGRCVQRAGTYSERVDDSPLQGIPRSRTIIAMSDPNHGKFSPVYQPLSGKDKHADFASVARVQPRTSKGHHRPVIAQFRAAEHRKSLXEVVPTEAMSQLFSXARVSLVIGINQTNRSTNXERPCTTIHRIMKKLSICQSLRCPGRVSFPVLSQIKPQAPLLVVPFLQFL

SEQ ID NO: 144088 - protein, 190 aa, Heterodera glycines
PAAGSPTATLLRLLPVQATAIKSSSLHTDRSRNTNRPRISRNGSVPGSDGRCVQRAGTYSERVDDSPLQGIPRSRTIIAMSDPNHGKFSPVYQPLSGKDKHADFASRACSRTSKGHHRPVIAQFRAAEHRKSLEVVPTEAMSQLFSARVSLVIGINQTNRSTNERPCTTIHRIMKKLSICQSLRCPGRVS

SEQ ID NO: 144089 - protein, 25 aa, Heterodera glycines
TCTCGVVVKLSTFHNFSPEFNSPLG

SEQ ID NO: 144090 - protein, 153 aa, Heterodera glycines
MPLFLGIDLGTTSVKIALIDGDKKTFLEWDRKHNALIEREEKDKHEQSPKKILDTVQKLMGEMETDKLAQVKGIGISGQMHGVMLWEADSIGLGVDRCHCSPLITWMDSRCDEQFLRKLPNIPLDSVQKCVYFLTKCRVVGVSSPTSFGPSNR

SEQ ID NO: 144091 - protein, 23 aa, Heterodera glycines
KSFKLEAASIEFLGFNSNSKMRN

SEQ ID NO: 144092 - protein, 79 aa, Heterodera glycines
MVAQLEALPESWGDRRTLLWLRQYEQFDRRTDKFWRSLGFAKHRQYSPGYENLAFFLDQLGHPPAIKTEEVAQSVGDAK

SEQ ID NO: 144093 - protein, 158 aa, Heterodera glycines
MVAKVFLLYPNATVPTLIEKFFVTYSTWKWPMPIQLAQTDFTQKGEFLSWTPGREHFVKRQFSPRPMLRLIRPVLAMAIITPTFPEQNLAQNANLSTQKCLRNHMTKALAKIRNGNDQQKALFAPLESKTFLTMVGRLFVVEIFVGKIMATPKQIGHF

SEQ ID NO: 144094 - protein, 98 aa, Heterodera glycines
MDQILPFVPRSDFGGPMQWAKFAEFSEKVKRNIGCNKIWLIGIEMNESPKEMSKFKSKIKANLKKKFDEKISKDFGGYSAQIESEYVDERGRIEQIFG

SEQ ID NO: 144095 - protein, 75 aa, Heterodera glycines
MNIRSNFVLFFFIVLTLFALSRGVPLDEGVDEEGLDLKPVPASKVTDRAERIARRCVRCKRHGWGRWSSSNWGWG

SEQ ID NO: 144096 - protein, 41 aa, Heterodera glycines
CSLPPTCQSNWLFSVSRFPQRRRAHPSVHYTTNKTQPIPHS

SEQ ID NO: 144097 - protein, 33 aa, Heterodera glycines
MAKSDKFSLKMKKLKTNHSSASADRQNEKCANA

SEQ ID NO: 144098 - protein, 35 aa, Heterodera glycines
MITTPNKMIKQADQSEQSVFCLLPSFYAKNTAHLG

SEQ ID NO: 144099 - protein, 82 aa, Heterodera glycines
MDGTTPIGSRQTLVEQFNKANIQTLFGQSHFGQPKTATVLQNQRIARIVHPGLVKKRPEVWHRNGGYFCRQRKRSEQKKVEE

SEQ ID NO: 144100 - protein, 49 aa, Heterodera glycines; identical to SEQ ID NO: 130195

SEQ ID NO: 144101 - protein, 38 aa, Heterodera glycines; identical to SEQ ID NO: 129423

SEQ ID NO: 144102 - protein, 49 aa, Heterodera glycines
MICVDNSEWMRNGDLPPTRFNCQQEAVRALIHLKLRSNPENAVGLLSLA

SEQ ID NO: 144103 - protein, 151 aa, Heterodera glycines
MRSTLKEIFSIYSVDSFLGSPKKGVLDFQIVIWHFMDVVENAFRHIKEMELFDGKLEEIRTKFEKEWEELTEKWQINEDFKFNVKICLLHGFTHRIIRHETLNGHSEWATYAKSVSNGIFSIEGGPEFDSVSTVGMYSTGGYYRNAYKMGE

SEQ ID NO: 144104 - protein, 66 aa, Heterodera glycines
MQSVGLLLFPLFIFIALLIIAAVTQNEKKILECPREEAPIEQLRELDKNKLPDKGEIERPKTKFCH

SEQ ID NO: 144105 - protein, 234 aa, Heterodera glycines
MSKARAHEKYLPQFSSSTCSITRRGFDFQCEWCDQRMDMDFITSQWPPDQTCSPFVFTFVDHTASVADTEAPSIMGLDWIIPFERATQQPIATTLEQQSLIVNSVQPTNDPVKLEGQIKASFPKVFQPGLGHCVKTKATLHLKQNVKPVLCRARPVPHGVQAAVDEELDRLLDSGVLKPIDFSRWAAPVLAVRKKSGNVRICIDFSTGLNDALELNRHPLPRTEDIFHALRGAQ

SEQ ID NO: 144106 - protein, 420 aa, Heterodera glycines
MIIRSPRRNPFPRRLAGENPEQRRNENNLENEANAFVFPEQNEGNNPQNSRNNQHSRQMMGEEEIHRALLDVNGQQNEQNQQLNADEEHRLLDQSNLNVLANLGGNFDANLGNNRQTEVAANMAQRQNNFVTSTPNISPGHQARQNFNFVNNRVNRRVVDRPRDALGRFIRIENNNEQEMPNFLQNPPRNPQIPPVNQQQGNNLGNFGIPNNPNLMQPLQFGMNGMYAPVAWPQQPMMAYPPPNFQMFCPPNFVPQMPVQNFVPFMNNLAPNAFQPQIPQNAIQPMRAQPTNVVQQQQNPPLTNQAIAQHNPQQEVIRQPTGLSGIEYAMILDRLPDIKGNEGSDSIRNFFKKFSQYTSEWPNKKRIESLEAKLSGRAERAYNAALATEPFAYENIKRNILQQLEETDCREMSAFDDLMN

SEQ ID NO: 144107 - protein, 92 aa, Heterodera glycines
MLKKLRNRGHEDHEIHEQIHEFYEVSPEEVKATARGILQRGCESIFKMRDEGASNVEIEEKITEALNQIRSPQKRQEAGRFAMSCRRIFAMI

SEQ ID NO: 144108 - protein, 89 aa, Heterodera glycines
MKRLNKSIMDLQELISQLTLANTEFAECRRKMSHYELQAYILVHIDKQMKRLNKSIMDLQELISQLTLANTEFAECRQIHRDMSNRILK

SEQ ID NO: 144109 - protein, 39 aa, Heterodera glycines
MFHLAAIVALAALALPLASSDKFRPCLEGYAQYGKYCYK

SEQ ID NO: 144110 - protein, 32 aa, Heterodera glycines
PSPLKALSPIMSPFLRRLKNNPPGALIRANTV

SEQ ID NO: 144111 - protein, 259 aa, Heterodera glycines
MAFDLKIYLHLFISFTFVGLITEASIKVVPISYLIKFNGIDHPQPQYLSYTNKQNVPKNENNNYKMDNSVVKLSPKLKDDTWDKKQKSEQNPPVNPNYIQQNQYQSTKLFDQNQSQTTSPTLIQPIQYQPAVQKQLQLTQYRPNYPHQFLPNQYQPDSISPNQFHPPADLLQQKQDQQLATHNQYQADKSQPAASPNQFQQAQYQSSVPSQIFKEMRTNTPICGSKQENHSAIGWLSSRRRKKQQIHAMECAQLLLHKL

SEQ ID NO: 144112 - protein, 88 aa, Heterodera glycines; identical to SEQ ID NO: 133373

SEQ ID NO: 144113 - protein, 51 aa, Heterodera glycines
MYGNMGPLSLPITFLSLLLLAVFCHSEDRTVGGEEPEEKLPYKQYFSEQKY

SEQ ID NO: 144114 - protein, 97 aa, Heterodera glycines
MEKEKAKGTKGKSQKEMPKRTNEKGKAKRKCQKGQMKKEKPKGNAKRKCQKEKPKGNAKRDKSKTGQMENKLSRRKLACSDRLIFSYSLAWCNARPQ

SEQ ID NO: 144115 - protein, 133 aa, Heterodera glycines
MSVQFSVIGVVQMVNKRSGVAFTQIDEEAFETFAIYCGLALHHAKLYEKIKRSEQASFRLLNLFSICPKYRVALEVLAYHSVCNRDELNKLKKVKLRDKIPELDLFEFNGNRLSELEKPLYAVYMFRTLFDGV

SEQ ID NO: 144116 - protein, 178 aa, Heterodera glycines
LNKSQINRKFMPISKLDGHNVLKSLSSSDYKRALSTIRHCILATDLALFFPNKGQLSAIVKEGIFSWEDDKHRCLVQAILMTACDLIATCLVQAILMTACDLIATAKPWQVQTETVKVIFEEFYEQGDAERLNGREPIPMMDRNRAHEQGDAERLNGREPIPMMDRNRAHELPQMQVK

SEQ ID NO: 144117 - protein, 189 aa, Heterodera glycines
MAKLQIEQKHQHKFYMDMTVKMWHDILQQNEATHDNTGILMRQRRQSKPTNSPQCAQGPKGMPGIPGEPGDEGPEGEIGLPGDIGQMGPKGAPGEDGVGYAKGAQGPKGELGAPGAAGEEGPPGERGEDASPGPPGELGPQGRPGEKGKNGETGATGIAGPPGKWKCRWDGSPGDHLKAKTRNTVHIRN

SEQ ID NO: 144118 - protein, 439 aa, Heterodera glycines
DRRGVPKGKITKEQLRFGYEALGRIERHVQKGTFGRDFVEAMNDYYTRIPHSFGMRTPPPIKSPEELKRENELLEMLTGAKPAFKASKLPFQTLAHPLEENELLEMLTGAKPAFKASKLPFQTLAHPLECHYARLRWDLIPLEKDDANYKIVEEYLQGTHGPTHDKYRMKVRNIKIVEEYLQGTHGPTHDKYRMKVRNIFELSVKGTQNETQNEQKGRIGNRKLLWHGSRLANWYSSRLANWYSILAKGLRIAPPEAPSTGFMFGKGLTGFMFGKGLYFADISSKSANYSLSDPKKPGFLLLSYFADISSKSANYSLSDPKKPGFLLLSAVALGEAVELKEADSKMHQKLPKGKNSVRGVGHYVPHPNGSLSDGDVEVPCGKPINTEALSDGDVEVPCGKPINTEADDETSLIYNEFVVYPRYLLLVGSVLSLFNSRLR

SEQ ID NO: 144119 - protein, 192 aa, Heterodera glycines
EMEQKTTKTKRRKKEKDTENGGTNREKPKDSEKENLDGRISKRNKMQSEEATVDAECAELRGNAKVFVDGKGRCYDVMLSQTNIQQNNNKFYLIQLLCNQTAANKFWVWFRWGRVGFKVIFGGNNKGNSFHCQGQTNLVPFGTDFDGALELFHRKFTDKTQNDFLTDIKKFKKVAGKYDLIKIDHSREVTTE

SEQ ID NO: 144120 - protein, 183 aa, Heterodera glycines
MATSPHQQWHYDRGALLSSTMPGTAECGRHVPQQQRDDTTYYWPHPQGETDRDRFGGRGAGASDNAAASAALRRQQRQQQRHRSRLARFLHTDAAEWERHLRERQLQQELNMRRTVVQQQKQQQQQQQRSRMRNDGDAGPNEMFPQQYQQQPQQQLQPVDGSAGHEQFAYNSQQQPWPTAAPA

SEQ ID NO: 144121 - protein, 37 aa, Heterodera glycines
MAPSSSSAAAAMTPLGVILVSKDESAERVLFMYPFER

SEQ ID NO: 144122 - protein, 24 aa, Heterodera glycines
TPSEKTRCVPINRECQRKTLSFFF

SEQ ID NO: 144123 - protein, 44 aa, Heterodera glycines; identical to SEQ ID NO: 126591

SEQ ID NO: 144124 - protein, 27 aa, Heterodera glycines
MHRIIAAVKKLVVGSVLAVRCTLCVLL

SEQ ID NO: 144125 - protein, 75 aa, Heterodera glycines
SLYNIYFRKTLILVFQRELNHHPSLSDFITAFTRDIDKQLDIGRAEHLQKSRKRPQRYIIKEQNVVRMDSCRGRL

SEQ ID NO: 144126 - protein, 57 aa, Heterodera glycines
MFVFEFRSLCPLTETLIGDFVVPQIDAQIVRRDERLLVRVDAYRIDVRLQIIKFGLM

SEQ ID NO: 144127 - protein, 36 aa, Heterodera glycines
KKFQLNSKNFRLFIKNFGSRNSDPKNVGNRKSFRAI

SEQ ID NO: 144128 - protein, 49 aa, Heterodera glycines
MAIKLEFAGGLDAIFNGKRETEAENDNISLDAQLNGGDKVTFISTLHGG

SEQ ID NO: 144129 - protein, 156 aa, Heterodera glycines
MVELRSDFVLQFADYQRTVASSGSVYQRSEWESCCAKDNRACSAAPAAVYHRHDGQRFYGLAKLEKYFQKVTTNSSPMTTHQQSMNNGNGTSSVASGIDASTPTPSPASNVYYIIIFIIIIYLLMGAQRPIVFCNVSFCVVKEWKCPNFLLHCFCC

SEQ ID NO: 144130 - protein, 63 aa, Heterodera glycines
LTSKNNSLPKSFLQPFIANLISCRLKAIHCLPVPAQQSTNRVFDSLQKIIPYTKVFYNHLLPI

SEQ ID NO: 144131 - protein, 28 aa, Heterodera glycines
NRTKIEDEARDRTELIGELGLMKKKGEL

SEQ ID NO: 144132 - protein, 112 aa, Heterodera glycines
NEFLKVAWGCIGCATFTDINAQIGQTAKATVDCKAIFGEKDLDFSNEYFNYSMLAMAMATTTKQTKRKPKKLITEKPSTTVAPKTNGAWSAEMTMKAQETTIEGEPITGDQG

SEQ ID NO: 144133 - protein, 186 aa, Heterodera glycines
DIAAACVFLAGKSEECPRKLEHVVEAWFKLKNMKAEVQPPFTETVRRDGAELIVFLESVLLQTIGFDLQVELPHPLVLHHMNCYAGDNSAISRCAYWFASEMIRLKSIRIFVSPPPSTSFMVHQLPPPPPPPNLSAVKTNQAQQQQKTPDKVINNDQQRQRNKRPALARTGQSEEPSPAKRIPTDA

SEQ ID NO: 144134 - protein, 520 aa, Heterodera glycines
MDSLPLERLEDRSVFIVNNPPFSPHSLRLAWDPRMNGGIAKMKVPVEMIWKPDIILYNNAASEYLNEMSLSIAGIFKSSCELGKKDNLFKICAQFPLRFEDVRFYPFDFQNCLMKFASWSYDGTKIDIFSESTGDTSNYMVSTEWTLREVRATKNSVIYSCCPEPYYGTSFLCHSPPFPQRYPFIDVYLLLERKPLFFVIFSCLPCVLISVLVLLGFYMPSDSGEKVTLGITSLLSTTVFLMLVSEHLPPTADALPLIGIYYGVTIFIVSLQTAFTVFTVCPFECRFVWWLFLSFPTPLSHQLNIHHIGTNGPPVPRILQKLLFGRVSRLLLLNLEKQYHSINEHVNYFIGKQKKAEQREKKGEKNGEKWENGEGKTILNGSEFKVQFVADGSNSLLKAKKKRVSFTDDFNFYCHQQKNGALPSASATTVSLPTHRYGRRILSLISPVIPSHKHHPNCAKMRVATVSNIGKKRHRHKDQSSSNMGTMSPHSSAHRSRSPSALSTTGEEDVKQKGEENTVF

SEQ ID NO: 144135 - protein, 38 aa, Heterodera glycines; identical to SEQ ID NO: 130624

SEQ ID NO: 144136 - protein, 95 aa, Heterodera glycines
MSVDQHNNHLNDMGPPPDPVLDHYSQFKDFAKTKRDRLEEARQFQYFKRDADELEIWILEKLQTAAEESFRDPTNLQAKIQKHDAFVAEVQVGNW

SEQ ID NO: 144137 - protein, 21 aa, Heterodera glycines
MAISFFSWGFDRELGTNICLL

SEQ ID NO: 144138 - protein, 19 aa, Heterodera glycines
TFAFSSLALLNTHTIFEML

SEQ ID NO: 144139 - protein, 19 aa, Heterodera glycines
TFAFSSLALPNTHTIFEML

SEQ ID NO: 144140 - protein, 25 aa, Heterodera glycines
IEKEKSYGRKIRSTTFRLTTFFPTP

SEQ ID NO: 144141 - protein, 107 aa, Heterodera glycines
MQNFFLYRYAKFGGNYMDRKKVIWREIVRQKETKNHRKKDNVFLWHSLFIGTHLVFSDSVFKYWSWDWESPQEIISIPVRGLEENTARGNKFQEPEHREQITAATAL

SEQ ID NO: 144142 - protein, 53 aa, Heterodera glycines
KVMNLGALVEEVIKQSQLLFVPDVQFIKKNIESLIDKYYLQRTDQNDEYEYIS

SEQ ID NO: 144143 - protein, 231 aa, Heterodera glycines
MENNQIITKRNNKKLEHEGCLYVFHMFNADRDVKFWRCEHQRDEFKCRGRIHTTLNDVVLKTVGEHTCNHSAANVVTQKIVSGIKRRAVETMEPPAAIRAHTLQQIATPVMAKIPTKNATKKLVKRDSDLFGHKQFYVILARRGKWVFPVLHNALRAKHPQSSINFCLFHLVRNMKSRLTDEQTRRFTTDAAFAQAVKMITSLAFVLLEDITPALAALEDHLPDELEGVLD

SEQ ID NO: 144144 - protein, 309 aa, Heterodera glycines
PAFQSLGTQPNSIFKHSGLNPPAFQSLGLNPPAFQSLGLNPTAFQSLGLNPPAFQSLGLNPPAFQSLGLNPTAFQSLGLKPPAFQSLGLNPPAFQSLGLNPPAFQSLGLNPTAFQSLGLNPPAFQSLGLNPPAFQSLGLKPPAFQSLGLNPPAFQSLGLNPPAFQSLGLNPTAFQSLGLNPPAFQSLGLNPPAFQSLGLNPPAFQSLGLNPPAFQSLGLNPTAFQSLGLNPPAFQSLGLNPTAFQSLGLNPPAFQSLGLNPTAFQSLGLNPPAFQSLGLNPTAFQSLGLNHQHSITGTHPTAFHHWDST

SEQ ID NO: 144145 - protein, 69 aa, Heterodera glycines
MHAFCARAIYHRACQSKAKQQRCCFERIKGIESVHRLLEIYICNLSTILIKSVNRLLENIFAIYQHFEK

SEQ ID NO: 144146 - protein, 89 aa, Heterodera glycines
MSQFSDDSQPPVLDGPYSPVGDGGGELMDDAPPLEDVMKRLPISVEPSDNNERKVQKEPSITHELDAELFNGNGFACLSAAQAEAGRFK

SEQ ID NO: 144147 - protein, 28 aa, Heterodera glycines
LFNRRVASVRGRRLKCRGTDSDEFDGRT

SEQ ID NO: 144148 - protein, 220 aa, Heterodera glycines
DSLSIIAKHLKDIHFYNFYNFFKGGGTMDVSILWLNNAVFVTQAMAGNNRLGGQDFNERIQRMLLQKIREKTKIREKTRNELTNREDVQQLRLAVEEAKLRLTVMPETLISLDFRSIGHFEYFLTRQEFEHQNVDLFASLTRQEFEHQNVDLFASIVQPIQAALDDCDIGAQEVDEIVLVGGSTRIPRIRQIVGTFFGFLLSNNKYFQFQCYTFYRKSPN

SEQ ID NO: 144149 - protein, 97 aa, Heterodera glycines
MTAALGHLLVACLGQHGNELVQRVLARHGQRRFDGTGELTELVLLANLSHVQRDASQRLDQFAQCEFDGVTENECQMEKRGKDPRSVLNNQIEMERR

SEQ ID NO: 144150 - protein, 503 aa, Heterodera glycines
MPSCVRFRHSSGSEAEEESEAVKMADHRRVSAGAPKSVAGKGSRGDNRNASPAVNSQSPTVTSSLRLTEFVPSNGGERAEKQWKEVPKKVEYEVDAVEEAIRSLEQFDPSEFVSQQYKTDQTTKFNDGTAKQQQQQRNHKGGSPFIRTRVFLARAEPVQLHPTGSANSLPSPLPERRLSLPFSADHPFGLSSADQLLFSSCHPSLLPSALSSSGSATPTLGSLTSSQQLLPSLVEPAFSQSMDSINRTPRANSPSSSAFSASQQPPQAHNGVRRAVTFNDNTVQHFYTPCDGPPPDYSDSDEAMDDGGGSMADSEDGDEMANTDKRANTAAVEAELHRRIRIGRIGRVVGTHLSGRERGSPTEPTPSARPSRQNDVGHAEKLPKDCYKLVQWVYSLSVWRDLPRGGATSVFLPPSSGTVPFHAKMHPPPPPPAPFPQQRPSSPSSSLLNYYSSESIEDEQNNNNEDSFRNWATVPMNGSLTDRHGGQAKVEDRVISESRNDQR

SEQ ID NO: 144151 - protein, 257 aa, Heterodera glycines
FPLLWSIPSVLNRLCRVVVPGGFPLNVEPSVFGAAMPATNSPQSSNLAEKATDSLLNGLQNTPAVTYEDLTVATDGFSPNKIVGRGGYGVVYRGVWKHTPVKIALLDTFFSGGHQTNSGEQQQRERIRQSLQELKTLAKFRHDNVLSLYGYSLDGPEPCLVYQFMSNGTLEDRLLCRNGTEPLGWAKKLSICGGVCRGLHFLHTINQMPIIHGDVKSANILLDKHFEPKLGDFGLSRYGQRDKRRDKRPMIASHVKG

SEQ ID NO: 144152 - protein, 44 aa, Heterodera glycines
IHSFGGPCRVPRGKQCWFVSSRHRTFWLVSNHCLTCQIGRVRMT

SEQ ID NO: 144153 - protein, 100 aa, Heterodera glycines
MPLNETESPKIMPLNATESPQNQQLTYIELFHQNQHTLTMWLIMGGKCALSSVGILFNAILVATTVKSKKLYNTCNVLFALDSLFLALFQLNSLITLLIA

SEQ ID NO: 144154 - protein, 24 aa, Heterodera glycines
MAQHPIYLWADDVPSEQGKIVSID

SEQ ID NO: 144155 - protein, 195 aa, Heterodera glycines
MNHLNKQIDTNWPISKGKTEEQIDTNWPISKGKTEEQIDTNWPISKGKKAAKSESDSENEENEVKLMIVNQFIKKRDAFKMESDYKKENRNKKECEIAKELGTYRAKIFQWNREFEEKGQQKKKKKYSEKDEEKMKKIIEKFDEKRKKYEKKMKSEKINYQKIDDEIAKGLGVTRGKIYKWKSEIGIKKQKNKPK

SEQ ID NO: 144156 - protein, 24 aa, Heterodera glycines
MQQNYKAIRQLQTFVRCRFFFNII

SEQ ID NO: 144157 - protein, 342 aa, Heterodera glycines
MGKSFIKSEQSIGNEKEMTKFSLDVQIKEEIKNEVKLERLVKEIKNEQSEQMDEIGGKKRKKDEEETETEQDSSSSSSDETAEADEFDNDEQKRKLMILKEYDIRRKEWKLKNGIKKENRYKIEAEIANGLGTNRDKIYQWKRENVPTYRKRSDEAKRKTIEEFEKMKIESKNKWEKEKAKVGGQIAKEMERKIQKWKREMQNGEMKLEMAKEFGKRKRALEQKKYNEFEQEIAKKLGTNRCSIYQWKRELKLGNVLQMSSEWGDPKGGSVQGKGQGMCRGLGQGFSEGNGKGMNQGNGKGCAEGVDKGVAKGMAQGVAKGCANGLANGMAKGVAKGRLSNE

SEQ ID NO: 144158 - protein, 47 aa, Heterodera glycines; identical to SEQ ID NO: 139606

SEQ ID NO: 144159 - protein, 124 aa, Heterodera glycines
MVNISINIGSIFFFAFATSLCGGKPNDDKNAAYSSSVPSETENPKNEESKKNLVIITDMGADDQFTLEMISATELAGKVLAIGTTEKGRKAALSQSLGFEKVPVYVRSSGEEFEKMLFMNPKAE

SEQ ID NO: 144160 - protein, 44 aa, Heterodera glycines
MKIIVLLNLYDFHYSKYLELVVQILESQPKFQQRLREMNEHDIK

SEQ ID NO: 144161 - protein, 43 aa, Heterodera glycines
MDMDKILSDMRQHISNLQDKLHVANSAVSKGQIVNEKITLMKE

SEQ ID NO: 144162 - protein, 272 aa, Heterodera glycines
KNIAILPRRDSDLEAFSHNPSDGSFAPLVYRPSTTKCLNLRFLSYAGLLLATGLGKTNLSHDGLNPAHVPYWWVNNPTLGEFCFAMIGRADIEGSKSDVAMDAWPPQASYPCGNFSDTSCWKLYTLKDRATLSRSVFVLKIRIKAFAFLLYERFPSSLSSPYHLRYALTDVPPQSNSPPDTVIGACRRARVCRLMTQMGTRALPFYRLGIESMKAHDISLGPCRSHLCYTSHDSSQSRTIAELNRFFFPARFAKAVPLAEVSLDSIVPWKSR

SEQ ID NO: 144163 - protein, 561 aa, Heterodera glycines
MLIEFMNQKQLKQHVKEPTRENTILDLVMTSESELINELIVLEHFSTSDHKMAGFKIKEKFRRNNPSVYRRDFKNINFSKLSQAILENRIDLSINSVYTADQKYKEFLNKVLKLYENSVVNGSLTQSAQNKTKLSDIELNAGIIWNILRKLPRRNSTSPDNIPYILLKNCAEPITKILADIFRLALDSGQIPEIWRTSLVVPIFKKGEKTDPLNYRPVSLTSTVCRVFERILSSKILEFLNGIRFFDKEQFGFLKNRSTTTQILKTMDDIYNSLQKDQQIDIIYIDFVKAFDSVPIDLLLQKIKKIGIEGKIYKFLTNFLKNRSFKVKIGEVLSESFSIFSGVPQGSVLGPLLFLIFINDLPSFIANEASSVGIKMYADDVKLYYAHENDDKTNHLDKAIEALEKWSKINGLEISTGKCFVLYLGKNNMKKDYLINSKKISESDNVRDLGIIIDSKLHFSGHINKIVRNAYLRVFQILRVLKTREIKTLTTAYKTFVRPQLEYATEVWNPNLKKDIDKIERVQKFFTRKAFRKCGFLYKKYKERLKITDLHKLEERRKIND

SEQ ID NO: 144164 - protein, 43 aa, Heterodera glycines
PEKMPTLVVFKIFEILTFSLIIYYFAKLIHKYFLERALKRTKC

SEQ ID NO: 144165 - protein, 34 aa, Heterodera glycines
MKEEEKGILYENDSFLFIHLLDLYGYLDGYFAQF

SEQ ID NO: 144166 - protein, 70 aa, Heterodera glycines
PKLYEGKDEPHSQRPPERIEGESKEAYGVQADVWSLGITLVEIANGRHPYGKWKTPFEQLKQVIQEPAPT

SEQ ID NO: 144167 - protein, 219 aa, Heterodera glycines
TLAAKRGVPSVVRRMPRCIMACWPAWDAKFEERNSCRFCRLQKCLEVGMDPAAVRPDRDFSGQQQLLTRRLSLSAGGGTTTAITPTTSSSSNTTNNNNNTRNATGAGGTNRREKRRVRQTTALGNNGGAGGNKAAPGEDGRNGQRMPVEMRTMLMTLQNIEAKIRYEPYRMARNEELCVIVYRRLIAAIDWVELLAERMGGLSTEDRIALVNQSIIEYF

SEQ ID NO: 144168 - protein, 42 aa, Heterodera glycines
RKFNLTFANFNLLFQNFLAFYFLNPEKIFYDDFSDPEIKNSF

SEQ ID NO: 144169 - protein, 128 aa, Heterodera glycines
MQKPIIVNIIALANLGTGIKLNSLTITECEFKYNPRKFNAAVIKCISPIKATALLWESGKMICLGTKSLIDCENAIKKFIEIIKGSGCPGASYTGLNFKRGKSMTALIFWTGKVVITGTKNNSEIEEM

SEQ ID NO: 144170 - protein, 169 aa, Heterodera glycines
MPSSMDRMKHLLSTGEHSDVHFLVGDGDAKEASLIKNKNLILFFNCNFINYPRFLKVLPAHQLILKSASDVFEAMFRFDAKKERPENVSGNCPDVVEIPDIEAEAFKVMLSFIYTDDLSDLNGDNAMAVLYAAKKYNIPDLVDRSLQIPISELRNVFFAYAQALLFDLE

SEQ ID NO: 144171 - protein, 173 aa, Heterodera glycines
LFDTLLSLGQSGGFEHIFFILIAANSKNIQLARAFQPRRVLGVDIDSHLVGAARKNIRHFCDKDTKMSGKFPASFGANFGPISASTSDGPHFPDNVLFLCENYVLPSDAALETVHEEFDIIFALACSKWVVHEEFDIIFALACSKWVHLNWGDAGIKRLFLRAFRQLRTGKKL

SEQ ID NO: 144172 - protein, 300 aa, Heterodera glycines
MAQAIPEEIRSVSSPPEMQPEREKSKLSVGETQPKREKTILKEIQLKKEKTKLALEEIQLKKEKTKLALGKTQPNWEKTKLATEETQPKKEKAILEEIQPKKEKTKLALRRNTIEEEKDKIGTRRNTAEERKEKIATGRNTFGEAKGNSGRNTAEEGKDKIVSGRNTAEEGKDNSEKNTAVEGKDKIGTGRNTTEEGKDKIGIGKNTTEEGKNNSGRNTIGEKSGINSTGDSGRNTAEEGKDKIGNGRNTAEEGKGNSGKNTLGGKTGRNTIEDGTGESGRNTVGVESARNAAGEGTDNI

SEQ ID NO: 144173 - protein, 111 aa, Heterodera glycines
MTYQMYRSTTLGTALQSAIFSALLTLPKTFVFPFKGSLDELIADGMISQQLAGTVMTTFDKCINKALSERAEKLRAYRFCDNVWTFMMEHVEFKDTQRPIDGVIDRVKFVA

SEQ ID NO: 144174 - protein, 68 aa, Heterodera glycines
RDPSLHPAKRMPSTVECQNSQPICSGSEPWPSSSSPLSSSLREGSTKQSSIESDAGCVASSPRPFCAN

SEQ ID NO: 144175 - protein, 228 aa, Heterodera glycines
KSNGKLSAYSSFTIPYTTTQKYGTTHRGEQNFCKLLNCDLTNACHYLNHGLTKVPWTLRTKGYGFPLNRHTDLRPAFPLNRHTDLRPASTNGQFVSSTNGQFVSTVLGPGDFAILESPRFNLSDGINVTVLGPGDFAILESPRFNLSDGINVLLFQYFRPTHSSTIRLCLGTRPTHSSTIRLCLGTRYAKPLRTVSAFLQCPTVSAFLQCPPILRSITSKHSPAKWNS

SEQ ID NO: 144176 - protein, 80 aa, Heterodera glycines
FNCCLAGPVLKAHPALSQGPSGPAIIHLDLKSDNMLFVKKKEGGGIEIEMLKVIDFGGSEFIKENMESTLDERQVANVCK

SEQ ID NO: 144177 - protein, 210 aa, Heterodera glycines
VVFHWRLAAPTSPLMIFYKSNLGSSFPAKFAKPVPLAVVSLDSRYGQGISLSIRAVGSPTRHLATLRESCYSPVYPRLFKFPWLNIQSTGQKSDTVNVHKDHPSPLFLDSRIPRVRFFSKLVVQRQPKCIPRAYTQLKRSTSSSHHSTHHPRRNSKQPRAKAACFTQQPGPDLSQFFSRSYESNLPTSLTYIILSTRGCSPWRPAADIGT

SEQ ID NO: 144178 - protein, 15 aa, Heterodera glycines
MRCGGGDISQVTKYI

SEQ ID NO: 144179 - protein, 56 aa, Heterodera glycines
RNIPLVSNQPSVRLLPYYRSQQTLRLGREITACRANSERQEKNMHIYFMLRLGMTL

SEQ ID NO: 144180 - protein, 68 aa, Heterodera glycines
MNYLRIMVYLKIQTPVGRGPAFLVSAEKPYLLYFNLLITVLGRSTKKLSVGDPQKISVWAIHKKLSDR

SEQ ID NO: 144181 - protein, 442 aa, Heterodera glycines
KENEGTPAKDKKRNRNNDSVKKLEAVECARKNSTCSSNEVKVDRKQINDWMTHEDKLRKQIMTPNGGKRMRMTPNGGKRMRLEGAGRPVQHPEIDIALAEIAEKRKNKQLVSRNIIRRRAASLFIDIDIKVKTATYTTSQKPPSNYAEAVAKFINFVEQRRKAKNNFPGGIFAMDETAVWFDCPDNRCIDMKGAKDVISFKLFRAISSNVTVVATGHEKMRVTVCLTARSHKLKPYVLVNRKRPVPQIINQFAGKLVINFDGSVWMNDDTTEDYLHKSGQSFVGERLLIWDAFGSHKSEKTTKVVKGLGVETVFVPGGCIKFIQVKASFSMKFTFFPRLPMSFMVLDWIHRSWQEISKEVIIKSFEVCGLTTPLCGLTTPLDGTEDEKIACFKPEGAIGPIGIKFLTTNLVMNPLQLLLVDVGVDGSQPEQVHSGPTLMNTT

SEQ ID NO: 144182 - protein, 340 aa, Heterodera glycines
QKMDKIRLRQLLLFEFRKNSTPTQALRNICESEGNDALSLSTVKRWFTKFREGNEQLEDEPRSGRPPALDSDDLEQHVQQHPCSSSRQLAAEFGVHQTTVLNYLHQLGFINKKGAEVPHALTQQQKHQRVVTCTELLARLSAGMQLSQLITCDEKWVYLNNNGIKQWLKPNELGEPTPRRLQHAPKVLLCIWWCSSGLVRYELVPAGQTINADIYQQQLQRVHDQIRRPPFSAKFRGGVLLHDNARPHVAFSTQQKIEKLRWAVLPHPPYSPDISPCDYYLFRSMEHFLRGKEFADQNEVENALDDFFGSKNDQFYKKGIEMLPERWGRIIDQNGEYIID

SEQ ID NO: 144183 - protein, 24 aa, Heterodera glycines
MVSDDTHRMGDIPAAWLPGVSGKT

SEQ ID NO: 144184 - protein, 140 aa, Heterodera glycines
MVALFFCCWAPTVLFNFLRDNQWLPIFVLSQEYLFGIITHCISMSSTIWNPVLYALLNEQGILLFQFRAAFSEQFNQLRHRFCSPCNGGMTTARTRLPTIDSSAQQHRNSIRKVALPSPSFVQAVPAVAQRSKLHAERSE

SEQ ID NO: 144185 - protein, 69 aa, Heterodera glycines
MNVPFARYLATKNIAKKNTVSKCQFLEGATREGGKSSLLGIQPMVIKICRSLQNKHRLYRRNVRCLRSV

SEQ ID NO: 144186 - protein, 124 aa, Heterodera glycines
MQYNAFKPRREAGQLQNFVPHFTVESPSTLLDNYVSMSTVAFGQLWNGKMGISDGLLIMQYNAFKPRREAGQFQNFVPHFTVESPSTLLDNYVSMSTVAFGQLWNEKMGISDGVRSFLKIPLFV

SEQ ID NO: 144187 - protein, 74 aa, Heterodera glycines; identical to SEQ ID NO: 132339

SEQ ID NO: 144188 - protein, 41 aa, Heterodera glycines
PSLPFVHYFVSKLNHFFWLFEINCEKYTKIIFGFNYAVQCF

SEQ ID NO: 144189 - protein, 111 aa, Heterodera glycines
MDVNEIVPFKSKYLTHYLAYHPVIKETSKTTLDLEDKKGKFEKLCKELTENAYKIESSENAKNKQDSLIKWNIENDDLTISIKIPTITNGTIKRNVIHFANNFIQWDGFHP

SEQ ID NO: 144190 - protein, 239 aa, Heterodera glycines
QSGESDHFAGKVQFKGQNKRKPGQSDESDHFAGKIQFKGQNKRKPGQSDESDHFAGKIQFKGHNKRKPGQSDESDHFAGKIQFKGQNKRKPGQSDERQSDESDHFAGKIQFNGHNKRRPGQSDESDHFAGKIQFKGHNKRRPGQSDESDHFAGKIQFKGHNKRNPGQSDESDHFAGKIQFNGHNKRRPGQSDESDHFAGKIQFNGHNKRRPGQSDDSDHFAVKMQFKGHNKRNPGQSDD

SEQ ID NO: 144191 - protein, 83 aa, Heterodera glycines
MTTALLWDFYMEKREALASIQQFDYDTNKLGIRLGLVSTSDVAMDEDSDGDDGRPTERGTLTTEYANIYGHGIPFSNFFQASE

SEQ ID NO: 144192 - protein, 37 aa, Heterodera glycines
MSKKRIEWTTIPTKNHLPKLKNAYDLAKLGYLSAMIK

SEQ ID NO: 144193 - protein, 54 aa, Heterodera glycines
MLQFHCIWPSKVKGAVKEGVGYFVKGAKQRITDYARETFMYDMYNKTVRDSKRC

SEQ ID NO: 144194 - protein, 49 aa, Heterodera glycines
MERMVRVKKKDEDIGEQERQMILKGLAVLSEEKLRCHRCSRVDLSVAEA

SEQ ID NO: 144195 - protein, 26 aa, Heterodera glycines
KSIKNLKMRIHARFSGNKLNWALLSC

SEQ ID NO: 144196 - protein, 19 aa, Heterodera glycines
NRTLTDDLMEKNPRRREFN

SEQ ID NO: 144197 - protein, 93 aa, Heterodera glycines
MYIGLSGTGTGTGTGRQLPVFLVPVPAQIPPISTMKLRLEDKIFLWMFLDRSAVNIYQIKYENSNAKPPLQFRRTAKIGIASLSNGQRRTTCR

SEQ ID NO: 144198 - protein, 67 aa, Heterodera glycines
CLPLGYSPDSVQFQQQLKNGVGITSAAAAATVPINAENKGFKLLKGMGWAEGQGLGKHSQGIQAPEG

SEQ ID NO: 144199 - protein, 146 aa, Heterodera glycines
NGLSKNRNYAQKASQTILALPIPSTIAFIHPIMSAKIIRVPKIACDLSLEKNGLSKNRNYAQKASQTILALPIPSTIAFIHPIMSAKIIRVPKIACDLSLEKNGLSKNRNYAQKASQTILALPIPSTIAFIHPIMSAKIIRVPKIA

SEQ ID NO: 144200 - protein, 91 aa, Heterodera glycines
MTNFAILESHFQQLMVQWELRCALNCLFPQMLITVKEVTLVLKKRMQQKTPPREWYDQCAELEDKMMGQIEKKREKREKAKSWKLREMDDE

SEQ ID NO: 144201 - protein, 48 aa, Heterodera glycines
MALIRTTARAWHCPTKRSNAVDGHVRCVHERLQVLRAVADQPIGVIIA

SEQ ID NO: 144202 - protein, 102 aa, Heterodera glycines
MNSAEGFVSNSRLFAVVATRRGTTVGQRVVRPRVRAQPGRALYLCRLEFGNIEWDPWALFLAPLLALVQAVHILLLKQAQLAFFAALGMPNGNNVPILWANN

SEQ ID NO: 144203 - protein, 169 aa, Heterodera glycines
MNPVFLTVRLTKPRAVHANDEFTHHEGTVHINLFVFDPIAEGTEAKVEAQKLTLTVAHAFGTKKTEKEFDLPENFLPYQYEVLLHEQRVEITAKVADRVDTPPITKADEEIRVLEKVIADAQKAIADAQKVIADSQKAIADASARIEYWKEHRSTMVSFFYIFHFYPSD

SEQ ID NO: 144204 - protein, 100 aa, Heterodera glycines
MECQKLRIGRRNCAVAKRASNCLFYNAFPQMLITVEKVTLMLKKRVQLSWTEFVKTPPREELAWYDQCAELEDKMMGQIEKKREKREKAKSWKLREMDDQ

SEQ ID NO: 144205 - protein, 47 aa, Heterodera glycines
MGMSVVFMSGFKYSELWLISRLEPHQFCALEHSKYFIASIVCFYIHT

SEQ ID NO: 144206 - protein, 223 aa, Heterodera glycines
MSSPIDAILGPKENADPEAGAKASKTKGSNKPKVSPANMAEIQTELGNAKEEILSAVSKYIGEAMSTVNRGMEGFTAAINQMANALDASRAREEMEQMSLDDPELEAVSVEAGETGKEPESPTEGENEQGEPHPGPKGISLPQEQSARERGRGTGHGRAFIRGRGGHGRGTATGAAAHARHYFNMRQGHRAHHQHHNHRHPAPGHCRCHDCQPPNHHFGRRFR

SEQ ID NO: 144207 - protein, 2221 aa, Heterodera glycines
MDDHKGSDFNPNHFTTSQNRNWSPLLVQLRLFEATVCETVRKLIEKVEDIEKGNGKVGNCIVLEGKLELFGEMMRQMDKGIGEQLVGIETDLNLAQSKLTDLELTVDQISRRLDKGDESQTEMGRPNVTEIKVAAMRSKVVEIDGIVKENRERITFLEQKVLDENEEYFWNGHDNVDGENNFSINQNVEDEQNQGLTGECEVMISDPFLLSGSHLSQYDGNPSISFSRWAQKFKDLLSLYTAQLTEEQKISRLRFCLSGPARAELDSMDLPPVTLDAALGHLQSRFENENTKSIARQNLAICRQYPGEKVFDFATRLSEAVRTALAGETEGNIRKRLLEEFLDRLIPELQYEVKSERPTDYSRAYELAQHYELLQASRKSTSNVAMNELIEKVEALAMQNVRHAPNFSDQRDHRVCFYCKKAGHVIRDCAARRREANNGPNWRRDENSRRTERNGNYSRPFGQGYERNRETWRSGNSQQNSRSNQNYRRYRDQSGTRRECDQENRFPRTPTPRVNPRGGRIAGARVASPYFLAIIAILALFSPTSILANVPKRQPMICLPDAPSSLWKLPEEPICPTWQPTESPIPMELTIYRPNTLQYKTPATACKCVKSKIHRRVGVFGAPLEEVETENLDIPTSTCHRMRDLDHSPAGELSKNGTLRSTNHSLEVGWRVWPVGMFWHMTEVLNCYTYDTVVFTRYGVEGVSTPLNNCPGCQYKSGACRCQQNSMIWSPDPTQQCPFVWVAKWAGEYATKVWISGSNDFALTFENITVRQNCKNKEFAISDQGFSVPLEEYQELVRRRDLASRETVRLRRQLDEITQEATQARDKSPVGLIYSSQLSAQLTALSARLTHTTQRLFSEAIRQICTSLQSIADQTATLAIANPTLLARFFLSNQLITARLVTEKSLEIRPCFGVNVNEMHYNWKSGFCFNRLPVTFMIYGAQRHGFLDTVTLIIYPEAREIDCQSGRWLYIQGEKKLTQYDQVNGDIKEVPWETIHKIARYGNIDLPEIGFTVFKNKVMANLSELYSPEHFTETLEAAEIHHEIVRLTKPSGAWSENSAKPEFLAGNIVSNGLFSFLKGGIFSANQIWVFCVCCYVTIGAVMRFLLPPFLAELANQLNVGESLVRVTRTLQTTKRRKRELKRVAKENDQLQLARQSAIPLTQRWTNCNGAFTNGETQIAEVAVIELGRCDEDSRIGGIINGKKVIFLLDSGAHVTLIGLESAKRLGITKFYPPEVAGVTGIGPGVIPALGQAVVTLCIAGCQFETTAIIIPNEVSKRGLYQVILGRKTMRQLPLLLDLETGQLIKKDKITRECFISEKVEEPRKSNLMSRHKTDLQTKAELSKFFGLLQRNEDIFSKHDYDLGECTISAPPILTTTETPVYSRPYRVPEKYQTELDAHLEKMLKTGVLAESNTPWVSPVVIVQKSDGNLRPCVDFRALNRVTVTDPYPIPKMETVLHKVAGKAFYSTLDLAAGFWQIPLDKHTAHKCGIITEKGVYTMRKLPFGLKNSPAIFQRIMNEVLSDIGHTCAYIDDIIVYTDTFEEHMFILEKIFDRIRNFKLKLKPQKCEFCKSEIVYLGHKLNCKGYEPSISNKEVIQHFPEPGNVKEIKRFLGLVGFFRKFIPNYAAKAAPLTLLLRGKENDANFKWETEQQKAFLALKTELTKSPSLRPPNYKKEFHLFTDASQIAWGGALMQKDNEGTLYAVAYCSKILSQTEARYPPTHGELAAIVHAIGVFHPIFYGCDITIYTDHKPLTFLLSKGKTNPKLNRWLLIFQDINPKINYVEGKNNVVADALSRVVSTEGIKWDLVMEKHFREEIPYILTTEPFVIDKNIIENETVRDENLAKVIREIKDSWQSTTKEIEPYHKIRSELYLEGNIIRKTPTQIVVPGNLKIPILKGLHTAHFGMVKTKSKARKLFWWPGMSKDIEEFINGCEICQRNADLPPITDKGRKWPEAKLCMERIHADLAGPIWNTNFLIVVDSFSKYPWVYQMNSTNSHAIIMALGNIFSEFGAPITFVSDNGPQFVSEEIEKFLWENGTKHLKSPPYTPSSNGEAEKFVQTFKKGVKKILAERGEGRIKEALQIFLREYRSYPCISTMESPAQRMFKREIRTPLDRIWVRTEEKRKQMAQKEVPKIRDKQFELGDYVWANINKTWRPGMVVGKKGDVIYVVSVEGDESPDRPVHLHYLKPRRPALARGQQGITLNQPPEDVVSTPPEEEEGIQ

SEQ ID NO: 144208 - protein, 555 aa, Heterodera glycines
GLKKPEIWTKKAKNGQIWTKIWIKNAKICFECVPLTLVVLGHQSPPMFGDFEAQRHWMEVTVNLSPSEWYVNSTTNDLNYWGLDYPSEWYVNSTTNDLNYWGLDYPPLTAYHSWLPPLTAYHSWLLGQIALFVDPNWVRLGHSALFVDPNWVRLGHSRGLEEPRLKLFMRLSVILTMVALFAPALIHWYWVNNERRKPSLVGALVGAPLLFPGLLFVDCAHFQYNHCSLGLFLWALSFLEKGRLRTGAFFFVLALNHKQMELYHALPIAVFLFARSFVHTNRIRSFFNLFQLALAVLLTFLILWSPFLWPEPSLALQLLRRIFPFHRGLFEDKVANFWCCASVLVKFDKVANFWCCASVLVKFKQMFSINVLVNAFLVFAFLVFFACVPSLFCLFYRPNSSNLRVALTVNALAFFLFSFQVHEKSVLLAAMVIQKMSKRQNVCDFFHFIFLFSLFPLCLKDGVAEVLPLFLAYSFLLWLQFFPLQLSVLLVLGLQLSVLLVLGPSFAICVFQLLLSPPVRFPHLFPLLNALFNFGIFTVFWLHLNFVIVRQNLAV

SEQ ID NO: 144209 - protein, 120 aa, Heterodera glycines
DMHHQELQLKAMLEQLRIKAKSVMVPWDHVVQHLDKPTKSSGGSSAADITDYSEKFVRAVNETIQRNSSSAAMCFLNLPLPPPTNSNKSEQYLSKLRLLTDALPPTLLVHGLASVISTAL

SEQ ID NO: 144210 - protein, 549 aa, Heterodera glycines
KTFLLRIKLKVKKQMPQNSSHFAMVDISSVPSLIMLGIFVATFFSSMSNLIGASRVLTRFAQDKLFGALLRPATIEVGSKRNPIISVIISWICVVMVLMIGAMNRIAKITSILFMVLMIGAMNRIAKITSILFLLSYMGVNIATLALELTSAPNFRPNFKYFSWHSCALGAISTVVMMLIIDASMSAVAVVILMLGAISTVVMMLIIDASMSAVAVVILMLLIMILHYQAPIGSWGSISQALIYHQAPIGSWGSISQALIYHQVRKYLLLLDVRKEHVKFWRPQVLLLVNRPATCCSLMDFVNDLKKSGLYVVGHVQKGQMDAEGTTMDPLQQVYPYVYPYWLSLMDYLKLKAFVELTLAENVRNGIQQLIRLSGLGAMKPNTLIRLSGLGAMKPNTVVLAFHELDSSETALTEAHLLKDLKFSKIGRAEVVEYFNTNDVKKKSIFKVLQRLDGVEYVQIQRLDGVEYVQILNDVVNLNKNLCVARHFGPFEREFVLRPFSERRFIDVWPSHLFKQSSERRFIDVWPSHLFKQSDDGKTNEDGMPTAPG

SEQ ID NO: 144211 - protein, 228 aa, Heterodera glycines
MAVTSLWIAVNMLQLEMCRVLIAHGANVDLGSDASLTLLLACDKGSTEIGEAIVRTNFSSKFFAISVTLLVENGVNVNLGDSEGATPTMNTSRSGNTEILRFLLSHGANIDQMDNSGTRFALLNAAANGHLEVCRLLVDEWAADVNQQAIDGITALIGACIRGRLDITVFLIEHGAGIDHADMDGYNALMWAAKEKNIEITRHLLAIGANADHMGIDADKMLFKILKV

SEQ ID NO: 144212 - protein, 18 aa, Heterodera glycines
YREDTPEGFGLPHKSGRI

SEQ ID NO: 144213 - protein, 303 aa, Heterodera glycines
MPPGELVALENINLEILVRDCLGEDGPAGYEQTIKWLARYGLIANALTCPECQQHVASLVKYAQSPEGFIVKKIQVHLSLHQVMKLCYYWSVHPTSTMDAVMRETGVTRKDTIVDFYNFFRDLCQDWAIRKQEEGKLGGMGTVIEIDETKMYRAKYNRGRMLNRPYEWVFGMIERGTNRVRFFPVADRTAATLLPIIADNIEAGSTIVSDGWAAYGGINNMQQQYNHQWVNHQMYFVDPNNPQIHTQGIEATWRALKQSLKHLHGTTPDLLPTYLYQYAFRRYHSNIKIFQNILEEMRREYPV

SEQ ID NO: 144214 - protein, 25 aa, Heterodera glycines
MLAICPLSLLLFLLLIFRCFHAFLW

SEQ ID NO: 144215 - protein, 17 aa, Heterodera glycines
MEKACKIWRDYIDFSAL

SEQ ID NO: 144216 - protein, 222 aa, Heterodera glycines
MSFDTDQKLPVKSPADQRREANAIRTLAFVGVTRTQVLSQVYGKGGAFRAVRQADGYGGGGGGASGGGAASSQPPAAGGYGAGGGAAGGAAPQGGAAGGTAPQGEAAGGAAPHGGAAEGAAPQGGAAGGAAPQGGAAGGAAPQGGAAGGAAPQGGAGGSAAPQGAAAGGTAPQGGVAGGAAPQGGAAGGAAGGAAPQGGAAGGAAPQGGEEEVLHHREELEE

SEQ ID NO: 144217 - protein, 169 aa, Heterodera glycines
LPPAPPCGAAPPSPPWGAAPPAAPPCGAAPPAAPPAAPPGAAPPATPPCGAVPPAAAPGAALPPAPPCGAAPPAAPPWGAAPPAAPPCGAAPPAAPPCGAAPSAAPPCGAAPPAASPCGAVPPAAPPCGAAPPAAPPPAPPPAAGGCEEAAPPPLAPPPPPPPSAWRTG

SEQ ID NO: 144218 - protein, 133 aa, Heterodera glycines
MVFPAPLVCLVPPEMPVGPGSQRKGVVPAHRDRSGRQDPRVSPEHPETRESKGSLASSKNRGPSGPPGQPGGNGNPGPPGPNGEPGPQGPPGDEGPAGTPGQPGNAGEQGKLGEGGKSGVCDHCSTPRTAPGY

SEQ ID NO: 144219 - protein, 87 aa, Heterodera glycines
IIFIQKIFFWVFGAVPLNRCAQIYGETESFRNSFTIACTLILRWIFAPHNCLSTPNGHLKKSIYFCFRGSPPEPMRPDLWRDRILRE

SEQ ID NO: 144220 - protein, 84 aa, Heterodera glycines
MPFPFDGGRSTTAERRAIRIGYKSRAKRVDGFCADTSARIGLNPLIIKRRFECASGECQCQHPPPKGSGDMRVRVQSERVCPTL

SEQ ID NO: 144221 - protein, 20 aa, Heterodera glycines
MRKRDSYFLVRNFFVCVSNI

SEQ ID NO: 144222 - protein, 51 aa, Heterodera glycines
MPKELDEDQIEPIDGQRKEMAANGKAPRAIEFDRAKGLDKEEQKRRKQLNK

SEQ ID NO: 144223 - protein, 51 aa, Heterodera glycines
MALKRIKFYRTKKSSHGISHFLKFGVPQTDTWKNRFFLVFRGSPPEPMGPD

SEQ ID NO: 144224 - protein, 64 aa, Heterodera glycines
  unsure (1)..(64): unsure at all Xaa locations
SSVRLGYSNKXWXAKIQPPELSTGYREAIPEGFGLPINLGPSVRGDCPEKPKKIDFSKCPFGVL

SEQ ID NO: 144225 - protein, 23 aa, Heterodera glycines
KPKLFGLFKKELKIFKNFIHLPF

SEQ ID NO: 144226 - protein, 48 aa, Heterodera glycines; identical to SEQ ID NO: 136255

SEQ ID NO: 144227 - protein, 87 aa, Heterodera glycines
MGIGLAMAKPSCAIANCDRHAPCQRLYSVTGSSGKNRLLPKNVSPTHYYLFLILLLMLIVLLYEYWLLFCAHEKRLFLIFGVSFNFN

SEQ ID NO: 144228 - protein, 259 aa, Heterodera glycines
KEKKEEQRNDESKKEKGENEERKSKEEEKKERKSNQEEKKESDEEKEEEVNEEKKDESKKENEGVNDERKRNADEKKENREEKQEEKEEKRAKEEENKEESKEEKMGERKEDEKKNESKKEKEGENEEMKSKEEEKKESKEEKKEENNKKEKEGENEERKKSKEKEDNETREEKLEEKEERRAEEEEKKKEKNDEKVEEKNNNDSEEQKVKDKRKDKEEEKKKEKGGREKKTENGAEEESRRKEMGTNAGYLSANDEWD

SEQ ID NO: 144229 - protein, 79 aa, Heterodera glycines
MCFKFLTRNRVVQRRCFERLHVFPDLEVPDSVRENINNRASPSPGSAEEINGVRCRRTRRLSSAFPPGRRLSQKLGRAY

SEQ ID NO: 144230 - protein, 256 aa, Heterodera glycines
MSTNCDELGGQLPMPTNNGQSCDNFSKAIDKKKRETVEKFHKIKEKVKQMGKKHSTKEWNKIERKIAQKLGANKMKIYKWKSELGMMTNKNYSVEEKRIMLKQFDQIYAKLKMKLNGKLEGKKKKCQKIIAKHLGTNISSIYTWKKEIKDGKMVKNQKTDDEKREIVEKYLKVKIKFMQNGKHSQKEWKAFNAKIKQMFERKRFTIVEKMEIMKQYYLMKKETPKFSDVKIAELLNIELMSLIKYKSEFKEKVEMF

SEQ ID NO: 144231 - protein, 62 aa, Heterodera glycines
MVMIMMVNGIGKTMPNEKQLASVFALIIPHGGLFFNHLVDWWIIGDWRINGDWGIIRANTVL

SEQ ID NO: 144232 - protein, 42 aa, Heterodera glycines
MNYESHHSQESPLCLFSYSTVFALIIPQSPLILQSPIIHQST

SEQ ID NO: 144233 - protein, 200 aa, Heterodera glycines
MWPKARHRPPPLAGKNCEEAINDYWQRYREGKEYRERKKEEKMKKTGQRKRKVSGMATAAGEKEQKEEKKEDEKKGAEEELQQQLPINAGTEGTNEGKAEVGEETDGAETTEEAKKEMGSAPGEMVEDGTEGREDVCKKGNLESADVGLEVEKLKKMLRDSGQMATDNAPLPLPRWVKGCGAFKRKYKKIYDNMIKINNS

SEQ ID NO: 144234 - protein, 29 aa, Heterodera glycines
MVKCSETHQILFTSYFRHSDAFSIKKGDE

SEQ ID NO: 144235 - protein, 55 aa, Heterodera glycines
MIGRAVRNRPFIFEGIFNFISLSQKNVYVFYLRNFIPHKSILQYETGGRVLQSPI

SEQ ID NO: 144236 - protein, 27 aa, Heterodera glycines
MVMDDQQQQQPKQMVPTPPPQQNSGQT

SEQ ID NO: 144237 - protein, 483 aa, Heterodera glycines
MIPTTILHRFNTLLLNRSTTKPYKDTFVLWTIALLIWDIEEQKMLALLQLNSVAKVHGLNSFWDQIKSLISETLRNPKSEQNACVLIKLSELFLIPKKALPNIARMASKWRKECEEKTERETALRRFVGSANGVLYKNWVSIVFQVCEKTKVGATVALMQKPGAKTRLKKVMGHRTPAEELLTENNLAHIYENDVFFDNDRLLEHYTFGMEKDVPLIERKSHKLGADVVVFMRWFERKSERHIGTEKLQLIIKYMDNQIYDPIFDQDEQQLDKLGTFLKTLFIDAKTFAEKIEGKNSGEEKQKVQKNIFKKWKLMVENADKNEQGNGDDKNGEMKEWICELHANEFLNLMENEEKHRSLKNILIRHGPKKVRENLLDFVNENVATNILNKLNTFEMVKGNKPKLILKLRQNGGELNKQKEEKEKEETENDQKKEEQEKVADDEQREGKREENWENANKFHWRIIGDEDDEFTLEKEGIEQKQK

SEQ ID NO: 144238 - protein, 37 aa, Heterodera glycines
MVKQFFLLNFYEKTNSKGTSPAHSSFFLPLLVWRPDQ

SEQ ID NO: 144239 - protein, 19 aa, Heterodera glycines
TFSFSSLALPNTHTIFEML

SEQ ID NO: 144240 - protein, 19 aa, Heterodera glycines
TFAFSSLALPNTHTIFEML

SEQ ID NO: 144241 - protein, 19 aa, Heterodera glycines
TFSFSSLALPNTHTIFEML

SEQ ID NO: 144242 - protein, 19 aa, Heterodera glycines
TFAFSSLALPNTHTIFEML

SEQ ID NO: 144243 - protein, 19 aa, Heterodera glycines
TFAFSSLALPNTHTIFEML

SEQ ID NO: 144244 - protein, 19 aa, Heterodera glycines
TFAFSSLALPNTHTIFEML

SEQ ID NO: 144245 - protein, 24 aa, Heterodera glycines
RTLSNAVRQRSSKIYSMPQILCAG

SEQ ID NO: 144246 - protein, 73 aa, Heterodera glycines
MDLTLEQDREWYISFIRDNVPEHLTEADLSHEVHLGAFNLAMQMCHALSTTDLNPAPKDISFTRPFTPASTQR

SEQ ID NO: 144247 - protein, 75 aa, Heterodera glycines
LVSSQKSCQLKTAKKAEFSKFFISIFFYSSKFSVIFSRLIEPVKSFRMISRLFDSVNNFKSYIDSKLAQTELARS

SEQ ID NO: 144248 - protein, 69 aa, Heterodera glycines
VHARQSIFRSLCIILCLQFCGWTFGQLTYAFVYMNAPLMHPLTRWQINSMLLVFLSLTAALDVPVLYIN

SEQ ID NO: 144249 - protein, 36 aa, Heterodera glycines
MKKITFLNSLILLDCSRVSRTQFVLSMIFIYLIKEN

SEQ ID NO: 144250 - protein, 184 aa, Heterodera glycines
IDDKAFLAFVKGQSNFEHFCIQEKDNYLFDKGLPKSVTFDQRKEHLAQRYGAHLGTVQLMREHWHCAKLGKHLESIRRRNAKNTENIWTFYDEQPQGLMPLLIRNIENFGTLIDFVKQLNRIAKFYFDAKFSRYNQYKIENAFKFKNSVISMQNFEQIFKAANYGGGNAKNDGESQLIKAQLTK

SEQ ID NO: 144251 - protein, 235 aa, Heterodera glycines
VFNDLEKWLCELTGYDAFSLQPNSGANGEYAGLLGANGEYAGLLAIRKYFEAKGETQRKICLIPISAHGTNPATAHMSNFRVVPVESDKHGNINYKDLSAKAQKHGAELACAKHGAELACAMITYPSTHGVFESNILDVCHKVHEFSTHGVFESNILDVCHKVHEFGGQIYLDGANFNAQVGLCRPGDYGGQIYLDGANFNAQVGLCRPGDYGSDVSHFNLHKTEKSSKHKLYPN

SEQ ID NO: 144252 - protein, 49 aa, Heterodera glycines; identical to SEQ ID NO: 130195

SEQ ID NO: 144253 - protein, 36 aa, Heterodera glycines
IFYRFLNVCIFFGLPKLHRTWFFLFSFKSPQIFFTA

SEQ ID NO: 144254 - protein, 41 aa, Heterodera glycines
MQLVCVLKKFGELIDLCKCCLRHKCCGELITGDAEPKAGGE

SEQ ID NO: 144255 - protein, 22 aa, Heterodera glycines
MLAQLRGKGIAEGHETSSDTIL

SEQ ID NO: 144256 - protein, 194 aa, Heterodera glycines
RVSFSSLYNSFVDRVRPASHAGSWYSENAKGLDRQLTNWLNAAGPGSWYSENAKGLDRQLTNWLNAAGPTVGAARAIISPHAGYTYCGETAAFAFKQIVPDKIFAFKQIVPDKIKRKRIFVLGPSHVVYLSGCALTTCSKYATPLGDLFVDTAVNEQLRSANGADSFEWMSVRNEEAEHSLEMQMPFIAKVMES

SEQ ID NO: 144257 - protein, 100 aa, Heterodera glycines
STGYREAIPEGFGLPINLGASVRGDCPENKNKSIFSSVRLGYSNNYGEQKSNAELKYRLYRSYSGRIRSPYKSGRIGSGGLPRNPKKNFLDKNYLNELTR

SEQ ID NO: 144258 - protein, 98 aa, Heterodera glycines
MELMEIVDDEYKERWLGELCTEIEDDSIHVKRFGRIDEDEEIDDNNDGRDECKLLPMVTQIKNILFIPDYPFDLLTGRQPSTGKRPCEAISLLNGTIC

SEQ ID NO: 144259 - protein, 75 aa, Heterodera glycines
PGLKRPAQAKNFFYFREKIEIFPKKIPVDRARKTMFWKWSPFLWEKSLKNPKIQKPENRFLGLTRKILKIFEILK

SEQ ID NO: 144260 - protein, 60 aa, Heterodera glycines
MLAPIPIIEPATVTVPPNEDVVGSDDENQQREEELLVNQFVINSEAIKRILDDPRYADKK

SEQ ID NO: 144261 - protein, 272 aa, Heterodera glycines
MVRPASLDEINLRWIYKQNSEEILQFLAYHGLIKNQMECKKCFNKMSLTKKKQKMDSFCGKDFRNKNAIKELGIAKSTCVNWFNFCRTQCVQQQKIGGVNVVVELDETCWVKQKHKKPKKGCSKWFFGAIKENVVQIDKEMDSSRLSDHQRRIGRHTRKWALHFPQSDHMLFRHQKSTGGGLSKLVMLPDGTEFNVNTNKCEGLWAQLKQKTKRIYGTSTNLTNSKCLNKFFDLMLGLKEKLLLMLSVILFVIIIILFAIIMLLMLNIYHYV

SEQ ID NO: 144262 - protein, 29 aa, Heterodera glycines
IVFQIDDPTAHYHVPITLSNFGYSTYKGQ

SEQ ID NO: 144263 - protein, 156 aa, Heterodera glycines
MYLSLKDWCSVFAKHPIFLNNNSFDIFYYEISIGNKRCYLIFGFAVKQQNKFDGTILSHKGTYAYYNGGDICINGEGKGRNGKYSYGVGDTVGIGVNSATRQIFFTKNGLRLDSSEFFVAQSFADDSFHPFVTLFNSDDQIEANFGPNFKFDLKSL

SEQ ID NO: 144264 - protein, 68 aa, Heterodera glycines
MQNDQKILLEKISELEKEQKQRKSIPDKKCLRPLKANLNNADLKRDADPKAVLIWLNFNSLLEIGRVN

SEQ ID NO: 144265 - protein, 43 aa, Heterodera glycines
MLCFVFHCILFFTKMIIFHCLKTRVEKSKYNSCEPKRKKYECG

SEQ ID NO: 144266 - protein, 28 aa, Heterodera glycines
LICFYFGLFLPFIAHTKSVLNGRMFLQQ

SEQ ID NO: 144267 - protein, 63 aa, Heterodera glycines
IPEGFGLPINLGASVRGDYPENKKIDFFKCPFGVLKQLWGAKIQRRIKVQAIGKLFRKDSVSP

SEQ ID NO: 144268 - protein, 78 aa, Heterodera glycines
MCFYSESIITKTHFRVIPGKAESVKKQLQEKFCEDIFGEKWQYKEDQLRNDEMISEMIRNFYNLNANINQTGRGYYSV

SEQ ID NO: 144269 - protein, 15 aa, Heterodera glycines
FKAIHAAPVLGTAKH

SEQ ID NO: 144270 - protein, 60 aa, Heterodera glycines
MVKIKIFLSFSILVKIFPIAFGHENCENAPNKTLKKICEQLYRYDKKARKMEKFSANVRR

SEQ ID NO: 144271 - protein, 41 aa, Heterodera glycines
MPVPMRSVKWPIHLGIRLRCQSLRDAPTKLLKKKGIIKNIN

SEQ ID NO: 144272 - protein, 54 aa, Heterodera glycines
MVHKFFLLVILAILIIGTIAEDDECADAPSPTARKYCEQLQRKAKLQRVIIISF

SEQ ID NO: 144273 - protein, 87 aa, Heterodera glycines
MGTGLLYDYPPIVYTQYPWINDLCTLVLSSWMLLFTSSIFRHQFVKDFCPKCIWPMPTNKLSEKFSKTRTNFGKQFSKFGIIKRMME

SEQ ID NO: 144274 - protein, 26 aa, Heterodera glycines
MTRRCLFELKWIGGILINYDLILTQI

SEQ ID NO: 144275 - protein, 257 aa, Heterodera glycines
NFLQMKIRRNLPLFTDDNGILRCKGRIEEGGFDYNTVNPIYLSHQIPILDLLISDAHLETEHGRKSQTLNYLRKKFWIPKCRRMITMVIKKNTYTKCGICAKLEAKAFSYPNPPPLPIHRVKGSSAFETIGLDYFGPITIKVKETQKVWGAIFVCTVTRAIHLEIVTDCTAQKFLLALERFMRRRRVPKMIISDNASQFVLSHKILAKITEAHWRKNKEREVELTAEREVELTANKGITWQFASPLAWRSGFFERLI

SEQ ID NO: 144276 - protein, 65 aa, Heterodera glycines
MEVDVSSSSDSATNVLFSLRADRSLLDPTFDRSFQIALRQPMGLPTNSGPHFGLPSFLRPFRFLR

SEQ ID NO: 144277 - protein, 55 aa, Heterodera glycines
IGGAEEIAVNDPSAAGDAQQQFNSEQLEECDRPPDAEDDVSAFWVDGDSHELVAM

SEQ ID NO: 144278 - protein, 64 aa, Heterodera glycines
HELKNRRTGKRAEHIAKQLVLSMSDLDKEFDPNDSSNEFIAFHATAETLFLLTRCAIYAVEMPK

SEQ ID NO: 144279 - protein, 97 aa, Heterodera glycines
MLNLTHFRLVHILLSCATIFLIILFHFLLSKNILTIDHRLSAKQTTVSDGVLLLSWMYTILKNGVRSLKALAVTSVNLRMFGMKNWHNFTAKMAYTH

SEQ ID NO: 144280 - protein, 353 aa, Heterodera glycines
MQAGTTQIPGFGQLYILDPVEAMEQRRNNPRFTGEKITNEDEFVQGHQLNEQTLEILEQMIQVYHPAAQAYKQAREQLTELLQQQTPEELRFFRMTLLNERRAPAGLKDPKLHPHQIITPSTGEGMFAIHADPTGAPPPKGIWVENKQGQLNEIAPFSPWTDSLTYPLIKPMGDDGYTTGIKYAKPPSRKRKGAQNASGLFDPEAESDNESCETQSIASSDAGSVANSDAESVASVSSQHRRIDKSKQFISLRDYCKYYLAIRDENLELQYHHILSCGGGLGQRWILDQAAKIDWQIATFLRRPDMDLRISTPKNLLQYLVNQYNRQQARQNPNAQQKTVDDIGSVVRLSENT

SEQ ID NO: 144281 - protein, 21 aa, Heterodera glycines
VRWGTQPFMGAKSNAELKYRL

SEQ ID NO: 144282 - protein, 226 aa, Heterodera glycines
NILATAALKRLDFQTAEHAFVKLEDYGGIQFLKRLQNIHSDGLKKAEVDLAIDMLKKMNDWCRITQLIQTSSGPGDDILAQQTWHHQLAETFSNYGLCEQSVNCFLKCDRISEAFEMCIKLNKWDKATELSDKFHLANVEQLLSQYAFQMVGNKTKNLAMAQLYRKAAKFIQAAKIVYEVAKAEHEKQVPPQRLKKLYVMGALLVEEYHEQNREKLAKRREEGASD

SEQ ID NO: 144283 - protein, 273 aa, Heterodera glycines
FPRPFQFQIQTPGSATFTTIAWMLNRGYVAVGGSDGALRVMLLNLDQDKSAGPSSASLSKSAGPSSASLSPWLSSQQLEGHSASVRLLCWNEIHRLLCWNEIHQKLASSDDAGLIIVWMSHGQSWFEEMINNRQRSTVASLKWSNDGSRIAIAYEDGQIILGSVDGNRLQIILGSVDGNRLWNKDIGASLVKLAWNSDDTLLLIWNSDDTLLLIGFTDGEVHAYDQNGNFCMKIQMLCGFTDGEVHAYDQNGNFCMKIQMLCVENVEMETALS

SEQ ID NO: 144284 - protein, 120 aa, Heterodera glycines
MNNIYLFKCISVGQILIANLVFLYFLTAIFYGVSIVRYQWIVALLTVFGIVLSDLSDPIFSQPLAIVSLTSQNNAMAIIFLHCAVLFLLIVTSIGDYWVQKKNIKLISRYTLKSVYFIGI

SEQ ID NO: 144285 - protein, 46 aa, Heterodera glycines
INKKYCQRQCLPKKKTKNISKKAKKIENLNKFKSEKGKKLTTPLIP

SEQ ID NO: 144286 - protein, 40 aa, Heterodera glycines
NKSKRKKINLFFLIIKNIVRGSAWRKKTKNFSKKAKKLKI

SEQ ID NO: 144287 - protein, 103 aa, Heterodera glycines; identical to SEQ ID NO: 131705

SEQ ID NO: 144288 - protein, 28 aa, Heterodera glycines
NSCGNIKARKYYARLCSLCTALGPTLYV

SEQ ID NO: 144289 - protein, 86 aa, Heterodera glycines
MRGFGQFAQCVGTEAESRRRTDGGAADECLSERSLSGQSPEDDFDDDPVQHHQSDLFASSSLFDDFVAIVFRKDQTKRDGQIVQSE

SEQ ID NO: 144290 - protein, 136 aa, Heterodera glycines
MQENNSSSDEEGQLLSSSSGNEEAANQELIQFIEFKSKRGASLLARNGFEYQFERNSALVDNVEYWKCVKIRSAIEQLKQSARANNPIQTRDAVDAARAALSEEVRVNAPSGSAMAKVFRSARRSAQEQHGDRGKD

SEQ ID NO: 144291 - protein, 381 aa, Heterodera glycines
MVIPQHLEANVITNENVNIGGQMRKIIVFSTQSAIEMLDRYRNEIAIDGTFKNAPRGFGQLFTIHVVVDACAVPCVFACLPTKHMQGYIRVFESIRNRIQNWSPGRVMCDFEASELSAIRQIFPQAIITGSGNKKSFNRPILQGCSFHLGNAIHKHIQTLPGLYNRYRNNRDDRHLFRSLQSLAFVPINEVYTFLCILMDNLIGPPEIEILELLKYFVLTYIGPSYVVAHPQIIAGEQEANYGQGCDGWLRAWIAHENLAHRNALFPIALWNLTHRLEIGLSRSNNSLEAWHNIWGALLEPNPLFSKFVKRMLKEFERWQHIVADFHNAPANGIRGKGLKRKSIYLQQDNNLRQLFAEFQQRAGQDPLQYLRAISYHLAQI

SEQ ID NO: 144292 - protein, 17 aa, Heterodera glycines
MNLIPNLILRKFNRCEI

SEQ ID NO: 144293 - protein, 48 aa, Heterodera glycines
MLIDQIVYNRVQPQAFGEQNVGERGNKKVLKTHLKILPSYFKCNLRLS

SEQ ID NO: 144294 - protein, 169 aa, Heterodera glycines
MTAEVAEKWRQSYRHYRQRKHFEKKLRNSIAAAVEYGTTTTTTSAAHTVPAFIGSSAHYSNSPTSEDNGTVGVGLPPRRCKSVTIIETPSHLSPSERRARRHFRVLLRPVSLDCPAEENGGGEKGHQQPKPGYHRRHHYQKRRPKSEERQENREEKIDEDGIQMGKIGE

SEQ ID NO: 144295 - protein, 101 aa, Heterodera glycines
MNANKLNASQPKCAASAHRLGGKRPTDGGNIFGRLATMIYIIPCIALLAAFILIAQCCGCGSEGATEKDDQQAAPSGNARLQRAKDMMLLPQLRIRRGRIL

SEQ ID NO: 144296 - protein, 444 aa, Heterodera glycines
TLTTNRMTVVQSFLCERYFVVQSFLCERYFGEEKSQPKPGEFPKANGVILSEALSEAITVNCAYNSMIVATKKAGERIQQLGNKTECALLGWVRQIGGDYEKIRREYTEEDLLKVYTFNSLLKVYTFNSSRKMMMTVVELKNGAGRRVGFRVFVKGASEILLNKCAFFLDANGSPTEFTEHRRKRIIDEVIQRMAEDGLRTLTIAYKDYVLAGERTVGPTEVPLDSEAAVNWDDEVPLDSEAAVNWDDEQSISDGVVGLAICGIQDPVRDEVPDAIEKCRRAGITVDEVPDAIEKCRRAGITVRMVTGDNVNTARAIAIRCGILRVTGDNVNTARAIAIRCGILRPDEDFLVLEGKEFNDRIRDGRGKIDQRKLDMIWPRLRVLARAQIWPRLRVLARAQPADKYTLVKGIIDSKLNTQRLIVAVTGDGTIVAVTGDGTNDGPA

SEQ ID NO: 144297 - protein, 72 aa, Heterodera glycines
SVHRLLEKYICNLSTILRKSVNRLLEKYICNLSTILRKSVNRLLENIFAIYAQFEKVSRNDKLHDSTKFSLL

SEQ ID NO: 144298 - protein, 68 aa, Heterodera glycines
LELVLRTAAGLKANPQPELLKHKVIASCFFEASTRTRLSFETSMHRLGASVVGFADGSNTSLGKKGET

SEQ ID NO: 144299 - protein, 90 aa, Heterodera glycines
GGRCAIDLLFFEGIFKFILYPRKMSISFFEKFYTSQKRSRMRRRAVHNRHFISQRIFIFRGYPRKMAISFFDKFYTHTKALEHDREGGAQ

SEQ ID NO: 144300 - protein, 92 aa, Heterodera glycines; identical to SEQ ID NO: 125147

SEQ ID NO: 144301 - protein, 52 aa, Heterodera glycines
MNKCASQRDFNQSTWKKVGKTEQHECEYFSAVRSLLFFSGPLFPRNVFWAQK

SEQ ID NO: 144302 - protein, 30 aa, Heterodera glycines
MFFTGLDRLICVLFPENFFRRPSESFRRGE

SEQ ID NO: 144303 - protein, 89 aa, Heterodera glycines
MPGSSHDKPGFFGIRYLIPSQIRCPFQLAVVAVMSAFPFMHPPMIAFVRHNVGLYLLGYITFFVVYIALICCEGVRRSFPANIILLGIL

SEQ ID NO: 144304 - protein, 108 aa, Heterodera glycines
MAYSMLGIVFIATMCLALFGLVVIIVGMFTNVRILFVVYAAIGAFLFMIWLAIDIQASKMGQQPKFTNGMVMGGRTYEISPEEHIFASITLFLDIIQIFWFLLAIFGD

SEQ ID NO: 144305 - protein, 20 aa, Heterodera glycines
MLAFTKNFNILKTRSDLVDH

SEQ ID NO: 144306 - protein, 69 aa, Heterodera glycines
MDTSSQELNACAECGFTTRDWALFTRHVERHESADGIINSWKSSKTVPTTPEAMDESVEAEDGGGTDFQ

SEQ ID NO: 144307 - protein, 119 aa, Heterodera glycines
CAKIIRVPKIACDLSLAKNGVSKNRNYAQKAPQTILALPIPSTIAFIHPIMSAKIIRVPKIACDLSLAKNGVSKNRNYAQKASQTILALPIPSTIAFIHPIMSAKIIRVPKIACDLSLA

SEQ ID NO: 144308 - protein, 238 aa, Heterodera glycines
MTVGGGTDQEKETKLAAGSGIDPEKAKKMTVGGGTDQEKEKKLAAGGGIDPEETKLAAGSGIDPEKAKKMTVGGGIDPEKAKKMTVGGGTDAGKGEMTVGGGTDQEKETKLAAGSGIDPEKAKKMTAGGGTDQEKETKLAAGSGIDPEKAKKMTVGGGTDQEKETKLAAGGGIDPEETKLAAGSGIDPEKAKKMTVGGGIDPEKAKKMTAGGGTEAGKGEMTVGGGTDQEKETKLAAG

SEQ ID NO: 144309 - protein, 263 aa, Heterodera glycines
GSMPPPAANFVSFSSVPPPTVISPFPASVPPPPSSSSPSPSMPPPPSSSSPSPGQCHFRPPSSPPGQCHLRPPTSSPSPDRCHLRPSSSSPSPGQCHFRPPTSSPSPDRPPPAVSSSPSPGQCHFRPPTSSPSPDQCHLRPSSPFPASVPPPTVSSSPSPGMPPPTVIFFAFSGSMPLPAANFVSSGSMPPPAANFFSFSSVPPPPSSSSPSPGQCHFRPPTSSPSPDRCHLRPSSSSPSPGRCHFRPSTSSPSPSVPPPDRH

SEQ ID NO: 144310 - protein, 81 aa, Heterodera glycines
MRKNIPTELLFEIIGAIPFDRKWAQIHVSQVFNHFLFNRMGSWLSQIKNLTFFTSLDVGPIVLAFFLNSLACRLTQTTLIT

SEQ ID NO: 144311 - protein, 17 aa, Heterodera glycines
HKHLFDLFYHIHNLIKI

SEQ ID NO: 144312 - protein, 105 aa, Heterodera glycines
MTVGGGTDQEKETKLAAGGGIDPEETKLAAGSGTDQEKAKKMTVGGGTEAGKGEMTVGGGTDQEKETKLAAGSGIDPDSVKCTIFLRNTVLFIGTEIKVDVCQRA

SEQ ID NO: 144313 - protein, 93 aa, Heterodera glycines
MRNSFDSSNAIGLIKCNKTLETPKKKDIFLNFGKIRFGGECASFVGRQVVVRLGVCQPPVESCHCQRIAVAQAHRAPSAQRRAVGRPRHPTGM

SEQ ID NO: 144314 - protein, 143 aa, Heterodera glycines
MEPGAKKRRKRKNAENTDGESMECEEEEDAVDEDAENNWMLGYEEAGEKPESVTTYAYAHAGSRYDHVLIYGEMLRMGVSPELIHQGNHLLEMKARKTGVYTTTVFRDSYKLIPIKLANFVNTFGLEIEGVENKKYFPHKFNK

SEQ ID NO: 144315 - protein, 112 aa, Heterodera glycines
FFLIFLPQNWYQQLPSLVWPYQTILRYLKRKQKKFLTKNGYLFFLIFLPQNWYQQLPSLVWPYQTILRYLKRKQKKILDQKMAISFFSFFYRKLGTNSCLLLSGPIKQSYDI

SEQ ID NO: 144316 - protein, 100 aa, Heterodera glycines
MAKNEILAQKNVEKEWKQNYVEICKKIGVIRDIINKWKKQFGIRCKRITEEQKIEKMKIYWQIKSENPKMSDNKIAKILKIHLKSIFNWKKQFGEQINEE

SEQ ID NO: 144317 - protein, 128 aa, Heterodera glycines
MGSSSSSNAGSFSSAFASSSGSARSSSQGSSKLFCSEAFCACPRSHLRAIEFKKVAVAVDSVHILCPYLGFFSPYTYCITLVMTYPHAAVEVLYICNDCDHELRVTYDLVFNLHLLRGQSIKGRVEVI

SEQ ID NO: 144318 - protein, 51 aa, Heterodera glycines
NHYFGDFVTKIVKNHYFGVLSLFFHYSTFFGKFLNKNAIRTKNTPLRIDLK

SEQ ID NO: 144319 - protein, 424 aa, Heterodera glycines
AKSCNCYLFHLFYPELVDLLPIQLSFSALYFLIWLAAILGNASVLYVVSLKQASLSVRSVFICSLAASDILMSFTSLPITAISIFTRDWVFPSPFCKLMGIFQGGTVFVSSFTLTAIAVDRYILIKHPTKQKIEFRTAICKIEFRTAICIVIGVWTLGYACALPVGLFSSTQEYPPFCGTFCEENWPDTEEQTGRSRIRKLYGLLVLIVQFGLPTVISSLCYWNIGRLIRRQIQKRKERQLVLRLIRRQIQKRKERQLVLLQESKDRMKSQKNRTNRMMVTMVAGLVLAWLPMNLINLWRDFNSENSNEWYSLIFAACHSVAMTSAVWNPLIYSFFNPQFKETIRAVWNPLIYSFFNPQFKETIRASLERRRKSQKKFKKNAVTALLMTQQQTNANTSESRRTSCRSLNVLITNNAPSAGNRQS

SEQ ID NO: 144320 - protein, 265 aa, Heterodera glycines
MVNGEETIIQSVGASVGFSDHADCFGTNEPSRLAEEDSPRGEIMKALLARPGRSGLKVTTQKLIDYGLGQKTAMPSVARLNEEQQQTLALIACDLPLVVLQQAPPGTGKTLTLATAIDLLLSEKNEETVIVATATSNLPVTKMVEETRAVGVSEEHLALFSGTARVRYGEQIQPLERSLLRPRLTQTFLKKVKDKKVKQFEDYKKHVFNTPLRVREAKVAESYLKYDKRKVIFLTTHMAGRIKGTISRATHLLLDEATQASFTTV

SEQ ID NO: 144321 - protein, 94 aa, Heterodera glycines
MLLWENGPEDTSFYHALRICSEEAMEQNKKAPEQKKVKDAEDLNMEIFAKMIICMGKRLKMPRRRDAILNGMHFDKLAKLVDEWDQFGKILGQK

SEQ ID NO: 144322 - protein, 104 aa, Heterodera glycines
MTNWHKKGRMDGGEKGEIEGEALGEAEATAADDHHHQSQFEEGRRKGTDGRRRNRRRENRKGYPTFGDLQLGDPTFGDPTFGGPNEHLSKRHLRKPRTFGNPTF

SEQ ID NO: 144323 - protein, 18 aa, Heterodera glycines
YREATPEGFGLPINLGAS

SEQ ID NO: 144324 - protein, 202 aa, Heterodera glycines
MRFLEQSDLARGVLRLAQFATRQTLAALSGNNFEAEKLLEFNILCPIIISAQQQQQKVDFDKMVEKCIYSPENYGVASVFAELLRKAIVKNDNKNDTIFQSAKIYSELYTAILKMQKEVNLEEWRKVPMPFAMEWNKMNKFLSESVEEIDTFVKRWEEMGKNEKETKIGENVKKEGFFSDNLLEKCIPFIVESSKKGNRTNN

SEQ ID NO: 144325 - protein, 121 aa, Heterodera glycines
MKESMNDWMIIIHHKPKEQQKQKPQNCCRKAPPAFGAWQIVPGAAHPVLSLIAPRIAFAFPDQFYADAHEYLGNWSQQFSETDEIIGDWVIFESEPTSEKVRRAYRHISVGHQLTKWMLCL

SEQ ID NO: 144326 - protein, 120 aa, Heterodera glycines
MNQGSNNNNGGGATAMPMPPNGSGAFAMSPSTFVPSHPSPLATSSSPPPEYAPPPPLPAHGAGAYRQQTTGGHSFPTGDLANKSGVGAVYPSAHPPPAGTPTQPFPNATPPPQQHYQQHL

SEQ ID NO: 144327 - protein, 33 aa, Heterodera glycines
MKILILCPPQSNCLLKIQMCAVENVHSTEAIIA

SEQ ID NO: 144328 - protein, 122 aa, Heterodera glycines
YVAPPAPVHIISGSAGCQENTDTFVAHPGPWSAFRSSNYGFSRMHIFNSTHLYFEQTIAANQETIEDHFWLVVLSEKRHGPYDWTDRKRLFRHGTYVPHNYCHHPSQCEKKVAHSHLRRAQN

SEQ ID NO: 144329 - protein, 21 aa, Heterodera glycines
MAISFFSWGFDRKLGTNICLL

SEQ ID NO: 144330 - protein, 19 aa, Heterodera glycines
TFAFSSLALPNTHTIFEML

SEQ ID NO: 144331 - protein, 19 aa, Heterodera glycines
TFAFSSLALLNTHTIFEML

SEQ ID NO: 144332 - protein, 19 aa, Heterodera glycines
TFAFSSLALPNTHTIFEML

SEQ ID NO: 144333 - protein, 19 aa, Heterodera glycines
TFSFSSLALPNTHTIFEML

SEQ ID NO: 144334 - protein, 92 aa, Heterodera glycines
MSAKVKTEASSPKQMNEKAEENELTERLELDFVEESVGDDWYGNAIMECDDTLATADEAEEEGHSKRRPTRHVRCLPRVPPKTKWRQLVPRN

SEQ ID NO: 144335 - protein, 153 aa, Heterodera glycines
MTILENRKMMNDSLGNVRQIAISWTVEFLLGRGIAEAKCIEQQPAPPKQILAVKQNCAVRTKGFEARGQVQQQLNVCWRCGRSSHFPSVCPHIKVACRKCSKVGHLEAQCNQHQSWIIRQGKMQSRKQGNLKLGGVLINSVNQPKRLIECPIK

SEQ ID NO: 144336 - protein, 39 aa, Heterodera glycines
MTILENRKMMNDSLGNVRFWIFFEIKFRKYYFTNNEYDV

SEQ ID NO: 144337 - protein, 48 aa, Heterodera glycines; identical to SEQ ID NO: 133602

SEQ ID NO: 144338 - protein, 48 aa, Heterodera glycines
MTFSASLVGYTGRNNKILSVKSAFGILMSKSVTVNDILCFSCWIHGKK

SEQ ID NO: 144339 - protein, 92 aa, Heterodera glycines
MGPVKHLMEAEQKMCRIRNHGLRSLNHFTTNAIRSNQFLHTDPPNAPRAANFEINHLGPLISKSPPYVAMDLIFVFEIVKPFHPSNSSSSMI

SEQ ID NO: 144340 - protein, 68 aa, Heterodera glycines
MPEFNPMTPGMPPMMPGFNPMVPGFNPMMPGFNPMMSGFNPMTPGMPSMVPGFNPMMPGFNPMMPVFI

SEQ ID NO: 144341 - protein, 15 aa, Heterodera glycines
LKAIHCLPVLGTAKH

SEQ ID NO: 144342 - protein, 84 aa, Heterodera glycines
  unsure (1)..(84): unsure at all Xaa locations
KGGEKVPRALKNGLXEEIFKGEGXHXQIIQKTVYXLRLSARTDCYKVPLXLEFVPPEEMRIRQKGSFVSRFSIANIGICRQGYN

SEQ ID NO: 144343 - protein, 178 aa, Heterodera glycines
MGEKRPKKLGVFVDCMEMTYEDAMRFYAKWASGLEELSADCVQQRLSIFLGRGVRAGAQMRSVVMRCPEILFMGVPQQMDMFWENILDFFTLNDLKKLMVNSPQICLMSFEEIEEIYEYIYFHMGIEPGELAESKYWHTLELDQVMSRHEFLLKTGKYTYPDPKKPQLKKVLWILEMF

SEQ ID NO: 144344 - protein, 18 aa, Heterodera glycines
MSPQTIYAMGENPSDTQW

SEQ ID NO: 144345 - protein, 24 aa, Heterodera glycines
GKAMPPPLPPAADEVADEEDTLLT

SEQ ID NO: 144346 - protein, 47 aa, Heterodera glycines
VNNVSSSSATSSAAGGSGGGIALPSANHPFVSPTSLVPQLEAANSFW

SEQ ID NO: 144347 - protein, 89 aa, Heterodera glycines
MGPGSRRIFWAHIPAFKNGSGPGPQQKQDLNTGLRVLKFRKNELSIPFNPMKMPSDFKSAVGRRQLSVQSNSISREASNLKSFDEICAE

SEQ ID NO: 144348 - protein, 135 aa, Heterodera glycines
SKNGNFKLNANAKKKFKRRRKMPFPQGGNAVDAAVATTFCIGVMDTQSSGLGGGHFMTIFNATTRKCHVVDAREVAPAAATENMYKDRWNKSKFGWEAVAVPGELHGLWTEYTHFGGQVSWESIVRPTIRLMEEG

SEQ ID NO: 144349 - protein, 267 aa, Heterodera glycines
FLWLGYPTSHALAHALEQYKAQVLNEPTMRRHFVNPATGVVYKLGEQIKTRTNFINTLRGLATAADPVAFFYRSNLTQQMVDEFKRNGGILTMDDFANYRAIVRADADIIYTQLEDGRTVCGPPPPSGAAVTQAILSILDPIVFNTSTISGNVGFLHRFIEASKFAYAARSSMGDMAFVKNATELARNITSKWWAQLARSKISWGTHPDDYYGGGYQALPNDHGTTHISVVDKHGNAVSITSTINLMCGLCVWPFNPMIQVGMLIDH

SEQ ID NO: 144350 - protein, 35 aa, Heterodera glycines
MNQIKWRASLAAEAVKVLGTSQNKAVNVLDLEVSL

SEQ ID NO: 144351 - protein, 151 aa, Heterodera glycines
MEFTDFSEIAFRHELLDELAKERYDAAIYELFDLCGAAIFERIGVRTKLATLTVPMYQTTAAHFGIPTFASFVPNWAHPPLNAPAMDFWERLINFLNTFYDWYKLNDRVTDLQIFFHILHSYFGTFTKIKTEKYTSKHGKFFGNFVNCKIY

SEQ ID NO: 144352 - protein, 118 aa, Heterodera glycines; identical to SEQ ID NO: 126986

SEQ ID NO: 144353 - protein, 55 aa, Heterodera glycines
MVIRRSTKAIRKGTTVIKRVIRRGSTVIRKGTTAIRRGTKVIRRGTKVIRREFLE

SEQ ID NO: 144354 - protein, 222 aa, Heterodera glycines
MQAGTTQIPGFGQLYILDPVEAMEQRRNNPRFTGEKITNEDEFVQGHQLNEQTLEILEQMIQVHHPAAQAYKQAREQLTELLQQQSPEELRFFRMTLLDSRRAPAGLKDPKLHAHQIITPSTGEGMFSIHADPTGAPPPKGIWVENKQGQLNEIAPFSPWTDSLTYPLIKPMGDDGYTTGIKYAKPPSRKRKGAQNASGLFDSEAESDNESCETQSIASFDA

SEQ ID NO: 144355 - protein, 301 aa, Heterodera glycines
MYDLRPDRPAMYFRPSPTDGGAQLEVNGLIYDNSHVVPYNPYILLRYRVHHNVLFAYGNKANIKYALKYPFKGPGHCYVECKQESGNKIGIDEPAQYAKMNFRGATEAYAIVHSLPFAKLSHQVVKLSIHMPNQQPIVYRAFQLVSKAQQIQQGELPETQCSAYWKQWQNEWKHDPKLKDMLFEKVPEHFIWAKDKWNKRKYNLTKRPPIGRIVPVPPSDPERFALYSLMRHFPGDPDHLKMVNGLLCTSFTEAAIMHGLLEDDKIWDKTLAEAALSRWPDQMRWLFVSILVYGQPSNAIE

SEQ ID NO: 144356 - protein, 65 aa, Heterodera glycines; identical to SEQ ID NO: 137623

SEQ ID NO: 144357 - protein, 277 aa, Heterodera glycines
YKGKARELAKKKFNENQRQGLRDLVKAGLVNGSAEDIANFFLTCDGIKKSAIGDFLGEKDDFNLEVLQHFVHLQPLRSLPLVQAMRGFLSRFRLPGESQQIERIMEYFSGHYHVQNPGIFEHQDNCYTLCYAIIMLNTSLHNPSVKERMSLDNFLNITNSLNLPPALVTDIYNSIRSEAFKFPDDNLQEHFSAALFQQSEKQGWLEKQGSRYKTWNRRWFLLANRCLYYFESPSSREPKGIIPLENIRVRISAPNREEMHSWVSAIQRSINKDQHIE

SEQ ID NO: 144358 - protein, 40 aa, Heterodera glycines
MALSVPCFAVRAFVIPPLLLDKPTRTLMFSNGIMPLGSRL

SEQ ID NO: 144359 - protein, 24 aa, Heterodera glycines
MTVNRKQTQRQRETQLKIHPWDFG

SEQ ID NO: 144360 - protein, 156 aa, Heterodera glycines
MSRYEPNSRLPYEKLDANLAIIRKRLNRPLTLAEKIIYSHLDDPQNQKLERGVSYLNLRPDRVAMQDATAQMAMLQFISSGIPAVQVPTTIHCDHLIQAQVGRGLGGICIGVGGADAVDVMAGFPWELKCPNVIGVKLTGRLSGWTASKDIILKVG

SEQ ID NO: 144361 - protein, 256 aa, Heterodera glycines
TKQNIPQTKAGKSTGGCEFAHADAIEDLCGAALVGNAAQSRSSTAEGDVRELYELGRRRRACPYFASRAALGLCQLVLVPYNILLHKSTRDAWRASESGLSPRNLRHIRQLHSLTVAVYNLATSTAKEEDGGAEERVLTLTQFMAKLGSASDIDLFRLLDYLDQSKLCRKLRDFRLRHSARGHSQPTVASSEQRNGAVGLKSHRGRSGQKLKQRQTAKKEMPRGNSASENIPPSANEHGEAATPADTNSTPLYQLR

SEQ ID NO: 144362 - protein, 95 aa, Heterodera glycines
HVSLFILIRALPILQGVMFPAMHCLWSNWAPPLERGLLTGVSYAGAQIGNVLVMPLSGVLCRHGFDGGWPSIFYLLGIAGLCWCLLWALTVANTP

SEQ ID NO: 144363 - protein, 36 aa, Heterodera glycines
LAFSSSLLVYWHFLWHNISYLFLVFSFLVAFPYGTT

SEQ ID NO: 144364 - protein, 165 aa, Heterodera glycines
MTSLPGETADQLFDWICSSMEKHQLDFKNLISFCADNAPTNFGVPQQLQEAHILHNAAKKGAEQLQFDIESVVYKLTSYFKGSTQRHTEFHEICDQYEIPTSNAFVERVFSLASSQWTKERNLLEVESVKALLLVQVIQLFYYYLVNPNIAGFNRKLRELRPRRR

SEQ ID NO: 144365 - protein, 128 aa, Heterodera glycines
MKSLLKIIFRQRPYRYPPETQKEIERQIKMMLDQNIIRESESEYSSPIVMVPKADKKSWRFAVDYRALNKMTKKRVFHLPNIQELLDLMGAKKFYTCMDMQQGFMQIPMAKEDMRKQRSFHIWEYTNL

SEQ ID NO: 144366 - protein, 51 aa, Heterodera glycines
MAILLKCVLLLSIMEIFCDCMNDPGKKGKSKAIRKKAEPDDYFKMINFNAN

SEQ ID NO: 144367 - protein, 74 aa, Heterodera glycines
CFAVPRTGRQWIALNLQEIRLAISGCKKLLGNELFFEVSQTPYWCFAVPRTGMQWMALNLQEIRLAICGCKKLL

SEQ ID NO: 144368 - protein, 169 aa, Heterodera glycines
NTRITDVEVWERRYPVIVRRLPLRAGSGGDGRFRGGDGISRHLQFRRVLHLSLLTERRVFPYGLNGGEAAKRGKNTLCRKDGTRVNLGAKNSAESGSRDILELETPGGGGWGQNGQKCTQQDILELETPGGGGWGQNGQKCTQQGALLQPLQQFPFDGIVQFCRGQCFF

SEQ ID NO: 144369 - protein, 21 aa, Heterodera glycines
MRTRPIWQVKQRLLTSQKKGF

SEQ ID NO: 144370 - protein, 392 aa, Heterodera glycines
HFNHWDSILLHSNHWDLTSPGPSAFQSLGLNSPAFQSLGLNPPAFQSLGLNSLAFQSLGLNTPAFQSPGLNSPGLQSLGLSFYAFQSQGLKTPAFQSPGLNSPGLQSLGLYSPAFQSPGLSFYAFQSPGLILLHFNHWSILLHSNHWDLTSPGPSASQSSRLNSAKFQSPELNSATFQSLGLNSPSFQFPGLNPTSIPVTGTLFSCIPITGTQLSNIPVTGTQFSSIPITGTQLTIIPIAGTEPHLILRTSITGTLFSCVSITRTQFLCIPITVTHSPAFQSLGLNPPAFQSLGLNSLAFQSLGPNLTWSFGIAIIETQFCDIPITGTQFSIIPIPGTQSHQHSNHWDSILHFSRILRHRNNRGLSSPPFQSPRTQSFTIPNNELNFTDSSA

SEQ ID NO: 144371 - protein, 245 aa, Heterodera glycines
MRAMKNYAFLHDISGGHCKRFTFIGKDSKTGEFGAVFDERKWHNQLFMISTNGQPIEEQQQKFMDELAEKLPPAGRHCIPITLSPFFWTEKDRNVLDYVMDLFSGQLLIAMCSLLTLGVGFIRVLRSAAEYEFYDCCTAFYSVFCWSASAWFSSCLLLYWTPSWSCINFRADDTNVPLVTLVFSIVMVCTFVFEIFFNNSLLKNRPVNASVAAADQKLRNDVAKECANVVIHRQQQKNGSAIMQT

SEQ ID NO: 144372 - protein, 60 aa, Heterodera glycines
MAIEHSTWTVEDAQAAEREAMEFIRKYEQQNGGGGEGQQQSTMSDQRGMTAGHSPIGDDH

SEQ ID NO: 144373 - protein, 48 aa, Heterodera glycines
MGIIRVVRCKFKKKNQLACQKLHFFSQSFLKKKTVLRSASGEKLEIFV

SEQ ID NO: 144374 - protein, 108 aa, Heterodera glycines
LITSDGLPLYSFYEYKSGITGKPQSCGVASEKALTQTKKNGLLYKASEHGTLQGYKAAMDFLTAKRLPLVTRIFAPPSFHEYNGTFVYIPSIKECEEAEKNKTKQCTH

SEQ ID NO: 144375 - protein, 179 aa, Heterodera glycines
MTGKIDWLQHFTAWHQFFCFFQSVGLNSPAFQSPGLNSPGVQSLGLYSPAFQSLGLNPPAFQSLGLNPPAFQSLGLNSPAFQSLGLNTPAFQSPGLNSPGLQSLGLYSPAFQSPGLSFYAFQSPGLILLHFNHWDSTLQHFNHWDSILLHFNHWDSTLQHFNHWDLISLAFQSLGPNIT

SEQ ID NO: 144376 - protein, 136 aa, Heterodera glycines
STDYREANPEGFGLPINLGASVRGDCPENKKIDFFKCPFGVLKQLWGAKIQGKNKVEVYRSYSRRIRSPHKSGRIGSGGLPRKQKNRFFQVSVWGTQTIMGSKNPTQNYSTGFREAIPEGFGLPINLGAWEEGDCP

SEQ ID NO: 144377 - protein, 87 aa, Heterodera glycines
IIFIQKIFFWVFGAVPLNRCAQIYGETESFGNSFPIACTLILRWIFAPHNCLSTPNGHLKKSIYFCFRGSPPEPMRPDLWGDRIFRE

SEQ ID NO: 144378 - protein, 147 aa, Heterodera glycines
MALFGFGLGILSAISSYVGFHNIYAGMVYLASSLFYLSVIIAMKKKEPSLFLPYLIFEGIGLLCAAVISLTMFIFGIWSPQQAFSTKEQEMNFRSLMLFFAATVGIDVALNAWFYSIIYRTYNLLKKTTKLVASASAVASARVPPPV

SEQ ID NO: 144379 - protein, 78 aa, Heterodera glycines
MGGIEVMMMMMRKDDDDYEEDGQNGNENGWMTHQNEELDKIAISTWAFEAETKYRLLMRRQAPLFCLALVFVEKKRDG

SEQ ID NO: 144380 - protein, 166 aa, Heterodera glycines
MGFYINLEVSTFDGASLLPPTLGLRPKAFVVLKRIWNCNDNDALRKRIPTFPFEKRLSKIDTLNLACAYINLLDVCNACKLLNFSQIFMSLRKFWPLKSIQLFFWNTQLVWQNMAGTQHKLFGAQAICFLDWTGSIGKEWEWTRPEHHLNFKFGFIILIIHNIENK

SEQ ID NO: 144381 - protein, 57 aa, Heterodera glycines
MVFSGVFVFFEQKKQNWSKASNYFEGANSLAPYEQAANREGIQFSAMKNAVIQNFCH

SEQ ID NO: 144382 - protein, 70 aa, Heterodera glycines
MHREKMLKCHEKNVINANVATTQTIQLKFSGAKDPIATFSGVDNSDPQNYHMIIKTCVLKGNVCQKGSEN

SEQ ID NO: 144383 - protein, 67 aa, Heterodera glycines
MDPSVATKGGRFSLENYKQNNSIATSCEQQLQQSGGSETLAIGKVLHGFNIAFAEDKLLLTSSTSQK

SEQ ID NO: 144384 - protein, 106 aa, Heterodera glycines
MLEEAKTMVDQLVEVGSVHAAYYGCSAEYQFQMGDHDRYYEELAHPILNDLSDTPNAWLNELLHAVNAGDWDGFLKHEEKLVAAYSEAGRKIEALERKLRLQCLIE

SEQ ID NO: 144385 - protein, 70 aa, Heterodera glycines
MALLSDRFDILVDKHFDGKGELAIWRIIRIDKDEGPKPKLSVRIDGTFVEFPFPDQPLPNKIRFCFLQIQ

SEQ ID NO: 144386 - protein, 233 aa, Heterodera glycines
MSITRRALFATSIRHLSFHDGDALDNLRSRTSPTILTDLDQLNSIDSGLLLPDGIADDGPNATAGQALTKWLHTPSKNGQPKQLRFRAYVSPPNFECVNNFKEVSCHIFVNLFLFYQFSLDIRRATTSVSYHIQFYFWVDTMPTEPFELVNKVTKEKLTLKQNIDEFDLNVCNWLLQRCPIGETATAPVKWENRENSGANFNYIRFELWYDNNSDANLNKIIFDLWGENDGNH

SEQ ID NO: 144387 - protein, 23 aa, Heterodera glycines
PLSPPAEEENVEEEADQSNGNVV

SEQ ID NO: 144388 - protein, 111 aa, Heterodera glycines
VIFLFILFSKIVNYFGFRTCPLCNGYLVEATTVIDCLHTFCKSCLLKYFEDNNDCPKCHNQIHQSHPSHYVAFDRTMQDIVYKLVPGMQAEEQRRREQVHPHGKMDENGDT

SEQ ID NO: 144389 - protein, 232 aa, Heterodera glycines
SKNIAILPRRDSDLEAFSHNPSDGSFAPLVYRPSTTKCLNLRFLSYAGLLLATGLGKTNLSHDGLNPAHVPYWWVNNPTLGEFCFAMIGRADIEGSKSDVAMDAWPPQASYPCGNFSDTSCWKLYTLKDRATLSRSVFVLKIRIKAFAFLLYERFPSSLSSLGHLRYALTDVPPQSNSPPDTVIVGGSPGHRVARLNTKMDRRTPVLPIKLGSMSSGISLAPCGSHLCYTSH

SEQ ID NO: 144390 - protein, 88 aa, Heterodera glycines; identical to SEQ ID NO: 133373

SEQ ID NO: 144391 - protein, 80 aa, Heterodera glycines
LFEYPIRTLEKIDFFVFGAVPPNRCAQIYGETESFGNSFPIACTLILRWIFAPHKCLSTPNGHLKKSIFLFHKYFFQKVL

SEQ ID NO: 144392 - protein, 60 aa, Heterodera glycines
IKSIPSGDRDGCRGVSRVGSFHHGHRTFWLVSNRGLTCQIGRVRMMPLLQAPHQKQNDIT

SEQ ID NO: 144393 - protein, 87 aa, Heterodera glycines; identical to SEQ ID NO: 129152

SEQ ID NO: 144394 - protein, 17 aa, Heterodera glycines
HKHLFDLFYHIHNLIKI

SEQ ID NO: 144395 - protein, 59 aa, Heterodera glycines
NGRRFLNDKFRLSPKALVERPSDGDLLANSVKDVMETLAMVDYPYPATFLAPLPGWPVK

SEQ ID NO: 144396 - protein, 229 aa, Heterodera glycines
IEKNYVFLGSDDFNILNFIFRYLLNTDSFRDKNAPIFFYTGNEGSIEGFAENTGFMWDIAPEFGAAIVFAEHRFYGKTQPFGNESYTKLENLGYLSSEQALADFAQLIDYLKNEKLPNAKHSPVIGFGGSYGGMLTAWMRIKYPHLMDGGIAASAPVFWFLNATPPEDAYDKIVTRTFVNSGCNVESIKQSMDAIRDLAKTGGHIIVINILYSLQGTFYIHFQMPINVF

SEQ ID NO: 144397 - protein, 73 aa, Heterodera glycines
MLNLLLFLLIVSPILAIEKPWIRRDPITLTKFSRHFALKEAPRYKWQELWYDNMPIDHFSFSDPRSFRLRIIR

SEQ ID NO: 144398 - protein, 24 aa, Heterodera glycines
ITGVSIIAVLFLVFLMPSQNLVRF

SEQ ID NO: 144399 - protein, 50 aa, Heterodera glycines
LLFKYAKNFRLNFFFINWSEANQILREHQKDKEKHCYDAYSSNSEFKIFY

SEQ ID NO: 144400 - protein, 19 aa, Heterodera glycines
MPTYYDYHSKRLKTAHGTQ

SEQ ID NO: 144401 - protein, 89 aa, Heterodera glycines
MSQFSDDSQPPVLDGPYSPVGDGGAELMDDAPPLEDVMKRLPISVEPSDNNERKVQKEPSITHELDAELFNGNGFACLSAAQAEAGRFK

SEQ ID NO: 144402 - protein, 152 aa, Heterodera glycines
DSKLPELRLIDGPTVRPSRLQIRFRDRWRSVCTQMTNWTSIDTGTACRTMGYDDGAFWRFFRRNNDTYPFVMPAPKCTQGQNSLWNCPGFEDSLWNCPGFEDKEQIPLSENLCQGEDDIGIYCWGRPTFIGWARHGKGLIILFNMFHFFTQL

SEQ ID NO: 144403 - protein, 95 aa, Heterodera glycines
MAGRKGPRATLFRALAIPLCGFISAYFSIQQQSDTVIRPNGLMPFWYMNVPRYTFDQNVKMFITNMYCNALKPFKQLQMNREEFVLLLAILITQT

SEQ ID NO: 144404 - protein, 101 aa, Heterodera glycines
MMRREKKKLLGTSTCRTHWPLSFQQRYAKNVAKTSSCMTVAMSGKAKRTLSLFSAVLSVGGRNRSCATFSNSALEHALTGNICPRSYKQRTGGNSSSFYGL

SEQ ID NO: 144405 - protein, 24 aa, Heterodera glycines
RTLSTAVRQRSSKIYSMPQILWAG

SEQ ID NO: 144406 - protein, 24 aa, Heterodera glycines
RTLSTAVRQRSSKIYSMPQILWAG

SEQ ID NO: 144407 - protein, 33 aa, Heterodera glycines
MSMKQHITSLERKYAEKKPKLKARLRKILFNDF

SEQ ID NO: 144408 - protein, 92 aa, Heterodera glycines
MVLRRAFLRRRNSECLSPFREAEDSDQAATSMEEKVEEMRRAIWTICADVERMESNFVVGMPHIKVQVSQSLITGLIAFGLINSASQTPIKS

SEQ ID NO: 144409 - protein, 100 aa, Heterodera glycines
SGPTAFGNLTKKYAMSFYWSALTLVTLGEQPWPENSVQSMFEIVDTLIGLLVFAAIIGDVGIMPCQPSNARQSDQMGGIPMDEQRSGPNSGRKCGKNKNQ

SEQ ID NO: 144410 - protein, 45 aa, Heterodera glycines; identical to SEQ ID NO: 124527

SEQ ID NO: 144411 - protein, 63 aa, Heterodera glycines; identical to SEQ ID NO: 142617

SEQ ID NO: 144412 - protein, 24 aa, Heterodera glycines
MEKACKIWRDYIDFSALELLELAS

SEQ ID NO: 144413 - protein, 100 aa, Heterodera glycines
MGGEIRQRFTSSRQQQQQQEQQQRRQQPQQQQSAGKGSSLTVVVGGESQQQQRQQPVKNADFIIPVEYADPVVDLLDKRRIFRSRLFRESCVFYEGNYVK

SEQ ID NO: 144414 - protein, 24 aa, Heterodera glycines
MEKACKIWRDYIDFSALELLELAS

SEQ ID NO: 144415 - protein, 44 aa, Heterodera glycines
MSPLRFIIAFLLVVLCAFSPLITAQEERVDNEPAALRARQYLCK

SEQ ID NO: 144416 - protein, 30 aa, Heterodera glycines
MLYPLILKISLRKHGEINFIFFYCINYFYK

SEQ ID NO: 144417 - protein, 75 aa, Heterodera glycines
  unsure (1)..(75): unsure at all Xaa locations
YFICYSPIQLFLCRGLFNLSIHXPXYEFVLLMNALAILCSACNPLLYTLFSSRFRARIGHLLCLCCDIFYRRNNK

SEQ ID NO: 144418 - protein, 122 aa, Heterodera glycines
NRRIIFSFWNKTFARNSEKEMWEKGGGGGEKHRQKDKQSNFETELKVEKCHSSAFLGDSETKGKAKRQKKGGKVMEDKSKDGRSDRRRKRHSLVKKFHVCVFVSSVPFAVFRKRRRAVGHCH

SEQ ID NO: 144419 - protein, 88 aa, Heterodera glycines
MGFRDVDDDGYEEEEAAAVNGGGGTSPMNGGGNNKLATATTTAKLFQNGITTNTNGKKGGDDDDDGQEEEEANDGDTTITAHGNVLWW

SEQ ID NO: 144420 - protein, 144 aa, Heterodera glycines
MKSSLFSLRPFFLIFSLLFLSSKFRLQNACPFQSLSADQIEDNASEETEAAEESAFVQQQSTRPPKESTDQFAETIETTINGHKMGKMTNIRRRKKSVVPYDYFPRDVFPTLKNIIIEETTEQTTTTTTPVTVEQTRQTTKIPK

SEQ ID NO: 144421 - protein, 41 aa, Heterodera glycines
MGKRKLLPKIHGKKGVKERQKKREERKAQTAKAMQARWAKK

SEQ ID NO: 144422 - protein, 18 aa, Heterodera glycines
YREAIPEGFGLPINLGAS

SEQ ID NO: 144423 - protein, 95 aa, Heterodera glycines; identical to SEQ ID NO: 136768

SEQ ID NO: 144424 - protein, 66 aa, Heterodera glycines
LFEYPKRTLEKIDFFVFGAVSPSRCAQIYGETESFGNSFPIACTLILRWIFAPHKCLSTPNGLLKK

SEQ ID NO: 144425 - protein, 182 aa, Heterodera glycines
MAKEEYCFDAKAAAAAGQSRRPSTTASVLVQGDGQSSRFVDAIIRKVTQPPLQRFTDEVDHKFWNVLKQLIKFSFFAQITDEELKQLCKAATDVFRMQPTLVRIRPPVVVVGDIHGQFSDLQRIFTTHGPPPEQQYMFLGDYVDRGAHSMETIILLFCYKIKYPSNFMLLRGNHECSNINKA

SEQ ID NO: 144426 - protein, 68 aa, Heterodera glycines
MPQIYNSKSEFTPSAQVPPRGSSSHWPADARLPTGGRGQCRTDAFGIAQPNLGNAVFLAVWPRRAGQH

SEQ ID NO: 144427 - protein, 32 aa, Heterodera glycines
LKFSVYVAQKISYSELIAFTKPLNSFALLICT

SEQ ID NO: 144428 - protein, 92 aa, Heterodera glycines
MVYQSKEHCRVLFAQLEAVESNTLQLLANTLDDALTKAELVKKRQSEDVLLHMTVLNTKYLGWQGWKKTTLNVTQLLEKYGQLNFDPINVEE

SEQ ID NO: 144429 - protein, 49 aa, Heterodera glycines
MSMNVQYMIALWAKLCNIEEKNANREHKLLVMNINNKNLVGFEQMRKDT

SEQ ID NO: 144430 - protein, 47 aa, Heterodera glycines
SPISPVSPIQPMSTDWSNAIDAQEMGAGGVGGGISSGSLHESLHELS

SEQ ID NO: 144431 - protein, 55 aa, Heterodera glycines
MGASIKMPNCANFRCFSTSNQLNFARICTNAAEAISDIPNGATILFGGNREIFYF

SEQ ID NO: 144432 - protein, 15 aa, Heterodera glycines
MNIMPANLGKMPMKN

SEQ ID NO: 144433 - protein, 66 aa, Heterodera glycines
MANYSVKLPISDSQFAWFIVELAWLVNRDRAGSINTALMLRRMCEFRVIIMIANKPLFKKNDYLNK

SEQ ID NO: 144434 - protein, 78 aa, Heterodera glycines
MTAKFYLGSVINQFPISTYEQQLGKGFMAYKELYDKMDKKKDDAKFNKKYAKVPKNNAEEMKPLPDPCEQAKLKWKKN

SEQ ID NO: 144435 - protein, 97 aa, Heterodera glycines
MAQTNNNHLKHAFALFLVTAFVILIAVVLAEKSVTNSDSATAAKDIQRMEKLQKAQEYVDKLNEAQNYWTVRPILSITAKLFLKLFIYLRPSFTKIL

SEQ ID NO: 144436 - protein, 188 aa, Heterodera glycines
MGGPCVAEGEALGQMKRELTDRRIIEFVAGGPKNYGIRHTAGEGSEERANLKIRRFRLSNTAQQLLTFEAMKDLTLATYNIDGPIDDALDNDDLYVYGGGEHRAISVNFPQIDRNVYADLYTHEAHKDYRPFYAKGRVRPGMQTRPFGYVEDDGQPNGGQRTPDASTIEKFFGTRSHTARTLWVVLML

SEQ ID NO: 144437 - protein, 127 aa, Heterodera glycines
MVDVPADFAVLLNSAPPISRIESNKMHWLRKRQQTNATALQRGIDQIGQLATERPVTSFARFADSPDEQALYLLWEPLTSDQPTANGGPSSRIYGYLKVKLTNKELKGRPGPTIVFGGRRRATVRHD

SEQ ID NO: 144438 - protein, 132 aa, Heterodera glycines
MLGVGQLGNHCQVRNLDSGPAKLEKHNGRNEPKKAQKRQPMAEQTTGENQREGKSDTNGAENAKVEIGNGKMPNQPMICHDFRRPKRRKMPGRRDKSLSIPTNGVDTASVTWRKMAKCFCPSTFAVFPWNIH

SEQ ID NO: 144439 - protein, 297 aa, Heterodera glycines
GHFYDLCASMWFTYLLFLEKVVLLLSWQAGLLMFIGQVTDAVSTPLVGVTDAVSTPLVGMLSDLSLLPGILRRFGRRKSWHIIGTVCVTLSFPLIFSGCLLCHTVCVTLSFPLIFSGCLLCHLPFLRLLWFIPPIMLFQFGWAAVQISHLAMIPELSNSEHTRMSMTSYRYGFTVAANLFVSMTSYRYGFTVAANLFVFACLFLFLAQDKDTSKIKPSDLANFRNLGLVAVALGTANLGLVAVALGTAVTALFYGGVSEPNSGQRRMSRLNSESGDEHRLGRMSSKKIFYHGAEMER

SEQ ID NO: 144440 - protein, 16 aa, Heterodera glycines
EAIPEGFGLPINLGAS

SEQ ID NO: 144441 - protein, 32 aa, Heterodera glycines
MLFLLFVFVFLIINNSTDKILKNVKLFTNFMQ

SEQ ID NO: 144442 - protein, 48 aa, Heterodera glycines
MHAFCARAIYHRACQSKAKQQRCCFERIKGIESVNRLLENIFAIYQQF

SEQ ID NO: 144443 - protein, 36 aa, Heterodera glycines
SKSSLTTAQKNMFFVHFRPRGAQEKNSLLPKNWSPN

SEQ ID NO: 144444 - protein, 274 aa, Heterodera glycines
MKPDLKDRDFMYKLIVGQLFYDGHQQLALNQLFYDGHQQLALNLAQTLGLSLRPPPPSDKLFRLVAIAKQFVEDPESKERETILQVLFGFESAGLDLEFDADVVPGFESAGLDLEFDADVVPTSPEPSLYETVYLTTHKAPCRAAAFTSPEPSLYETVYLTTHKAPCRAAAFSPDGALVATASNDCSIKILDVDKIISSPDGALVATASNDCSIKILDVDKIISRQVPQKALSESGPDAHHPVIRLCPLSESGPDAHHPVIRLCPHLDVTNKTL

SEQ ID NO: 144445 - protein, 202 aa, Heterodera glycines
MNFLGYIVNKNGYTSSISKVESILNLQNPTNVKEIRQVVGMASFFRKHIPNFSTIVEPLTRLTRKEKQFNWTDEQEKAFEKIKKILSEKPVLIFPDYSKPFHIFCDASNVGQGGALMQWDSENRVYNAIAYCSRTLSKTERNWPPVQTELGAIIFSLRQFKPFIFMSNIELHTDHKPLAFLLKKAETHQKLARWLIELQNYK

SEQ ID NO: 144446 - protein, 22 aa, Heterodera glycines
KSIKNLKMRIHARFSGNKLNRA

SEQ ID NO: 144447 - protein, 146 aa, Heterodera glycines
MASINDLDYVRDYDYVYDLDFDEMEECVEILDQENERNIRNYDVFEEHNYAKRQRFVDGGPSQGSMNLDAEVAGSSRMTDSQFEDRRLENLRKKRERDRIRWQNKSQESRNVRLEQMRNRNCNAIADESVAQRRMRLEQMRNRNCN

SEQ ID NO: 144448 - protein, 64 aa, Heterodera glycines
MQMDATDAADISVTDCENERSESGVTIDNRGEHSFHFIIDEEDDEMQPMEMDEEEKADEGTKRR

SEQ ID NO: 144449 - protein, 48 aa, Heterodera glycines
IHSFFNNCLLNYELWRKINKTKFRSLFPDHHLYVLQPLHLNMMNVQSL

SEQ ID NO: 144450 - protein, 84 aa, Heterodera glycines
MRRLSQLFLRCHWTPSEIAASCRHASSAATARPLYMDVQATTPMTWDKTDWRNARFEYTPKQVNPHNAAHLIAELAPVPSEERV

SEQ ID NO: 144451 - protein, 29 aa, Heterodera glycines
MTKAEINKGLLGLLNDKKIVGFAWQRKKL

SEQ ID NO: 144452 - protein, 211 aa, Heterodera glycines
MEPNNNNDQANQCQQTDISKSIESAVLPTMMELGGDEANASSPRAAETAQMPSLNATATNGGPGSFCDGTLGAPPYDNGHQNAAVTIAAAASLPKTTKALGEPANSGVAGGGGVDSLDQPSDDVEESHQAEELVVKEECIFPQDEYMEDEELQLVDQHNDDSPPENGIATTTDGTNERQQKNNGTTARDGETKQNQPKTIRMVVPIMLTTL

SEQ ID NO: 144453 - protein, 86 aa, Heterodera glycines
IGSSSAADDDSKVGSSSRSAKLKRELRFHCDWPGCAYATAYGGDLNKHKRKHTGERPYQCPQCEYSTNKSSDWTKHLKTGKHKKSL

SEQ ID NO: 144454 - protein, 190 aa, Heterodera glycines
TLAQLLKVTRSAQRREAAEDAVPPAKRQMGFRRGPLANPPPPPPPSQIEDGLPLPMPPSNAEVVAEPNATTSTTTAAKVIASRNTGCSTSSTALTMVTRSAQRRAAEEEAVPALAIPPPPPAGCSSSSSTAANPPPPSIRIPKGKTPKKVRPRRPEPDQPDDQYELRAVLATAEVVSGGTTHLCLYVDFL

SEQ ID NO: 144455 - protein, 18 aa, Heterodera glycines
YREAIPEGFGLPINLGAS

SEQ ID NO: 144456 - protein, 66 aa, Heterodera glycines
MTLAFSFAAPLQKKRLMDPSKGLHNKIADKVTLAIDITEVEKLDSNPNKPNGTIVMEIDRLSNFAQ

SEQ ID NO: 144457 - protein, 64 aa, Heterodera glycines
MSKWIPTFYTLNQKVLKQIRKVSSKKIISSTLRSPLFIFLIFPIDTTESLTPVAGHICVEYRGA

SEQ ID NO: 144458 - protein, 91 aa, Heterodera glycines
MSSFAPFSALFLLAMVLNFHSLNGLIKRESALSNVEIAEKKDALNEEFTRKFGDLREGCFPRPKGKGCRCTVKGPMGHDEEKRFDRDEECR

SEQ ID NO: 144459 - protein, 230 aa, Heterodera glycines
QDNCSWNAQCFDLPDDGDVPSWRCVCNPGFRGNGVNCTDACLNFCLNACLNFCLNDGICRKNRLGHVECQCKENFSGERCEIRFQVFFVGFVLISMLFSVVFLSVVFLLIIIVVVIWMISLRFNRSSSSEAKFSNLISLPPPLRSVLPGSPPCSPPPPIPPIGLYYEDEQPYEQSAGGGTLPRGAARHLRGGSQSQEVGAGQKNVQQHMYRQNNEQIEKMKKVPIPNQTE

SEQ ID NO: 144460 - protein, 338 aa, Heterodera glycines
MYNPQGIITLAQHKVAELEALADIDWRLHSCFNLSCVHFSLPDPPNSIAKNTDAAIEEFFFGDDDLNLPPGQPNPRPQPNTPPPLNSDQQKVFDAVLLAIQSNPRDSTVPRRFFIYGDGGTGKTFLFGQIIRRLRKAPYTYKVLATASTGCAAILLPYGKTAHSTFRLGREVSLDKLPSIPLESFFARRIREAQLIIIDEITMLHNTVIEVIDRVCKEMAIRQHKDLLFGGKTVIFSGDFKQSLPVVPHEGLTAQVTACFQTSPLFGQFTTMKLTINQRLGQGQQAYLQMCRQIGLGETGEHFWIPPQFLVKSKEELIDYVYPNFQQLLGNDKELLNR

SEQ ID NO: 144461 - protein, 72 aa, Heterodera glycines
LKILPDNVLQRFVVGSTHGIVLQLDLNGMILRSWHDPEGSVISHISEVDDDGGDFLYLSSFVNNYIGRMSKE

SEQ ID NO: 144462 - protein, 70 aa, Heterodera glycines
MVGSQQQQQYHLLPTQQLNHNRNKQYTTQQQQQQQFTSPYATSNYGYHELTHPPAYSMSMVGGGDAGQRR

SEQ ID NO: 144463 - protein, 149 aa, Heterodera glycines
MSNKLIQFFVSLFISLAACGHVPPPNHWSASLDKPKSGALPKWTLNRQEEEDFNEDFGRETQCGLTKHHFQYRIEHGQIAPDNDWPWAVSVRLECETKQSAKREVLGICSGVLIGAKWILTAAHCLFATDDILRCKGVELNGLIPEKGA

SEQ ID NO: 144464 - protein, 60 aa, Heterodera glycines
LASLVFALTVTGSKRRRKAKSNAMESPINAVAFAWMFTIIWTTLTKNIKVVKIEVKMLIN

SEQ ID NO: 144465 - protein, 41 aa, Heterodera glycines
MQNTQRTEPKALAYGRIIYECSLCSIGHGFPLSPRAKMAET

SEQ ID NO: 144466 - protein, 68 aa, Heterodera glycines
MHAFCARAIYHRACQSKAKQQRCCFERIKGIESVHRLLEKYICNLSTFLRSELEMINFTIQTNFRCSN

SEQ ID NO: 144467 - protein, 68 aa, Heterodera glycines
MHAFCARAIYHRACQSKAKQQRCCFERIKGIESVNRLLEKYICNLSTILRNELEMINFSIQTNFRCSN

SEQ ID NO: 144468 - protein, 240 aa, Heterodera glycines
VQKFTRAKDEQYYNNLAYVEKPQKDFPGLELEPVQLKAGQAYVEKPQKDFPGLELEPVQLKAGQVSRYQPVHEKLETVALRELKEKEAKKEAEPLPDWASGEVKLGEPGATEGMTNKGPEPEREPSIPHPEPEREPSIPHRDQVKLKTAKPKPATEAPPVEHVTIEEDRAKMASIQQGPPIEQEPFVAHKDQVQIKQQFKVAHKDQVQIKQQFKPKEVKVHEQGKVDADKQLKDIPPVVK

SEQ ID NO: 144469 - protein, 24 aa, Heterodera glycines
ITGVSIIAVLFLVFLMLSQNLVRF

SEQ ID NO: 144470 - protein, 36 aa, Heterodera glycines
  unsure (1)..(36): unsure at all Xaa locations
KPKLFGLFXKELKIFKNFIHLPFDRKSIREPYLTLN

SEQ ID NO: 144471 - protein, 226 aa, Heterodera glycines
MRRWLMILIVAVAFAALAFGPISVKCGVLEDVKDYVEAFSNIIVPAGSVGEQLKMISLSMPRLPESEELQALNLLHVTMIKQFNGLDQRIEHLGNKLIEHMALVEYDQWLNKRVNLNCVKPTQEEADTFAKASKIFDLIDKNSTNFVHLTQRRYADFRRNKIYGPSFALESAIVDLHHSLKIGLYQRNHGRCILKEISDANENIREELYELILMIELDSLKLVLFI

SEQ ID NO: 144472 - protein, 113 aa, Heterodera glycines
MPSDKLAGKHSNSYGYQSDGTFWVNGFCVSGKLGFSEGDTVGCGVNLATGRIILTKNGLRLDTTKMFAVASSADDPLFPCVSLCESNDKIVANFGPNFKFDPSAVEVKILLIK

SEQ ID NO: 144473 - protein, 16 aa, Heterodera glycines
EAIPEGFGLPINLGAS

SEQ ID NO: 144474 - protein, 28 aa, Heterodera glycines
MYYLSPFVRKMPEFRKSDFRAILATYVA

SEQ ID NO: 144475 - protein, 70 aa, Heterodera glycines
AKFGVTELFSPNDRPNGKSLPEYLREKYDGGLLIAFEAAGSHLAVVCQINNHNSPPNSKLWSSFIFGYDN

SEQ ID NO: 144476 - protein, 92 aa, Heterodera glycines; identical to SEQ ID NO: 127421

SEQ ID NO: 144477 - protein, 90 aa, Heterodera glycines
NRNYAQKAPQTILALPIPSTIAFIHPIMSAKIIRVPKIACDLSLEKNGVSKNRNYAQKAPQTILALPIPSTIAFIHPIMSAKIIRVPKIA

SEQ ID NO: 144478 - protein, 147 aa, Heterodera glycines
MPTEFKVPKFNKSDTLVEFLLEYWKTRKTLVFVERKRSSDMLAIALRQNNIRALSINRSGKSSTISRFSLCFSDRTLKQRLGAAEDFASGKILVLVATDVAARGLNFPGVETVINVDLPEQDAYERILETTGHELPTFLLEIAKGQK

SEQ ID NO: 144479 - protein, 146 aa, Heterodera glycines
MKELSAQLRQCEREKADLTKKALILEEQVNGEAKEFDRRFRERDRIQREVMEDNGRLYQNGIWWLGGREWCGKGGASEHGVKGPIEEAEDDEAEQNEEMAEEQCPGLTEECDDRQSEEADEPSASQRPGGLFRSARGSNVKKGGAA

SEQ ID NO: 144480 - protein, 56 aa, Heterodera glycines
GVTVIFGAWVIFGISVTELGLGIEISPLNFIFWVGFTFDSKFVFGTFGNLVVCEMV

SEQ ID NO: 144481 - protein, 19 aa, Heterodera glycines
GSPPEPMRPDLWGDRILRE

SEQ ID NO: 144482 - protein, 201 aa, Heterodera glycines
MLSEDGSRDNQMERSLVRGVEGHDDLSRRIGSLSLRTIHQQQPVTLPAYRGRTGPLADGQQPTQSAGRRRTRRRGKRRPLNLVKALCRFNGGCMPSVLPQMIQRRRMENLGFLRDLRLQTVHLKNNIMISANSFSFHSAGSLLAYRGYLSITVEQHLYVRHRVRLRFPFLPCVAQYGGNHHHYYFPLELLEICSRPTDESS

SEQ ID NO: 144483 - protein, 196 aa, Heterodera glycines
MVAVRQALLVCIPLLFIVLNLPPIHLQLRIGSSGSYNAWIQGSLIRGSKNALKSVLVEYGYWTLELDHRLVAYDGRRRAISENIEGIASDMGTVAGGAAGFGALVATIILPGLGLAAAPLVGAAVGSLIAGGVGAIGGFFYNFGKSFACHTSCPHETACYRLESDVSWMCCTQNLRRKVVKDFAEVICKVLRRNNV

SEQ ID NO: 144484 - protein, 51 aa, Heterodera glycines
RKVFATVLNCSLIFSFFGIFSRTRARHVEEERNLRDTVHNQCNRSFKKSKK

SEQ ID NO: 144485 - protein, 81 aa, Heterodera glycines
MFGIMCRPVLFMVCAFFVLFFVYATKPELFMPNHAPTDENEIPNIGKAEPDAIGRFGHDHPRNSDTETEKPAHGFGISPEF

SEQ ID NO: 144486 - protein, 346 aa, Heterodera glycines
MTTTTTTKTNPWTTTRWAPMTTTKQRWTPTMSSSASTWTTRRTRIQYVTKARSQQTDATTPPGTIKSAKSAKRDLGTNRDGADVFWCSDRGSTIWELKGTENSPFCRPPPTLTAQWHNLAIELFAKVIKPEQIAFAWHCSIKRTSERYYTNLLADKFVTIEKEFPPVNKRICKQMAIHQECPFAKSEMTNHEAQLWSTNDELEVNFPGPIAGLFKGEQISTATNCFAQPATLFVKRHNLQMFSPVHQIQNCQYATEFCQLPDNSTLIWKSTCNGNECQTCDYDRAEIISGKFTAAYGETVATWISEDHQKALTFAKNAPELIACDGTRIVMSEQNFGIAKEQYDDI

SEQ ID NO: 144487 - protein, 116 aa, Heterodera glycines
MELKEEREFWAFFRRLLRYFLSLESHFMAAAAHQTKMRQLTLKSMRAHQVIIAKGSSPTTEILKERKEAEEEKEADKQKSLQTEVGETEENWDNLFLERKTKWNCPEKANDKQRWT

SEQ ID NO: 144488 - protein, 127 aa, Heterodera glycines
SLNGTSNYLLALFSFFEILHQFGHFLFVYIAFYGQNLIEYRLAAKIVFISSLGYGAIYISMLFTGVDRLIVIIFDEMNNKHKIRLYLATVTIMSAFCGCISTVSLYQDAQLHGDLMITGCTVDFFMV

SEQ ID NO: 144489 - protein, 190 aa, Heterodera glycines
MNSLKRFQLPEQGTRQQEELDSVEPKHISDVVNFNSAGVFYVLGKACPFRSKGLICRRKLSDDNMCEACGQKAIAPIHTVFVRLLLQDVEQADIAQRVTMFSSVAEEFLGMKAAELLAKEKEPESLAKHLDDLIAVKIIAKVNIKANNQTYTGFDWIVNLFKKCPGNDDSDVPKEKNDVEGIATKKAKKN

SEQ ID NO: 144490 - protein, 419 aa, Heterodera glycines
MFQFALFLLLLIVEFADIANLFHLSQLENSLGQFPTSSTTEKTITEYVPWLYRFGQKLMPCQDNIPSDECQKHENDCQEFPSLAAKVCLIGLTILAKNDVLLLCCTEAESYTAAERKYLSDKGNGQSPKECRKNEEMSAHAATSGAIAFSGATAQADGLWDDLLTMGAGTSSNRKRRAAIESAAEDDNLPTNRNRRNGYSVASAVPAPPCSETVNQTRKCLKFIKSAKRSIHAHTERPGRRETMARRDWRESREKTNCLAGPQGNPGEAGRPGVRGMRGPKGSPGMPGRDGVPGLPGIQGDEGEQGKDGLPGKGGEHGQDAEKPIGRRGPKGAPGEHGNEGPVGSPGNPGPIGKQGPPGQLGPLHARAEKGTKAEGAAQGSNTEGHREKANTAETKVVAHIAEGCTDRKSGGKGRRNDK

SEQ ID NO: 144491 - protein, 28 aa, Heterodera glycines
MCTFVGAGEDSVSYKSNFKEFENLRPKK

SEQ ID NO: 144492 - protein, 88 aa, Heterodera glycines; identical to SEQ ID NO: 124691

SEQ ID NO: 144493 - protein, 138 aa, Heterodera glycines
MVAKTRGWPSWKFYDYMHSRLGQRGLFHQDTVQLMRQIKAPLDLDAYDADTYVPLVISHWNNAQQQQQHRFALFIFGSTGHYKPIYKYIDSTYDTPLVLYFNNNHFDGVHFLSGLFGGKKYCLECEKPYKKPKEHMQS

SEQ ID NO: 144494 - protein, 177 aa, Heterodera glycines
MVKLENSWIDASNQESPYISTLASSGLAAFHKKFRQLYGQQQPTLIRCAAFLDPNICAVLPKIVATNSNWGKVAEICATIKTVAQIRHPDCNSLIPRPCTSPSLSGFDRSPRAAIDIEIDRYMNLCDSLFMKIDPLKFWSENQKSLPILASLAREFLGIPATSISRLITLQSLFRDT

SEQ ID NO: 144495 - protein, 45 aa, Heterodera glycines
MAKNEILAPKNVEKEWQQNYAEIWAYIENDKSTFLLLFAENQPQC

SEQ ID NO: 144496 - protein, 169 aa, Heterodera glycines
MKLFPLLLLIILFLIVKIGSEKKKLQQKSFGEIFGEKWQEKEEEKRNELKKREIIGKYYKIKEKIKQKGRKYSTKEWNKIDGKIAKKLGTNSNYIQKWIKEFGLQKKKCYKSKTDEEKLEIVQKFIEMTNEYKQKKKYSHIEWATKLCRNWQENWRNLENYFRRTAEEE

SEQ ID NO: 144497 - protein, 15 aa, Heterodera glycines
MTVLVEDSYGFPFEN

SEQ ID NO: 144498 - protein, 75 aa, Heterodera glycines
MVINYIKPLTRHLSIETPANLADALGMHTPNWAFYHYSSPNYRSAWPWRMFRDRFDCEQIMYNKHFSVQPIYRNN

SEQ ID NO: 144499 - protein, 98 aa, Heterodera glycines
MIRNKLEILQKSRKKRYLSDISNTTEEAVNLGVKFVEPNAVRTSDSVEQPNLKEAEVSTMTFERGKTNFGGDCLWLNGFVSHTSQEIAEDAQIELLII

SEQ ID NO: 144500 - protein, 65 aa, Heterodera glycines
MTISPPVERYIDSVCDLGPIFTEIGQSLRAQNHQPSFVLTPTGNIRRAEQQQQKREVAENSEENA

SEQ ID NO: 144501 - protein, 202 aa, Heterodera glycines
CPIFAKFQNQQQEQSTHFLPPPMTSSSGDEWQSAYECLPQWTKQMPKMPPETAPKPQQDLSSSFPSFCAASFAESVQCSVNLCKFHAYSRQLAAKSIWPMSDSQAEMFQSVVSVEGNQRIRPILNESATFSEHQANDEVRNLMGASGTVSPPAQMHTSPETQSDSNITRNTTILNLVRSAIGESGIQRTRQFFARDKFKCDK

SEQ ID NO: 144502 - protein, 18 aa, Heterodera glycines
YREAIPEGFGLPINLGAS

SEQ ID NO: 144503 - protein, 67 aa, Heterodera glycines
MFNFSIPDEFDNVTLMYSKHEKIPMKDFGSEIRATMDIDHLLNKAVLLLDLQETSLEEIFANKNERF

SEQ ID NO: 144504 - protein, 61 aa, Heterodera glycines
MCVTLPLHWLPVLDPLVSILCVSDYQLPNNMRTIQVMRAMFIGQTLKFYPNSLSLNFLFRF

SEQ ID NO: 144505 - protein, 171 aa, Heterodera glycines
MAQKKGMEIVNRFGKALPIPKIQLPRKVTGFECIKISLIDRNAIAFLQRFRHLFSVCPINLITDMFSERILEFILQNIWPMIAKNICAIYLMKYTFRHLRKFVPTILDDCPSLRIISFHAGVDYFFTEFPPDDSAMASDGQALAKWLLIPHPDDVPKVLKCWLNMEKGIGR

SEQ ID NO: 144506 - protein, 114 aa, Heterodera glycines
PHFLEKKFNITDTRGIIGVLASSLALACYQNNSFPEKSHPENQIAYSYPRKGGENYAKNISTVFFFLHFQKFQNYILNGFKVYCDADFFEVPEDYDFTTRVTSHIDHVELTETR

SEQ ID NO: 144507 - protein, 17 aa, Heterodera glycines
MAPADRAAKEMEYALNE

SEQ ID NO: 144508 - protein, 16 aa, Heterodera glycines
EATPEGFGLPINLGAS

SEQ ID NO: 144509 - protein, 151 aa, Heterodera glycines
IRCGAWPFFLLGAICLVYSDNERDSSLLNSWLIASGHNFLEGFSVFSRTKLSNNRSVMPLDVRGCTRATLAKSACLPSPKGVGKPVKICRDWDRTLQLLSVNEEFLVGASHQLALNTSLPFVHTARRCPGLSHFEKFGDGCSGRSVCRLEP

SEQ ID NO: 144510 - protein, 96 aa, Heterodera glycines
MDNFESKVVAQFGQVHTANRANATVVALDHLLNADRDIFSAGAVVDQKNDGPPIFAFVLRNIRNIFDDLTTLINAIGDVAKAGKKAQNGQMGKHYS

SEQ ID NO: 144511 - protein, 179 aa, Heterodera glycines
MSSMYHHLLLKITMFLAFAAAHFPVAAIQCVSGMALTYINNSTGAENVTIGVQQMVKCHHGCVRAVCSVNLPELSDHFGFKIVHAFGHGTYKLYGNRPVAVVSGCAAPKNGTATESAADIFFGNGTIGGTECKQVAVCTTGELCNPKPSSASRTSSALAIAFPSPPWCPAMCSRSEMAY

SEQ ID NO: 144512 - protein, 38 aa, Heterodera glycines
MTNWTDTLCLLAGAETSADELSMKWLIFGDRHDGLQDF

SEQ ID NO: 144513 - protein, 67 aa, Heterodera glycines
MNTAVVVRPRDRQHFRHSNVPPVLNILDQATDLYGDLFRMVIDPEGINGGSGGGAQVITSDEEEYGR

SEQ ID NO: 144514 - protein, 97 aa, Heterodera glycines
LKRVPVDECENIGKEKRPIAGGETSSNSTGSGENKIWAQSPQGKIGNFKLIIFKIKIIKINVNQANRYENVLQLFSNAAAAELKKRTVHKNMEKCAW

SEQ ID NO: 144515 - protein, 92 aa, Heterodera glycines; identical to SEQ ID NO: 125147

SEQ ID NO: 144516 - protein, 75 aa, Heterodera glycines; identical to SEQ ID NO: 138893

SEQ ID NO: 144517 - protein, 128 aa, Heterodera glycines
MLDWMMRRKHIDASKIVSFRKHIDASKIVSFALDEADVMIGQQGYQDKSIRIQKSVPSSCQCMLFSATYSDAVIKFADQLIADPTLITIRRQDIRRQDQSLPYIRQYFVRCKDREDKYQSLSTIVHKM

SEQ ID NO: 144518 - protein, 225 aa, Heterodera glycines
MHVDFDPLAVDWSHFAEPPPRMDTMLMSGGGSSMGGGGGGGSASSYPVFTGLPYQRGAGGIGSMFRSFLRFLVPIGRQAGAAIGRQGLETGSRVLSQMLEGRNVKEAMTEEGRAGLKNLLDKAADNLSRQRSTAAAATTNHGGAGRGGRGGGLFDFKRYRKIVNNNNNNKRKSSSSSSSSTNNIKKNKKRRTGNLQSTVGPSLSTPAAAAAAKTKGVRFDALGSF

SEQ ID NO: 144519 - protein, 396 aa, Heterodera glycines
MRKLRVKSTNKVNSNNKNAALQAQKRELLVEKVLDELYKDTRSNAAFTSVEPLLLEARRQHPGRHIRRAEVRRYLARQRVYTLHRRAVRRFRRLPTLASGLHTDWQADLADFTALKRHNRGHAYLLVCADTLSRQLFVEPLKSKRSSDIVQAFEKIFRRVGYVPWKLMTDQGKEFTAAPVQRFLVDQEERLYRYFTHRGAKCWTGVIQHIVTALNGSPNRALFGLRPNDINFGNAERVRRNQLERLAAGQQQRQSPRARPPFRVGNRVRIEKHKHVFKKGYLPRFTDELFTVAEVRTSRLPITYKLRDDDGELLTGWFYAQDLCLVLPPPPPLQSKRDEPIADKAGAAASTTVGPVYDIERVLRRRRGRDGAEHCFVKWKGYSAAHNSWIPATSII

SEQ ID NO: 144520 - protein, 206 aa, Heterodera glycines
MLVVATVAADARASEFLNNHSMDMFRFKVHNAVKDTDDAAADSAAHDQCQQRQQREVASPRTMPLSLLVEEQAHVSAAAEAAAEAASAVDQKMSAAPNDTPAITDTKIDFMTDEQTVAAAPPPLFSEIEPTQQQQQKQQQWRTAEIIAPKVELSAEDNGDDDDDDDDEAGQQVKQEADRNGMDAHHSNCAKGPLLFIDEQENEEEE

SEQ ID NO: 144521 - protein, 418 aa, Heterodera glycines
MQFEEMATSEFLNNHSMDMFRFKVHNAVKDTDDAATDSAAPHDQCQQRQQREAPPRTMPLSLLAEEQTHASAAAEAAAEAASVVDQQMSVAPNDTPAIAGTKIDFMTDEQTVAAAPPPLFSEIEPTHQQQQKQQQGGTAEITTPKVELSAEDNGDDDDEAGQQVKQEADRNSMDAHHSNCAKGPLLFIDEQENEEEDSEEDEHISTTHRRQGMDSSFDYEDDDDDDDNDDDDDDEMESVSGCAESDKCGHCHHPHQLPRNALEVLKMPLIDYLCALNHGCSVGELQALFLSKGAHGRMVTHLQKRCLLRTVHLRPTERNITLHAHNFSARSASLTFACGGYLNLTVRQYFFAKHGVRLRHPSLPTLVEFGGGMHASYYPLECIQVHVAVTAPEDAASTTSTTTTTTTASPTACVRLTN

SEQ ID NO: 144522 - protein, 829 aa, Heterodera glycines
MKGVWLLPNESIDQLGERVSAMVRCAYPGLTEQLYDEYSAMHFIRALPNPELATILEMTRKPGATFDEFIAQAARAEAIQNAARNTWRMTKLSSHGTSQNQRRHVVCYNCGRVGHTSRNCYSQSTQQTHQDNPSSNFQPSESFRNQNSHFQQNDEPPKRENLFIGAVNLEHRSEIEQFFGKTTNLSEKGRFWEESPAVGKILAAKVSVFGRKLDAMLDGGSQISLISAKFFLEIMDKVSQKDIVTRSESRIIDINGKEVKSFGIVALPIQRGPLEAKIRVFVAQSTFGYDLLFGTNAMDQLGFKMLDAVNCRIVDFSPASKPENSPLITFKTFVCHGNTSTNREGQKKGNKHRSDPKNDTGTKKGKVVEKKSNRNAVDNKRSPLFNKTFVPQLKTKEIPIKNSENFGKSAANKQPLNSVQMKVGVPNEKAMKLGLCDRHPDCRSQSPFHRGENDAKLGQRVFYRREKHRKEPDRGMLGDGRRHRLNSPPPIGCRMDSKGRGRLFSEARVACFVTSHARLYLYDWLEEVRRVGGRSLYCDTDSVLYVKQRGAEGVREGNALGDMKRELPGRRIIDFFAAGPKNYGFQHVDACTGGDLKAERKVRSFELNYAADQQLQYERMRQLVINHFGSGQQHQQQQQQQQRGHAADAADGSDGQEERTISVPCQRFVRNRQADIFTRRSTRVYRPVYTKGRVLRRGAAECVDEVPPQSIRTRPFGWSCCAGGGASPDSTVMNEEEEEPMQMAPSAADQEEDQWREHVWPNDIGDDEDDDDEPGPERKRARVEQCVAPPPSPPQSPLREPDAEPEPVAGCSTWDQTTRHTKHICRNNF

SEQ ID NO: 144523 - protein, 105 aa, Heterodera glycines
MQRIGFIGLGNMGGHMARNLLSRGAQLVVYDVDQSKLETIQSERGPSALKIAKNPAEVASDCIEIVTMLPTSSHVRSREICPFAGQSAPIPTPFGRAGRTEPAEA

SEQ ID NO: 144524 - protein, 43 aa, Heterodera glycines
QSRLNKKTSLKPPYSAITPTKSNLNIKFPVMIYLMNSDGWLIN

SEQ ID NO: 144525 - protein, 659 aa, Heterodera glycines
CDFSEDLCTDGEVCLPDGLFGQCYSDDESALVRPLVLDRPINGVQSELLRAELTRLAELGLDWPDARAQCVLAYFKLAVAFRLDYDTEFCTVRNPENIWALIQRVQNALLAEAEIERAEEEDEAESLLVTDPRDEAGDGGAAAGQGQAQFQTAEDDGGEAVEVIPIVVLDGGQGEDEDGKDRMAYEMYGKAEREVPKKTGSKNETKAEKAMDKRTTDALSATEEVELDQFVHNLLDGRPAAERQMGALSERQLSRLARFIRQLQNVVQNETVNEAQEEQLQEEAPPPLLAEAEAAQPTEEDAVDHVLLLKKDSEQFNNADMGLANTVHKIVKGGIQRVEGNRVYLKVAKEQLTEEELYKLIGYLDKKIAQPNNLYFDEFLYENGQLSFRISRLGVLQPNKDKKDGNADAALENASGVAQAVYKRRKDIQTLAGIRVDETGIGSGVDVVPVERSQRDWLFVPIMAVSAMTIFTLLVVLAANLVRMRRHRQEGPILAPCRDGGGKAGGSVCDDLCPADEVPGIALNTQALPRGLRKLSAPTGADQQLDIGTGHVLLAFLKEHMEKPGEVSKEWESVKDYANAAGEATVARRAENAAKNVDATVLPYDDSLVTLHGFNSTETLIDVSSSVAEHSPAYYNASKIFDANPEPTYIVAQAKQQNT

SEQ ID NO: 144526 - protein, 87 aa, Heterodera glycines
GCDFSEDLCTDGEVCLPDGLFGQCYSDDESALVRPLVLDRPINGVQSELLRAELTRLAELGLDWPDARAQCVLAYFKLAVAFRLDYD

SEQ ID NO: 144527 - protein, 26 aa, Heterodera glycines
MSTKLLYLVLNDAWRITNFAILGLIF

SEQ ID NO: 144528 - protein, 147 aa, Heterodera glycines
MTTKSAAATIDHLRYLFTRHGIPETLVSDNGTQFASTEFAKFMANNGIIHLFSAPYNPMSNGQTTPNDSLSESKSPAEMLLGRKPRTTLDLLKPPPPRPTERDEKMERNFNRRFGTRTQNFGPHEKVWARHRLSQNWKAEPFLKAPE

SEQ ID NO: 144529 - protein, 106 aa, Heterodera glycines
KDHLIGTLYQKMQKPIIVNIIAFANLGTGIKLNSLTITECEFKYNPRKFNAAVIKCTTPIKATALLWESGKMICLGTKSLIDCENAIKKFIEIIKGLGCPGASYTG

SEQ ID NO: 144530 - protein, 72 aa, Heterodera glycines
ELRNVHPLGKSPVLQDGELVLAESGAILDYLADRYDTQRQLSPSPMPAEGAERIAYRYWLHYAEGSAMPPLL

SEQ ID NO: 144531 - protein, 53 aa, Heterodera glycines
ISPFALFAFFGRFPFRFSHFAFWARNAIFTPLRIGLNSHKIFQNFTYKLANFQ

SEQ ID NO: 144532 - protein, 143 aa, Heterodera glycines
MTPIDFEKDDDSNHHVDFVTSASNLRAENYDIEKADRMKTKQIAGKIIPALATTTALVSGLVCIELYKTIEADGRRSTAQIEHIKNAFINLATPFIAFSEPGKAQKKKYLDIDFTLWDRFEVDGPMTLGQLIDWVEVVIASTV

SEQ ID NO: 144533 - protein, 167 aa, Heterodera glycines
MKLIFSVFLFCSSSIFISLEKHEKTKKIQLNFTEIGDFIEALKQQTQHKNSMEIMAKNGREIVKEITENFQNSAQKDIQNLLDEILDKVWNTNGLIAEKCFGKMGQQKVKANEGIANGNAIEEEMSGELARHELSRMGSKVIKDTMFNYYQENLLAKSKVYKWWIRY

SEQ ID NO: 144534 - protein, 85 aa, Heterodera glycines
MYCVHGNSADSTPQQYAYPNGINSTGTVTKGAGDGTVNIDSLRVCQQWKDQGKLVNQVVEIANVSHEGILHTRQFYDVIDSILIA

SEQ ID NO: 144535 - protein, 39 aa, Heterodera glycines
MAREAKVRTKSRSDELEIIREAPLNKKLLGLPDSLSNCF

SEQ ID NO: 144536 - protein, 26 aa, Heterodera glycines
MKVHGNQMAMDLASGDQGSAGPKMEN

SEQ ID NO: 144537 - protein, 157 aa, Heterodera glycines
MYVDGHGSNFPSNLASCGAIPSPYSGTFSLKAWVAYALAISDPFDLQKCILYMMSLSYDSASGAYRNRTGMNVTFTARRPFGLTCPMTCLLTDSNQSCNPNENSTSTDVYFGALISHLAQFGYVKGCNLFGAPYDWRLAPQLSADNLIIIFEEYKCS

SEQ ID NO: 144538 - protein, 72 aa, Heterodera glycines
IRFAIFFGLINQWHFRHTFTNYPNALFCHLKMFSSKLRPIQKPISSTHLHLFADDSSFICGNCFGKVIKRNI

SEQ ID NO: 144539 - protein, 40 aa, Heterodera glycines
MRTLPYFIIFITSREKLLAKMAELSLYIILLLLKKKIKNV

SEQ ID NO: 144540 - protein, 15 aa, Heterodera glycines
MAGAKEISRKAIVYV

SEQ ID NO: 144541 - protein, 68 aa, Heterodera glycines
MVPFELVNEWTNEKLTLAKANENELDKSWIMKRCKIIGETAAVNWEDGNWDNNCNNVFFWLEGDTNCI

SEQ ID NO: 144542 - protein, 35 aa, Heterodera glycines; identical to SEQ ID NO: 140871

SEQ ID NO: 144543 - protein, 76 aa, Heterodera glycines; identical to SEQ ID NO: 126706

SEQ ID NO: 144544 - protein, 87 aa, Heterodera glycines
AGSIVAAPGQTPRLIAAGNPGMAVGGMGDLLTGIIASLRAQGLAAFDAAAAGALLHALAGDAAAADGARGLLPTDLLAPLRRLANPD

SEQ ID NO: 144545 - protein, 40 aa, Heterodera glycines
RRHAYWRHKMRDGVPNSAGMEKRMCAVGFVPEFPVFSSIS

SEQ ID NO: 144546 - protein, 46 aa, Heterodera glycines
LHVIAEKIRDQFPNVDRLIAKRKPSLSKRLTESKNLEIYLICNFNQ

SEQ ID NO: 144547 - protein, 103 aa, Heterodera glycines
MPVQASPLAALKRHQPQTVWPVAGAFADCTAQNTVHVDAFLFDDDDVDQLAADGILRRHFCTKCRSTDVEQFNFISHSLTIDEVCACAGVGFQNPMHFLIEKL

SEQ ID NO: 144548 - protein, 21 aa, Heterodera glycines
GLGEARLCTRSRSRRRSPIFI

SEQ ID NO: 144549 - protein, 45 aa, Heterodera glycines; identical to SEQ ID NO: 124527

SEQ ID NO: 144550 - protein, 95 aa, Heterodera glycines; identical to SEQ ID NO: 125597

SEQ ID NO: 144551 - protein, 92 aa, Heterodera glycines
MTPNGGKRMRLGGAGRPVQRPDIDNALAEWVTERQKNQQPVSRSIIQRRAAELFMDTGTKASVGWLQKFLRRHDFVLRNKTSTDDCQKPSSS

SEQ ID NO: 144552 - protein, 30 aa, Heterodera glycines
MACCAKMARKIHFFEVNRDCHALQDHIKII

SEQ ID NO: 144553 - protein, 85 aa, Heterodera glycines
VAKWIGTGRKEDKEGQTEKIYFDKNFVLLERPPGHPGPGHFKFVAHFAYSLPFECPLPSGCETSYESGSAHIRYFARAILETEQR

SEQ ID NO: 144554 - protein, 116 aa, Heterodera glycines
STGYREAIPEGFGLPINLGASVRGDCPENKKIDFFKCPFGVLKQLWGAKIQRRIKVQTIGKLFRKDSEGFGLPINLGASVRGDCPENKKIDFFKCPLGYSNNYGEQKSNAELKYRL

SEQ ID NO: 144555 - protein, 122 aa, Heterodera glycines
MFVVAQIAPLTLALLLITLLMASDRCAVALTAGLGNGVNVQPSYYNSGKVSLGLSQLKTLATKVKTVRIEVEPFIPISLAKQWISEAAKNGFSIIVTYHKATVLGSNDAKISASLLNCSVIY

SEQ ID NO: 144556 - protein, 104 aa, Heterodera glycines
NGLSKNRNYAQKASQSILALPIPSTIAFIHPIMSAKIIRVPKIACDLSLAKNGVSKNRNYAQKASQTNLALPIPSTIAFIHPIMSAKIIRVPKIACDLSLEKMV

SEQ ID NO: 144557 - protein, 72 aa, Heterodera glycines
IIFIQKIFFWVFGAVPLNRCAQIYGETESFGNSFPIVCTLILRWSFAPHKCLSTPNGHLKKSIFLFSGQSPR

SEQ ID NO: 144558 - protein, 87 aa, Heterodera glycines
FLPGGTQFFTLTTPALFFFNYFLHLITQRSRLIRSSPNFAGKLLRTLQMLINFLRIFCLEEHSSSHLPHQHYFFLIIFFILSPNVLD

SEQ ID NO: 144559 - protein, 168 aa, Heterodera glycines
MAKNEIINHRTQKREEKQREDKKENRNDMEDVREENIFTFEGLFEEADDETFVGDKRESGAANGPKPEIAGEGKDMPEMAGDTTDRPEITGEEKYRPGMEVETVYLLSLARENETLNVKCDWPFRSKASQCATFVSGLSGKGRAIGGGHSAGQKGSVPVVSRSSQQEL

SEQ ID NO: 144560 - protein, 68 aa, Heterodera glycines
MDAEARDEMRRQTTDGWERMQKTTAEEEGGGGYIQLTLFPYMIPTVQIVLLYLTVCTVFVARLSFKRP

SEQ ID NO: 144561 - protein, 33 aa, Heterodera glycines
MGDKNKNTIKLAISVICTGLLTALLLVIIWLLT

SEQ ID NO: 144562 - protein, 129 aa, Heterodera glycines
MWLMAIFAFWLNLFHIVLLTWSDYPREHYNQAMVELALRVQQETGVTAVKFTSFTWAICAVKIRRYVGNTFAQGQQENATGGICATTSLRKQKMREYNNEITRALIVQECKRRSRRKRRTIEQKGNHFN

SEQ ID NO: 144563 - protein, 49 aa, Heterodera glycines
MTTKEKKWKRNSQLPEKGPNDQNLSEREREVPNPNKGCHGEWTNCANAK

SEQ ID NO: 144564 - protein, 42 aa, Heterodera glycines
SCPPSISICNRTKKDFRSVLTRPNSSNKKRQSFGTQSAEIAL

SEQ ID NO: 144565 - protein, 82 aa, Heterodera glycines
MIYLFPFSFKGNLSRIILPHLNFDLLGIEFYVKFPTNLLVTIAFSSNAPFLYITDHQKAFRSQFKRIFGKNESKHLIVAFAN

SEQ ID NO: 144566 - protein, 172 aa, Heterodera glycines
MYEMKVQAQKKKNPKVVFRDSFNLMPCALGQLVPAYGLDVEEKPFFPHMVNRPDNYGRQIYPTPDDYLAQGMMPEKRRQFDQWYEQHRQAPFLLDEALASYCKNDVDILTAALVAFRREFFEITKRQAVNETDDQESNAGIDVLRECMTIASACMKHFRSNHLPAAAIREQR

SEQ ID NO: 144567 - protein, 110 aa, Heterodera glycines
MNRRWICNDVWMDILPSFDHAQLGLKIALLSPRFDALVDTHFDGKSELTTWKWIRICKDEAQPPKAKVSVPVGANFVQQSPWEPMDANFVDFPLPDLPLPNKLRIRFMIE

SEQ ID NO: 144568 - protein, 185 aa, Heterodera glycines
MCNLMLNNAHHLDQLCRRISPTLLTDLDKLNWIYSGRLFPDVCAADGSNASGARQVLYKWLHTPTKDGTPKKLYCRETIGFPNNQWVHNFKEEFPRATTSASYTINFNLYLVKMRIWPFELVNERTNERMTLIKEPDRGAQLGDWLLNRCPLAMADQQQQQQQKVENSDAKLNSVYFRLRGDCIG

SEQ ID NO: 144569 - protein, 339 aa, Heterodera glycines
FICADCWLLVFDFLAPSQLGLGIALISRRFDFYVDEHFKTRKWMLNKQLLITWDIEENGTKKMQIIDADRKETLPIPQKPLPNKVIGFSGRIQIIYIDQNVLTFLGHFHRFFATSAMDLDIVIENGRILEFVLHNIWPMFRDSIRRLFLNAIAFRCLRQLAPSMLTDCPSLCAVVFNDGIVSEFPIDDSAMASDVQVLAKWLFTPHPDGVPKWLKCSVNSSVEQWSSTMEQFKSVDYSPLFMSFLSLFKAFSNASSPVTFCIFLTLSSTLIDFVMPFDLINEVTGEQLTLEHHDTNHCWLTRCPIGWDEIKWDNVWEEVSAARPKQIIIWIKDDGFDEG

SEQ ID NO: 144570 - protein, 16 aa, Heterodera glycines
EAIPEGFGLPINLGAS

SEQ ID NO: 144571 - protein, 36 aa, Heterodera glycines
KPNFFGLFKKELKIFKNFIHLPFDRKSIREPYLTFN

SEQ ID NO: 144572 - protein, 22 aa, Heterodera glycines
MILDHTHPYALFFVILRSVVLL

SEQ ID NO: 144573 - protein, 82 aa, Heterodera glycines
MRRKKGQKNEKGQITKRNKVNPKQLLTRKRTPRENGHAKTYPSHAKTSPRENGHAKMATRKRPRENDPDRSSACEAAQNEKK

SEQ ID NO: 144574 - protein, 105 aa, Heterodera glycines
MSDLLSQKRAALKRAQEELAEAERTNRRPTPAPAGRPLSLAAICPSPSKNPPSPIAMPRKQHRTICGPYSIDNLLASPLIKRLPPNGQSAESAKLLRKRNECLKG

SEQ ID NO: 144575 - protein, 196 aa, Heterodera glycines
MPNGEGPRNAHKFDFGFKEHQRIGITNADKFCLFYALVASKFYLEVHRNIFNRFMNNIMRQRDAAIELLHNCGIDINEYSYGVEQLPNVQKYWDEIYPGKYRVVAFEKSADPRKSIRVLWKGQMGREKVVPIFLENGHWNGLKNYACFFNRGKKFCVECECFYDQDVKHTFDCRARCYYCKQSARRAVSNGECSED

SEQ ID NO: 144576 - protein, 113 aa, Heterodera glycines
AFPSASSPVNFIVTIRFPPPFADSVVPFVLTNELTREQLALKRTDNSHRFLLVRCPIVRDESKWTKWEEEAIGWRFYDQWNQIDIQIYNEDKVGDGLLDANPGPSDQQTEVNE

SEQ ID NO: 144577 - protein, 64 aa, Heterodera glycines
SHILANAQEQIQHLEFSLVTGGKGMERELASHRLDDNVATELKLVLAAGLYPQFGVVDPTNNFR

SEQ ID NO: 144578 - protein, 48 aa, Heterodera glycines
FRRRLSAPPDLHLPLFLQVFCRKTAKIGSFLVKKCSCYPAVEKKLLVK

SEQ ID NO: 144579 - protein, 54 aa, Heterodera glycines
MFSIVGKKVFNTTSCNFLSKAFYAHMSKDEIMWHWPAQKFDQHFIDYLNKPDID

SEQ ID NO: 144580 - protein, 79 aa, Heterodera glycines
NPEISNWRILLQDWNSKFFPGQDPAGLILQILHLKSAGSCAGLRILGNFKKFCINKKVFQSIKKYSNIFLNQKMMKMKH

SEQ ID NO: 144581 - protein, 76 aa, Heterodera glycines
MIYLYNVSKIVKVNHPSAAGGNRRPAVHPQGRAKTSRFWASLKKSRNVKEICTKPQKYLPKYVNKNRNFCSKKAFV

SEQ ID NO: 144582 - protein, 88 aa, Heterodera glycines
MPKQNEIVLKYSFLDLTWFLDIEAVFYALSKTKKCLVVKTIFHISLHNFVSSARIETGIRPLERAARALQEGMERKNSYFWDFFRNQN

SEQ ID NO: 144583 - protein, 44 aa, Heterodera glycines
IQISDLSCAINIEIKGSIYHRSFNELIHPNSFVVTVPTSDAHFG

SEQ ID NO: 144584 - protein, 191 aa, Heterodera glycines
MASQQPQQSVTNYSLQFRINAQYMNEQFRDSVSAFRDFMLEDVRKWLMRVTGVSLDDRLALTGSRYSSGDCLLPHDDKLEGRAFAFVLYLTPGWEESDGGQLCLFDSDPAKNYPGEIVKRIQPRENTFSLFPVQHNSWHSVSEVLSEQKQRLSLNGWFHYAPGTANVAQTGPNCAVEEPICRVEPSMNITA

SEQ ID NO: 144585 - protein, 21 aa, Heterodera glycines
MRTRPIWQVKQRLLTSQKKGF

SEQ ID NO: 144586 - protein, 195 aa, Heterodera glycines
MAFPPLPFFFLFPLALVPLQRTAAVHPPLFNRIVPTSERTVNLTLTRDFGEAKAAASKNELKGNDESANNSNLTASPVEAKIHRLKELRNEMRALTAMIKEERRRSGMAGAQTKLRRLENIQANPKTFGTGTDQSRRKCAPKSVGQLKMKLKSIISPFVFRRQTISKMAQKSAKQNSLGYATIGPIGGRNAQDKG

SEQ ID NO: 144587 - protein, 37 aa, Heterodera glycines
NDALHRRMITLGFLSVNVFRIYDDDISKLFEWILINW

SEQ ID NO: 144588 - protein, 66 aa, Heterodera glycines
MDKFAKKKKLYNEVSALYATSDQMIVGEEPAPAQAGAAAEDAANKSAKRAALAAQKRQLALDRVYS

SEQ ID NO: 144589 - protein, 89 aa, Heterodera glycines
MHFSTIRSATFPTSGLLSLEMFDDYDKMLRAMSEAIKWLILHLPKDEFMSRNKRFNLFAIAEDSGEILTVLKQLSQFEYKFRKVFTLFH

SEQ ID NO: 144590 - protein, 88 aa, Heterodera glycines
ASPVNCEVNDGSVFSCADGRQCFPIARKCDGNYDCRDLSDEKDSCATNHTVGDRFRVPLVYGAISPLVFSKNRRCVPHKFRCDYYDDC

SEQ ID NO: 144591 - protein, 110 aa, Heterodera glycines
MKFSIILLLSLAFCALIIDAYPSGNGKDLEADNEKTEVKEEKMEKREAEVEEGKKEKKAAEEEVGKKEKRGSGGGTWGNGGRGNGGGGHGGGGHGGGHGGGNDSSGGGDD

SEQ ID NO: 144592 - protein, 84 aa, Heterodera glycines
MDDQSLDHSAGDLKAQYRRLKKESAEQDERISQLYEKKLKQEKQLAEQDERLARLRSNSEFQVEEKGSECTNNGAMCQKWSQFM

SEQ ID NO: 144593 - protein, 134 aa, Heterodera glycines
MKRARQSEKLGAFPEIEFAVNTMGVTVYCPRHLQTPRFVPWDQPGRCSSCRSGTVELDYIIQPEGVTIFSNRLKTDGENFVPFDAIVDFADRAKFRIRARNKVFTLPLRHPEVHAAGPSLEEAVKGQKEMTQMP

SEQ ID NO: 144594 - protein, 73 aa, Heterodera glycines
NNPRRDGKSEFTFDYSWVIHQNKNKNNGKMDKCLWHLRHFLLFFYGFFQARACGVDLRVSQRQSEHLISCPYA

SEQ ID NO: 144595 - protein, 178 aa, Heterodera glycines
MDELKKEKFSPQNGDDVSIIGDNNNNNITQTLLDLQPGPSKRGRKPRLDKIHEEIASAVKKAKAMEIEGVDESPKKQPKNVFDYPSIFWKLGRPKYGVFTFMCDECRGENFRQGKSSFKLINQNGEQQQRLVFAQSFCQDCAKLNFDCTDLIMKHKKKDESATTTMAKSFRWTKDAEK

SEQ ID NO: 144596 - protein, 178 aa, Heterodera glycines
MDELKKEKFSPQNGDDVSIIGDNSNNSITQTLLDLQPGPSKRGRKPRLDKIHEEMASAVKKAKAMEIEGVDESPKKQPKNVFDYPSIFWKLGRPKYGVFTFMCDECRGENFRQGKSSFKLINQNGEQQQRLVFAQSFCQDCAKLNFDCTDLIMKHKKKDESATTTMAKSFRWTKDEEK

SEQ ID NO: 144597 - protein, 181 aa, Heterodera glycines
MANKLILLPYEHYKGLVAARETKNDDADDIAERTNLGFVKRQVTAAVQKRKGNVSERNAMYNQHLRRYLKMRKEHKERPVRVQLSNGAQLLNKTVETGVQVRPGPDEPKDKSVMVTDEDEDEEIEVPKFLTPTSQTQGSNRSPRTNKKAAKQQKLIEKKDHLLAIIMSDPQRFGANENVSH

SEQ ID NO: 144598 - protein, 190 aa, Heterodera glycines
MARAHLAALKWLALSWPCTPPTPMGGYRNPVKKKDGRGKKKNFFAVGANVIASLGDEPWRAGRVISRKEGTYDVQFLDGTTGEFPAKGVQPYKPDEDENLNFLLDGFGLKRASSVDLSGSTAAMADEIKRKMIFEKLPTVDTRHKNADLRMRMMDGGPALFKGEMLGIINEKFSKISKSLVKNKLIFDLI

SEQ ID NO: 144599 - protein, 167 aa, Heterodera glycines
SVGTSSSFERSIYESADNESASSSSFDHCGQNANGETEESAIMDKISTKIDHLDNDWEDFANWKKSGGIKVEMVENKQIENKSCKEQIWIKEEVSEFDQMVENDQNAKENEKIKSANDENENGAKENKKFNRNKKIVVQNIIRKCEWAECELKFENDNKLYDHLKTV

SEQ ID NO: 144600 - protein, 318 aa, Heterodera glycines
MVTMATDFCNRLPTEGENVSSGYLHCVQFLLYHHMQKLVWRLENKWGIISDQNNDKNLEAKNHLLQIYTEKKMIAWEQMVKIYGKELKDLTEVNELIRRKFEFCLIIEGETQLKCNAIGAENAHLFLKNFHKIVFEPEYERNWSKKAELIGTNIFNSLRKELRKNEQLKQNKGNEDQKEKAKIMAKNWKLAETSMRVRVQVLVNTAERKCRTLPKKPFRQIQKLGRNLSKRLERSWSSKNREINQNESGGDKFDELTLESENYTKNPFRNGERKSINRTTRRENENTTKNPLRNFQEFGRSISKRLERSWSFKNNEEN

SEQ ID NO: 144601 - protein, 73 aa, Heterodera glycines
MDKSFDEFLFQCAGQFIEAVAEEQFSYKLFVNLNTMQLDTEMDFPPSMKDEIMVSKNVGKNARGKWFMMRSIS

SEQ ID NO: 144602 - protein, 155 aa, Heterodera glycines
MGSQRKHSAERKLYKAQTMRRRRRKRTDDNEIFGGQKTLGELMSEERQLRKSEFTDTIVAIRCLQEEDETSSSEQQQTKTLGELFDEDHFEAPEIVMEKIERKMEKIRQKIAQESLGKRLKDYEMFIRAFYIALAFELFERMHGEEGAMTTNWHF

SEQ ID NO: 144603 - protein, 121 aa, Heterodera glycines
MKLNLDQFTMSYDGQCDLTNDLNDCFVASDGIDFDAQVEKVSLFGKETSEMSTLEKAAESLFKKLNRWSYKFGQRGKRHRNILKRYFSGKMKDILGVIPEMMTDKVSPFEVIWSSQDISTP

SEQ ID NO: 144604 - protein, 153 aa, Heterodera glycines
MSRFLTRLEAPGYHSIVDYPMSFSTINDKIDNNMYLNLDQFKSDICLVSDNAMLYNNTGSVYFLAAQKLKVLAKYYFSEKYLLFLVYSLPFGKALTEEQLGIRLRRKEEQTPRQLKEKSGRERPLPFLRQSLAFIRVKIMKLILVTVKKLRKY

SEQ ID NO: 144605 - protein, 64 aa, Heterodera glycines
MNDKIDWLGLRGLASFSWLFLQSPGLNPPAFQSLGLNPPSFQSLGLNSPAFQSLALNPFSSALL

SEQ ID NO: 144606 - protein, 95 aa, Heterodera glycines; identical to SEQ ID NO: 124528

SEQ ID NO: 144607 - protein, 95 aa, Heterodera glycines; identical to SEQ ID NO: 124528

SEQ ID NO: 144608 - protein, 74 aa, Heterodera glycines
MGSPPAENKEQVEELQKAIENTREFQAMKKDKQIKEIKEDKDVRLAWFGPQMWDFITKKEEGTTSEAAAQKGDL

SEQ ID NO: 144609 - protein, 118 aa, Heterodera glycines
PKNGYLFFLIFLPQTWYQQLPSLVWPYQTILRYLKRKQKKFLTKKWLSLFSHFFTANLVPTVAFSCLALSNNLTIFETQTKKILDQKIAISFFSFFYRKLATNSCLLLSGPIKQSYDI

SEQ ID NO: 144610 - protein, 16 aa, Heterodera glycines
EAIPEGFGLPINLGAS

SEQ ID NO: 144611 - protein, 21 aa, Heterodera glycines
MHLSPFCATVPFLFFFEIKMK

SEQ ID NO: 144612 - protein, 54 aa, Heterodera glycines
GWGGYGYGYPYGFYGKRQAGFGPSGNAGTFGDGGEGNANGGGEGRGGPSSPNNF

SEQ ID NO: 144613 - protein, 956 aa, Heterodera glycines
KEIKILQELKGLQHENLVSELKGLQHENLVSLLRCVETSTHVYLVMEYCNHGDLAEYLFSRQSLNELTIQHFFTQIARALEALNRKAIVHRDLKPQNILLCNPRHPQNILLCNPRHPLVPLPSQLVVKLADFGFARSLPEGIMAGTLCGSPMYMAPEVIMSHNYGAKADLWSIGTIIYQCLTGKAPFVAQTPQALAQTPQALRNYYERHAELKPNIPDFCSALLSDLLMSLLKKNPLDRIEFNSFFNHPFFTTELPTSNVSPSFFNHPFFTTELPTSNVSPSRHLVRRPSAEVQAQPTQNRPKFSGSPTQTQNGPNCKSPQPVRRNAHAPGVLRRQVPPPSHSPQNAAAMNESTDFTFLPQNAAAMNESTDFTFLPPLQETHPVKQPVKQVQVHSSIPRQTNIAKAVPVPNKRVQVHSSIPRQTNIAKAVPVPNKRHAFAKMEERRNASKKSAVNRATDEFRGAATAREGNGCIWGREEAQSPSVEEIELPVGIEIRQNLFKACLARFIVYDQQKTSGAAASRSSLPVSGRLRRNTTAIDEPSTSNAPSQTTDGNDKFPMMAIPKSATFVMTSIGGQQQKEAEKTAKELDNIRFQNTTPPPTVSGLNAHNQKKIEFKVINETNGTERHSNFSNSSITDNSEMIIQNADTNDKAPSTTDRSPDNFLFDAPDPPPELEQETLLGAGHKQTLAKLRFVLDLIEAIASVAENKTNPMAIAMEGNKRKSFTRTAPTSSDAYRFTRTAPTSSDAYRRAEQLVLYVRALHVLSSALVMAQKQINASILHPSSAVQNVLNQLNASILHPSSAVQNVLNQLNEKYHYCLARSQELASLGIPGQDPCLARSQELASLGIPGQDPQAMVVSAERIMYQHAIDLCQSAALDELFGNPHLCPKRYQTAYMMLHTLLYTVQNEQDKTVLLKYKVQNEQDKTVLLKYKNAVEKRLRILERQRQGLCASVIN

SEQ ID NO: 144614 - protein, 149 aa, Heterodera glycines
MNVDHLQRTSHRKLADQIADVISRDRSRSASRASLEGISREVRHKFAHYTPKKKEQQQTRQNDSVDPEDALLILGLVGTQKAYRRLKGTIRLINAKLDVFPPLKKVLDIKRRICGPLQYAPIETNVGVGFVSLMLGQLWRRVFCLPKTI

SEQ ID NO: 144615 - protein, 87 aa, Heterodera glycines
MSKEADNFNSFDKADALMDVPESSRKKKLVKLGAKVLETRKEARKVLPEEQYVQNLEKLIVRDYFPELPKMKVNKSDEIGNSKFNWV

SEQ ID NO: 144616 - protein, 150 aa, Heterodera glycines
MQLSQALRLVNERTLVSFVQQLPLVAQLFGDGRIVHFRIVRRHSLSLPARPHHKGTDKWAHFSMINSSEIKNQLFYCKIQEKTNKNYKFCYFIGLFTCSSASSLQRWLTTAAVAGALSGSLITFSIAKLYSCAATDRRQWNLFLMLCNEW

SEQ ID NO: 144617 - protein, 80 aa, Heterodera glycines; identical to SEQ ID NO: 134858

SEQ ID NO: 144618 - protein, 83 aa, Heterodera glycines
MLKRRQPAPLNPQRVIRENRKTPKMVFKFCQRVQARLLQGFLGRFAASNGRFAPVTTVIRRGKMVIRRGTTMIRRGTKVIEEV

SEQ ID NO: 144619 - protein, 16 aa, Heterodera glycines
MEKACKIWRDYIDSSF

SEQ ID NO: 144620 - protein, 89 aa, Heterodera glycines
FLSKKIFFWVFGAVPLNRCAQIYGETESFGNSFPIACTLILRWIFAPHNCLSTPNGHLKKSIFLFSGQSPRADAPRFMGRPNPSGIASL

SEQ ID NO: 144621 - protein, 35 aa, Heterodera glycines
MFGIFFGLPKLHRTWVLLFSFKSPPNFFYSLTRPY

SEQ ID NO: 144622 - protein, 228 aa, Heterodera glycines
LPTLASPVLLDRHSFLTRLIVQEIHADLRHAGVDWTLTEFLSRYWMPQARRTIRGILRGCPSCRRMTAPPFARPTMPPLPSMRFKPANPFEFVGLDFAGPTPSRLSDGSLTKAYLVIITCFVTRAVYLEATTDLSAPSFINILRQFFSRRGRPRRILSDNATFVQTSKALDILTCPPSETDVVTFAARRGIQWDFIPAYHMGSLYEQLIGLVKSCIKRTIGRRILDYR

SEQ ID NO: 144623 - protein, 26 aa, Heterodera glycines
MINCRSEFRLRLKQNKDQVYCNDHAY

SEQ ID NO: 144624 - protein, 136 aa, Heterodera glycines
MRAERQMQMQQQQVVGPFNSINLWSDLRLFECADKADEADEADEVNRALEEVELDWREKVDEKRRRKMEKDFRRMEKERAEQQRKAGDVQPEQLSGAEKRKLYGPQFDAAKFRADVEAEKPCDGEPLQVAEYYLFR

SEQ ID NO: 144625 - protein, 38 aa, Heterodera glycines
MLMNGFETGLLSINGAVFCTYPDLIYTSGSVGLCKNFL

SEQ ID NO: 144626 - protein, 247 aa, Heterodera glycines
AQADFALNLLREVSTDDRSCIVSPFSAAVTLSMVYAGAKEKTGEEMGQLLANVPLKNASPKVMRDNNHPLPLLITLPHQSPVFNPLPIPNCPLGAPESEVHKYFGALLKSITSGTNSSNTLETANKVYVKKGIKVKDAFKEQIEGNYGGQFETVEFEDGKGTAEKINKFVKEATHKKIRDLVTPDNFDENTRLVLINALYFKGTWADKFDSKFTKKAKFHVDAKNFKELEMMHLEAYFIYYKNAQVV

SEQ ID NO: 144627 - protein, 42 aa, Heterodera glycines
MARKDFRFPTFLGSEFRLPKFLMKSRKFFKFFFQKTSKFVQF

SEQ ID NO: 144628 - protein, 89 aa, Heterodera glycines
MSHLDTCIVCSFCFTIICKSWAKRVSFFFLMRFVTRNSFVLCAIYFSGSGQSVSGQSVSGQSVSEGQSVSNGQSVSNGQSVSNGQSVSG

SEQ ID NO: 144629 - protein, 33 aa, Heterodera glycines
INFQMFLNKSGVFKKIAYELVTGLDCPLTDCPL

SEQ ID NO: 144630 - protein, 118 aa, Heterodera glycines
MPTLRSKALSLFCRAAKNAKQGQKTNDGWPLCKIGTYFQYRNKVWDVQRIDYAQFYLFGPDVIECRHCAYRRWTNSPGKPTNALRKSFEEVPYECAETIPYSHPGERRWAQQNGGRRK

SEQ ID NO: 144631 - protein, 65 aa, Heterodera glycines
MKRTETILRVFKTFAMDGNALEGGAAGLKMGSRRQKRSAVAAIAIIAFLGFIFVFAQLSAATGSY

SEQ ID NO: 144632 - protein, 102 aa, Heterodera glycines
MSLNLIELLYFITKNIEELAIEVKKSKDKIRKFLDEKLPKGATLIDEKQYGEIKKMRKELADAIDKVAEEEGKDGNTKSSTVNLPFPKNSGIYWTINAHNFY

SEQ ID NO: 144633 - protein, 51 aa, Heterodera glycines
MVEDQQQEGMNKWKRMGDQQNKKENFMHCTEQYAAPELIENLSDGKKIYDE

SEQ ID NO: 144634 - protein, 77 aa, Heterodera glycines
MGQKIEKKPLSLDEKSVLDEQTQLGNLREEFDQKRKNFEELTKSLTSQDEKGRINEMNKLWKNLNQQIVDRGNLLSS

SEQ ID NO: 144635 - protein, 104 aa, Heterodera glycines
NFTCQVEVNPGQIGGPGAATAVSKCHRKMLDKVEIMHGKKLPIMAKAVVPENRPGPGIARTLYQAWKMFGDPNAIILYVNQPDLFPVCHFEQLQFVMFQVEKLA

SEQ ID NO: 144636 - protein, 18 aa, Heterodera glycines
YREAIPEGFGLPINLGAS

SEQ ID NO: 144637 - protein, 36 aa, Heterodera glycines
MIGRAVRNRPFIFEGIFKFILYPRKMAISFFEKFYT

SEQ ID NO: 144638 - protein, 65 aa, Heterodera glycines
RIPPLRLRAVQASGGVERHRFGFGWHHPTQRHAERHLFEAVVSAKCALCRNETTFQNWTWRMTAH

SEQ ID NO: 144639 - protein, 327 aa, Heterodera glycines
MTMMMLREEEKPPRGMVEEAKSKFEEKHLPKKKPPNGTRLMKTLAVQQVLFALLHQTALYCLNVSSPHRFFSSHPSKMYRSPSSSSSLSFSAPNPFLSSADQQLISDRTFDPTRVYRNEIAGGKMSETYESLVRNIFRPEQSRQESSVFLPPSFAPPSAHLSQQQFGKHRQNTVNGQQSTLGGVPSPSTNGRERPRISAAAMKRIEDRLGEDVLDDSLPKAITNFCSFGQMMTSCGSRRWMRFTPSWALTRPPPLLRSRRRPSIPRFPPLTLRPPPQTRRDVVAPRPASCPNIPSTCPSVPRNMPNWPTRRLRHNHRTAAQHWARIA

SEQ ID NO: 144640 - protein, 147 aa, Heterodera glycines
MTIINTTVLCQSNTNPASRELKIFVDPPGVHYTVSAVVITVNRDGTMPNMPRHIFHGTKTWTQLDGREMFILEKTKLDGRRGVVFEYGPENATEEEMVWVLRYRIIKIKFERKIVKASKFIYYRQRDIERHAERQREGNRVIAKRKK

SEQ ID NO: 144641 - protein, 94 aa, Heterodera glycines
SPSAEVWIVSAPLDATPQETWERLQTNTHNLSTNSKFNIPDLKVGTLDQLVGLSDDLAKLDAATEQTTRKLVQYFSEVLEEERNKLLENLVVSG

SEQ ID NO: 144642 - protein, 73 aa, Heterodera glycines
MSQNRDENSQPPVLDGPYPLAQERNEFVEDEAPVLLEMLDRLSQGGICQAMGLFSFALADCLATFHTFAILFD

SEQ ID NO: 144643 - protein, 404 aa, Heterodera glycines
KCTIKAALNGEKGILLDFYVVEKGSFDLLGLAWIRAFEQAYSKPVATTLKFDQPTHSVQIKGTECTPTQLKAELQAQFPNVLSDSLGFPVFCGSRPVPLGVQSEVDAELDRMIELGFLQKVDYSKWAAPIVAVRKANGKVRQCFDFSTGLNNALEPHHHPLPRPDELFAKLSGAKFFSQIDFKDAYLQICVDEQSRQLLGRIQQFGFHVQMEKCKFLVKEIKFLGQIVSADGIRPDPCRTLALQQMPPPHDITTLRSFLCAINYYGKYIKNIHQLRGPLDELLKKGIKQAQLFIDHRLSSVQRTFCHPPVTSKSHTEGAALGSPRHSSHKNLARSFVYWPSMDTDIETIVRGCSQCQQAAKQSPKQPLQPWPTTTSVFERIHIDLEFNQAHFFTSVPPAIKRSS

SEQ ID NO: 144644 - protein, 92 aa, Heterodera glycines
MRTKPKLSLLTKCEQRLKMLKDTKFKGFESIRDRYFEKSLDLDLDSMLGLDLDFLDKNPGKSRSRKNPGSSRPGSRPGPGFFETHLKNQKKV

SEQ ID NO: 144645 - protein, 24 aa, Heterodera glycines
GTLSTAVRQRSSKIYSMPQILWAG

SEQ ID NO: 144646 - protein, 97 aa, Heterodera glycines
MSNGSEEDEHNDDIMPNDALRNRQKYGKKRANFGRELSDEEKIKIVKKFMLIRERIDNGNFSKKITAEQIVNKLGVTMHQIKHWKFKYGLSKSQIPN

SEQ ID NO: 144647 - protein, 139 aa, Heterodera glycines
MPAETAAANNHFVLMGQPKGEGSPFLVPNPMYTLNLKQQHFGGVPLPVHHQHQMSLSVGSAESAADHHQCRPRQQSLYCSNSSRQSEPPPQQSAAEQQQQQQHLYAAQQQQMRTSPMEVKSQLLAQLANELGSPTEQRN

SEQ ID NO: 144648 - protein, 41 aa, Heterodera glycines
PQQHSAVCSVCATRFSHILGCERKLGEAFDKEMIVQSTATG

SEQ ID NO: 144649 - protein, 93 aa, Heterodera glycines
TSAKLNSGGFLSKAPDAYVEIIVDSKEDQAKKTSVKKKTNSPHWDESFTLNVTENSVIEFKIFCKAKVFDDSLLASKSVKMSNWLRKESNNGK

SEQ ID NO: 144650 - protein, 110 aa, Heterodera glycines
KLLEFYRKERDMFTEGLEKASVNVEEFKFPTENVEQIFDGLFALEITGKQMKANYETTKEAQREHQKQSNAEAMRAQNLVKAKPTKCQSGGLTRVSKPGFLVCPMPFHPE

SEQ ID NO: 144651 - protein, 200 aa, Heterodera glycines
AIDVIVVEQPDGSLASTPFHVRFGKYGVFNYENKYVDIEINGEEIDLKMKLGENGVAFFLANDEEGIGETKNAEGKEFLRESQNKKWSEDTQQNNRPSAIDLENQRKCSFASSSSSTSSCTSQPQHNECPPTATTTAERKQSDAAKAVKNVQSVLSQPQGVRPTEPSATAFFVVHLFVPKESLFARFGQFVVAFVEHLRL

SEQ ID NO: 144652 - protein, 159 aa, Heterodera glycines
MPVKFDQRLLFPLCEKCAKHITAKYPNGLKDNIYSCPHYNPNDRAFVSTCTHLELNAALEAGYTVRKVFHVLQYDQWSNNVFKSYVSEMMAIKIHATGFPSWCESEEEKSEYIEECWMKFAIKLDKEKMKSEPGKRYIAKLCLNSLWGRFSMRNLLSKA

SEQ ID NO: 144653 - protein, 34 aa, Heterodera glycines
MNSLLCEKLNAAAATMADIYGALLLHAIFDGSKF

SEQ ID NO: 144654 - protein, 192 aa, Heterodera glycines
  unsure (1)..(192): unsure at all Xaa locations
VNPINKCFWLFVFYRQKSAKLSISIGTSAGTSLPSASDSLSSAASPAEFVPSSPIASPSPADCCQVCTNGTTSFCSSLRPASQSKHSSTHNSLIEVILXTLQKANRMVAHCLFSSINFLRHFRRILAFRLSEKLSKSCIRLDKFAQHFCGHNGNRKRLLSRGKGVGGPPIRHFDGEKNEPKLTEDKLSSGTA

SEQ ID NO: 144655 - protein, 165 aa, Heterodera glycines
MTSKNNSPRNGSQCHGCQQQTNVNGTKCDNKRILVVQTTGDANGGNANGGGVATVLTNTTAMPTTAAAKEQPQPKEQTEQQMAQSGIVRWIKLKTDPNYKPPPEEVVALTRETFDEFVGDKPLVLVEFYAPWWHKIQVPKINNCLKVRPLQAIGTRIRRSSKTFE

SEQ ID NO: 144656 - protein, 222 aa, Heterodera glycines
VQNCEPCQLAAKAPIKTDLHSWPKPTGPWQRIHIDFAGPFFAKFLIVVDSFSKYPEVFEMANSTASATIEKLRYLFTRHGIPETIVSDNGTQFSSSEFAKFVAANGITHLFSAPYNPMSNGQVERFVDTFKRAFRKLKGEGKPNKEIIDIFLITYRTTPNDSLPDLKCPAELLLGRRPRTTIDLLRPPPHQPFETYMRHLSCHFLHIFPPIIISLSHLHHWF

SEQ ID NO: 144657 - protein, 46 aa, Heterodera glycines
LKLHPKDFSLILDDEYLVAVAVHRYSSATPQELTFTREIIRRTTAI

SEQ ID NO: 144658 - protein, 87 aa, Heterodera glycines
MENADEKPPPVTSSGGTNAAAATAALAMQKIVQQHAATIANQVQQQQQQQTGTEYKQTNAYFGRQIMEKYHVYLPEKWVLPCFLLVL

SEQ ID NO: 144659 - protein, 48 aa, Heterodera glycines
FFCPWAEKLVFFTLKRNAQFVYIKKEERIIILIIYKQNDKLRKARGSF

SEQ ID NO: 144660 - protein, 76 aa, Heterodera glycines
MEKEQQKHTAERQQPNMQGSFEVLDSGKAFSPSMTPNPKNCRTSVAQIRHKAMAQIQVEPAEVPMPSCQIKMMDKR

SEQ ID NO: 144661 - protein, 165 aa, Heterodera glycines
MFGPTATTWTNSAAALGSNSSSHAWGNKKNIPNDSYYTELANTQKENKKFGIKENVIRFIFKNSEENSKENFKKIIEYLTDKAMEKNEKGWVIEKISYDLYCEALSDPLIIPPRDLVQNNADVVLESFYHIQQSFSEIDLLNEEISLIITTYAAPNGSGIKKNSV

SEQ ID NO: 144662 - protein, 296 aa, Heterodera glycines
VERVCALPVLTDGMIHKKLLSLDGFERLKNRPRNLLKLMSHKVPIKNPSPKLIDEIIAFFNQPKSFYFSHNIAFFNQPKSFYFSHNFDITKTLQQRYAIGLSSTSDNRFFWSSTSDNRFFWNKNLLNEMFVNDGSPKWITPLIYGFIEHKSIVFDVDIRAHMTLISRRSVKRAGVRYLRRGIDEDGDVANFVETEFIVCVFGHCLSFVQCRGSVPVFWCRGSVPVFWSQKGFQLKPPLVIDRPLDISLPIFASHINRLISNYGTPLVLVNLVDQSGKEASLGEVYCRESQDRRQQA

SEQ ID NO: 144663 - protein, 92 aa, Heterodera glycines; identical to SEQ ID NO: 131128
  unsure (1)..(92): unsure at all Xaa locations

SEQ ID NO: 144664 - protein, 334 aa, Heterodera glycines
PFRGRTSTLIFPVARVQPRTSKGITDLLLLNFVRLNTENPSKKLCPQKQANYLVGRVSLVIGINQTNRHELRTAMHHHPPNHEKAINLFPVLSQIKPQAPFPVLSQIKPQAPLLNRKTFVSGKLPTRANKSNRKTFVSGKLPTRANKSRRIASWHRLRSELGRYLIAFEPLTFFLINEDILAKCFRCSPSCYGPRISPLTQYEWPRLSLLTIISVSKTNNRTEILFYYSIFLTAAIILCILRAGITAAAGTRLALSILVKGFKLYPFRPASEIGLVISRHYLLALRVAISQAPSPESNPYPPLPVISQAPSPESNPYPPLPVITMVVRYSTIES

SEQ ID NO: 144665 - protein, 143 aa, Heterodera glycines
MEILLEVILGSSDEEMTEVLEVYSEQYGGNLSEDIQKIGEKAQGKNSKGKNDTEEAKAVREILGDRLQNLKNRAAIKDTIKELGTICGHWKTLNNSSNERDEHLETDEDIENMYGLAKKILVNFEPDTADSAEVASVWSESVP

SEQ ID NO: 144666 - protein, 43 aa, Heterodera glycines
MLKGCLYVILVLIANCYVQLKIQLDRFMGSGQTPKKQGVFILN

SEQ ID NO: 144667 - protein, 783 aa, Heterodera glycines
SSGISVVEPNVPVRVVVFGLFLDRIALVAFTTDNCLNSGLFSKISVNELTTWFFFFSEFFLGLRGCIQKFGFYGVCRMLEMVSSSPPSISIDEMRTWIRATSDPPVHYMPEEIQVVLFFTLFLLSALFSGLNLGLMALSPQELTLILNSGSERERKYAKVILPVRKGSERERKYAKVILPVRKAGNMLLCTILIMNVIVNSAISILMMNVIVNSAISILMEDLTSGIVAFVLASLGIVVFGEIVPQSVCIKKGLQVGAKTIWKGLQVGAKTIWLTRFFMLITLPLAWPIGKLLDCFFMLITLPLAWPIGKLLDCILGEDLVGMDHEKLLEMLRMAHQHNEELAEDLKIAVGAMEIAEKIVREVMTPIEDVFDVFMLSDEAVLDSDCVADVVRRGYSRIPVFTNNDRNQITGLLFIKDLALLKPNERLTVSTICDFYARTLRFVTDDTPLQTMLEEFKEVETLNLKMELIFTIPRVNITWPLVGIITLEDIVEEILQSEIVDTIPRVNITWPLVGIITLEDIVEEILQSEIVDESDVVYDNKYRTKLQKGQKGKLRRITDSEDREGDKCKWLSESLAKVTAQWLSAMRPALFGDKAMDTKALHLLIRLNARKVGFSIPLQVNTKVPFSKFHLIRAGRPSDHFILLIEGNAVAHFPKNQMKFDVGAWECFGTEILDQMEDRPKNQMKFDVGAWECFGTEILDQMEDRWLTIIRWTKTSGKCTTKRQWPQMDFIFISDFDLLVRKDCRFIELTPSSYATASRLSTLLRAISLFILRVKHIRANVNR

SEQ ID NO: 144668 - protein, 159 aa, Heterodera glycines
MQKLSCLGDFNTQQQNQQHNNASVSSLMYNSNYHQQQQHQNSSGASSGVCSPASPFPPAGRTPMQSQQQQLRMNPQQQSNGGNEFTPLVRMGSGNGAVGQHPYSFRQQHGAKTIAVTCLLSPWDEQQQHEQPCQFGDVLQPRLDHFRVARVAAVHSFRQ

SEQ ID NO: 144669 - protein, 335 aa, Heterodera glycines
MTATNSSTARVAGASTSAPGGSSADTLASTIASVASGGGSFEFEKAIGTSPLPSSLPTAGDSSAALLTPTVGPAVGPSTSAQPQQLTSSPGVKRRKNQQITQTVTAIVNALEQPPIAVEQQQSLPAYGGGALSHPLQQQTSLGMQQHEQMTVPSQCRIHVQNPPQTHGDFPPTGTKIQVVHMQPPAAAISHHLQQQMSDNLSPQQQISVARPISTRLSTLQPDHNLNSSSSSALCDYHVANANNNDSINGVHQIGPPSIAELSSSAEMSHHSTPRVAAAPPYSPYHHQQQVAAAFVSPAPQNQHHFYGSTMPQQLSPSSAYKYNNQQQLQHHSYH

SEQ ID NO: 144670 - protein, 181 aa, Heterodera glycines
MQPNFHFLIVLILFGVSICTASSYTWKSEPNLANNVQTFAKFMDDLYVEYKKTVKMGQFNAKYTILRNPSTILLTNYSDKQKRTVFNLTFVKCVAEIAYFRVINKNANSNFSYQKFKIVPGLDAKDEFVGFLHFDQTLGQQIAEKFKDEIFSEKKQIPEEVVNQILQLAFSFAARVILSIV

SEQ ID NO: 144671 - protein, 223 aa, Heterodera glycines
MKLYSKRIGSKTVMTTDCSENPNYCYKWTSAGVKKDDGQRFVCAGCRKIKDRKDVPSDRKLPTRKVLENGSWASDGAKYPHFCEPIRKTEVLGVEERRKVQAELALGSRENIASAKVRIECIVEENYKLLPTQEKAEIRDSACGNAVATKKELQQEISKPLWLTYRGRIAHEESDHFQELFLLECTDVMALFSSPRQLALFKRTETIVCDGTFKMAPRGIYQV

SEQ ID NO: 144672 - protein, 150 aa, Heterodera glycines
MNTKSQEKPPAEIYTFLHDHFVSLASKQQSSSTWIWSQLFLFGWFLSNAQFGVKKKREINCAFVNFGRVLAKRLKFVHEKFNTFADGKEKECGGRDPHTTNYYDYKHHHAFISDNNTPAEGQGLGFISFGPDQAVFAWAQFLNCNFFIVN

SEQ ID NO: 144673 - protein, 184 aa, Heterodera glycines
MLMFEEPLWNYGQVIGIDANEAQDVVKFCEDLQQNVVSAALNSPIRKAMTVMKLTELEEFQYLNSIINSLRDEENMDELNIFAENYDKKLMIDKQQSLKELLAILMKIYADYSNASKREISKNAIRLTHSGNEILRFGQILYETLENLENLPEDRVKYDENEQLLTIPLLFVNHLLERLNEFIE

SEQ ID NO: 144674 - protein, 125 aa, Heterodera glycines
MIIRSPPLTRQRALNLRTFAQNQNAAVEEQQQQQQVEGVHGENEPLVNAPISPGLNRNLSLSAEENEHHFSEMEAAAANDDEIRRRLLHVSIQSNLPPRANGGGNNGAEQQQIRNANVGHEDFVE

SEQ ID NO: 144675 - protein, 74 aa, Heterodera glycines
MAKLAEGLEIGEQFSREWGRTDYEGGKDEEDEEDDEADNTSTTDSMNTIVEFGICEPSENGQNQWQSETMEKRK

SEQ ID NO: 144676 - protein, 139 aa, Heterodera glycines
MNKGKSIVMADSKKEGTTTVKIPHRYGAVSGMSGQNASPKASQIGSPKNSPKGTQIGSPRSISSPKSTQIGSPKGIQIGSPRKEKTKLSSAVGSSDFNVIDESKEAKKPSQFKPSPSRSQNKREQQRLNVTIGEAGRGN

SEQ ID NO: 144677 - protein, 126 aa, Heterodera glycines
MPSAFERMPRKRKECQGKGKSAKGEERVECLRERYQMGKKCANTEDKIYSEWDCPQALAVHNYAIQQEDELSLSKGDVVNILRKMTDGWFYGERTRDAQMGWFPSSYVQQVALFNSNPLKFIVFLI

SEQ ID NO: 144678 - protein, 165 aa, Heterodera glycines
MAERHTAHAYKAANLSCSVESRVPFTVFWLFEGKTIGGPLFYEWSVPRAITRLLPFWILEVIDFADCLTPVIKLRSEPPPHIVAIRNESVAIHGTAFLHCRTQSIEQAKITWLHNQSKAYTFGNNGTLRIFDTSIDDSGEYKSQARTSGGLSEAVGKLNVLQAPR

SEQ ID NO: 144679 - protein, 255 aa, Heterodera glycines
HVTTTPYHQQSNGMAEGAMRIMANIISQMVNEKGNNWDEILPHAIFSYNISIHSATKFSPFFIINLRQPKLPTDRLLKLPSPDELVSDISVYTRIQTEKAAKAWEIVRNEILKAQERNKEENDQIRKAHEREFEIGDLVLVKKEVLGHKFDQRWLGPMRCVGVEKEKKNVVLQSIDGSAKLRKVHQEKVKHFNGPAILPLRQSDEPLNWEKYVDDPNLEQEEIEEKENLEIGYGPNFVTLRDSEGMISDQDDLEE

SEQ ID NO: 144680 - protein, 162 aa, Heterodera glycines
MPKEGQSARKRLREGSPNKGELFTNNRWDEKMREIEEVNKNSKEDEAQVATKELQKVLRKMEGKEKSGNELEDEVGLPGNLREARCFKCGRSGHFARECRDGGDGNRGSRVWRNWGDARGRTGRGTWRNSDQNQADEGPSTSTSSAHLTDFGTFFNYIGGNQ

SEQ ID NO: 144681 - protein, 92 aa, Heterodera glycines; identical to SEQ ID NO: 124679

SEQ ID NO: 144682 - protein, 75 aa, Heterodera glycines
MVIRRGTMVIRRGTMVIRRGTMVIRRGTMVIRRGTTVIRRGTTVIRRGTMVIRRGTMVIRRGTMVIRRGTMVIRR

SEQ ID NO: 144683 - protein, 201 aa, Heterodera glycines
SAMALLPMALFLILSSQNANSVDHQRSHRMGRQRSFNEDTPTPSSDLQINVHPPELSVREGREASFECRARTTDNSFYPEVVRWTRVGGRLPDGVREGGGRLTIPQAQLQHAGQYACVAMHNGRTVEAHATLHVQSYGPQEGPQELQGDTKVAAGCMADERACGSNECVKLDYVCDGEPDCRDRSDELEGKGKGAKQKQSE

SEQ ID NO: 144684 - protein, 150 aa, Heterodera glycines
MALRKFLNQKKNQQVCFNDEVERHEFEQELSLDIIGEFIKVPFKDPRKGYSLSIRSASFLGVYDLVERIIAEDANCVNVPNKHGWTALMYAAQGGNVDICQLLLQHGARLDVKNGQGQDAYELAKNWGHKRVMDLIKAKTYLRQSNNGKK

SEQ ID NO: 144685 - protein, 56 aa, Heterodera glycines
LQYVDYMDELAKLVGCKPKLVGRIFTDPCLAKVLLFNGLVPYQFRLDGPHRWEGAR

SEQ ID NO: 144686 - protein, 34 aa, Heterodera glycines
MGRGGKSVNGKLTKHGHRRINKLIERKKQWTQNS

SEQ ID NO: 144687 - protein, 89 aa, Heterodera glycines
MTEGKAYYRDDEGDYDYGLKDDESDSECSIGYRPTIVSSNNPISLLNLRLKVIMGLKRSGKTSIRKVVFQKMSPNETLFVESTARVTNE

SEQ ID NO: 144688 - protein, 76 aa, Heterodera glycines
IADLGNSFRETRKFKNAIDELPIKSAQGNASKGESFSGQSNEDKVKIKITNSVGNKDVQLGRSRSTSIIGRFAKEN

SEQ ID NO: 144689 - protein, 46 aa, Heterodera glycines
MDKWGRINFYVFVVTLVFYKILWLRPLASQAHKFFVFFKYAQQFQN

SEQ ID NO: 144690 - protein, 47 aa, Heterodera glycines
FLNNEVPFPVNIRLLMTLFILISVQREFCHVTLSYAKFSNSVDKDGN

SEQ ID NO: 144691 - protein, 77 aa, Heterodera glycines
MPPQYKWMEFNASLAHPSDPVVFLVIFSFFLSLLFFIIMFKDIESDSASCGRIIIDLMVAAVPQTTENFKQLCAGAL

SEQ ID NO: 144692 - protein, 39 aa, Heterodera glycines
VRLGYSNNYGEQKSNAELKSDYREAISEGFGLPINLGAS

SEQ ID NO: 144693 - protein, 87 aa, Heterodera glycines
IIFIQKIFFWVFGAVPPNRCAQIYGETESFRNSFTIACTLILRWIFAPHNCLSTPNGHLKKSIYFCFRGSPPEPMRPDLWGDRILRE

SEQ ID NO: 144694 - protein, 156 aa, Heterodera glycines
MAFPCHGRISDQREGTFSMDIEKLSEFAREEVNSRRLSKHFYTKGLPWKIWAQIRTKKNSTEKYLGVFLWCIAQIIGGTNQFKFEIFYFMIKMKIGVANQTIDNSTVGQDKEHWSQIFSSSAGFSLFYFIFHLHYPSTGWGFENFISFAVNANSNK

SEQ ID NO: 144695 - protein, 115 aa, Heterodera glycines
MATAKLKYWVLQNEAQMEPYCERSVAAQQKLGYSTKDSEEMVAIPMAFRANLKMAAIQMAFRANLKMAAIQMAFRANLMGVHRIGRDLALAPPLTPRFAFVRRRSLFVFAYLQIE

SEQ ID NO: 144696 - protein, 102 aa, Heterodera glycines
MKPKKSWTYAAVAHTGAGQIRAIVDSAVARVTTNSSVAMLAINNMTGSAKFGRRFNAHKKKCAALIKRQQSAPSTELKSELRQAFMDDIMEGSFLMDYIRDH

SEQ ID NO: 144697 - protein, 121 aa, Heterodera glycines
MSPTRELALQTWKEANKFARNLGLHVVCVYGGVGISEQIAELKKGAEVIVCTPGKVTNLRRVTYLVMDEADRMFDMGFEPQVMKIVNNIRPDRQTVLFSATFPKQMEALARKVLERPVEIQ

SEQ ID NO: 144698 - protein, 52 aa, Heterodera glycines
MCVGCYLAISTMEKSSQFHLNAPARLHFDFSITVHICSKILNFIVYNPADPV

SEQ ID NO: 144699 - protein, 86 aa, Heterodera glycines
KNRFIFVFGALQPNRCAQIYGETESFRNSFPIACTLILRWIFAPHKCLSTPNGHLKKSIFLFSGQSPRTDAPRFMGRPNPSGIASL

SEQ ID NO: 144700 - protein, 85 aa, Heterodera glycines
MCCDHRRSIWACNVDIVIANAAILFFELTQNLKDDQIRKALDVNVLGTINTIRSFLPAMEAAGHGHKVAISSIASYFGETMGMAY

SEQ ID NO: 144701 - protein, 51 aa, Heterodera glycines
MHHHPPNHEKAINLSILTVSGPALHHTSPGTGRLSFPGSSPPGRINPPADR

SEQ ID NO: 144702 - protein, 147 aa, Heterodera glycines; identical to SEQ ID NO: 141051

SEQ ID NO: 144703 - protein, 240 aa, Heterodera glycines
MSAKIIRVPKIACDLSLAKMVVPKIACDLSLEKNGLSKNRNYAQKASQTILTLPILPSTIAFIHPIMSAKIIRVPKIACDLSLAKNGLSKNRNYAQKASQTILTHPIPSTIAFIHPIMSAKIIRVPKIACDLSLAKNGLSKNRNYAQKASQTILAHPIPSTIAFIHPIMNAKIIRVPKIACDLSLAKNGVSKNRNYAQKASQTILTLPIPSTIAFIHPIMNAKIIRVPKIACDLSLAKNG

SEQ ID NO: 144704 - protein, 51 aa, Heterodera glycines
MPKKAFKGFPGSLITNPASISTYIEPGLEIEQKVENSKNFRIHFYVRICAE

SEQ ID NO: 144705 - protein, 86 aa, Heterodera glycines
CLSSLNLPAALDDVTKQEQCPESIREKSAKVKNNGGISAMSAKINELPSLYKRNDEILNEVEAVLKQMPSPHSLSDFTTYQRGKGK

SEQ ID NO: 144706 - protein, 100 aa, Heterodera glycines
MKKSYIQKIDKMLRSADGTNAMKGLCKLFDQQTIVELFRLLHIDPNLLGCPLPPQMRIVLIEAKSEEKNGSSSSNSETEKENGKAKNGTFDEMAQKMVDN

SEQ ID NO: 144707 - protein, 131 aa, Heterodera glycines
MPTPTHQHVALGGWKRERVRLRSQQNLNRLFVRPALSKEQLKEEYEARLRKRQQNPAPPAPPTQLPKTTNDQTPIVAPNQKEASEDMSKPPEVFDQTIIVCYEALKSLPPTDKISHQIQSLKEQYPHLFNK

SEQ ID NO: 144708 - protein, 99 aa, Heterodera glycines
MPTPTHQHVALGGWKRERVRLRSQQNLNRLFVRPALSKEQLKEEYEARLRKRQQNPAPPAPPTQLPKTTNDQTPIVAPNQKEASEDMSKPPEVFDQTII

SEQ ID NO: 144709 - protein, 98 aa, Heterodera glycines
MEENIEKFITKRLLEDIEKMKENAREMMENSETLKETCEKLKENGERLEEPKNWRNGERLDENGERLDEKGERLDEKAQIRRRNDETGQLTAGESPNL

SEQ ID NO: 144710 - protein, 122 aa, Heterodera glycines
MEHYQQKRPSNSPFVDILPKKPRQDLVINQILGVVQQGGGDTSPSKEAPKDYVQKLGSSVEHVAQFHYTKMKSRFSISDVPFYPERLLAGIIPHCIDSATKASRGRGNRATPPWMFDNQSSL

SEQ ID NO: 144711 - protein, 114 aa, Heterodera glycines
MERPLPLPQLIDHGGALFHTSAIDKSIIGEKKTQRIYPILDDLFYTNTNEMDNEKSNSALAQTMSCSSTTASDSHSSENSTSFIASSIGLEIAPSPSNPFSSYCEPFDGYLKFD

SEQ ID NO: 144712 - protein, 386 aa, Heterodera glycines
MLSTRNGSSVQCGPSTKKWDFRSIGNNFTEEMENYKLLDYQTTTCQKFGFTKNITEFRVNPDGGRPDEAMREAIDDMIKVAFKTTEEKMKRKVRMFGVAITGAGLAFPVWVPYRAYPQNNADVIMQEINKLGQSGDGDENKKMLLLSEPVTMKITCVTMPSGEGPRNVHKFDFGLKEHQRIGIVNTDKFCLFYALASSMNYLIMDKYSFIRFMKNLARQKEAAVELLRNCGIDINEYSYGVEQLPNVQKYWDEIYPGKYRVVAFEKSADPRKSIRVLWKGPMGRENVVPIFLENGHWDGLKNYVCFFNRGRKFCVECECFYDQDVYHTMDCRARCYYCNRVGGMPCQKESGVKIECPKCHRYFYNWECYNYHQGHQTCKLWRRCVI

SEQ ID NO: 144713 - protein, 19 aa, Heterodera glycines
NRTLTDDLMGKNPRRREFN

SEQ ID NO: 144714 - protein, 93 aa, Heterodera glycines
MRQSSATPYINVQLLQTLNILFENIRNETSLYFLLSNNTVNLIITHTFDFANEEIIAYFISFLKTLSFKLNPKTVNFFFNESKNGLNDLLLKH

SEQ ID NO: 144715 - protein, 46 aa, Heterodera glycines
QESPKNDQNEAMSNKLEDINSLMTRLTLHNRSLAKLFALNQTGSLF

SEQ ID NO: 144716 - protein, 101 aa, Heterodera glycines
MGAVVCLASFLALFSVFPQNLFGYSCKSLSGKEVDWFVAYKLPDLGSDGDGTAFLYSDANTAAWRLSDKNVEDKSSAIGLTVSQLFTAKKKKASRTVSTAF

SEQ ID NO: 144717 - protein, 117 aa, Heterodera glycines
MPNYHSNILTVRRSRNEALPPLPSYEDATKLPALIPAAQENTDEQRHGIEERAGRETEEQRQRNGERAGRETGEQRQRNEERAGREAEEQTGGEDEAVTEAAAGQAEEGAIGRPIPR

SEQ ID NO: 144718 - protein, 73 aa, Heterodera glycines
MSLIVLQQQQRKKSLCVVPRGAGGGDYTTSIAKAAVLSSPMFQQTKQQQQAGASGANATAQQQQQQLRPSTKS

SEQ ID NO: 144719 - protein, 53 aa, Heterodera glycines
MYKQLVNVEQQGDPMEKEQKKVELAPTVAEIGILMLKKQNRKIKMRDTFNYAD

SEQ ID NO: 144720 - protein, 602 aa, Heterodera glycines
VSIGRLLANFSIFNVSRLPTFWPPRHLEAPRNCRKQVSFLAQRKIWYKKRIRHTILDRPLADRVLKMVCLLSLISVCMHTPRTLQLIPHFTWVLLVLDANVVAIFTWEVVLKANNMGYFRHQNAYFRDRWCQFDFFLLLFHWISLLLHIYQLFVHSELFAQFGLVYYDWLGVIRCVRPLVIIRLIRLMLTFQVPRQRIQQLLKRSSTQVQNVTVFFLFFMALYAIMGIQLFGRMDYHCVMPGTDPKNVTINDLAIPDTMCSKEGQGGYECPDNMECMKLVLSAKSEGFYGMFDHFGASVFTVYLAASEEGWVYASVFTVYLAASEEGWVYVMYDCLDSLPSHLAFFYFVTLIFFLAWLVKNVFIAVITETFAEIRNVFIAVITETFAEIRVQFSESWKKEEMTTIEDDFKKKIESTDDGWRLIRLDTEDKLNPRIKQFQTVKWFSFKIFCLSSLSSIFQILRSTGFQCAIISLVLANAAINASFVYRHDETDAKRRNLYYLIECVFTVLFDVECLVKLFCYGRQFFKRNIFKFELILAIGGTFNIQRHLYNQNYFTYFQVFRLFRLIKASFRLFRLIKASPMLEDFVYKVKYKIKLNIIYFI

SEQ ID NO: 144721 - protein, 51 aa, Heterodera glycines
MYFIFVMFFTLSRLFWPAKKYCIDGLVNECLQIPIPQLSNAFLASTQCPTV

SEQ ID NO: 144722 - protein, 125 aa, Heterodera glycines
MPCGENNISHFTPYHVKKLFEFLQFCFHNFRKLFGIIMPKQNEIVLKYSFLDLTWFLDIEAVFYAISKTKKCLVVKTIFHISLHNIVSSARIETGIRPLERAARALQERMERKNSYFWDFFRNQN

SEQ ID NO: 144723 - protein, 63 aa, Heterodera glycines
MDAEKQQINAGETDFGKMAYSEGNRRTKEKHAFIELSSLVPLPPPIRDQLDKTATLRSTIAFL

SEQ ID NO: 144724 - protein, 314 aa, Heterodera glycines
MKLFSMFLLLTLAFAAFAERSSSSSSSSESSESSEECSSEEGNPGTEPETTTVVDSDENCNATSDSPNDESSPVPSSDSPNDESSSVPSSDSPNDESSPVPSSDSPNDESSPVPSSDSPNDESSSVPSSDSPNDESSSVPSSDSPNDESSPVPSSDSPNDESSSVPSSDSPNDESSPVPSTADPSSPQYTLPVTEEDKNAAVQCHNKFRSELALGNSFNKTGGNKMPSASNMHKMEWDDNLAKFAAEWANKCSISHSWNGWAGENLAMNGGTFTNKDAFEYACGRWWGELAALGFPKDLILTGENFGGIGHWTQ

SEQ ID NO: 144725 - protein, 160 aa, Heterodera glycines
MAQAMTHHLDCRRMAQTMTRHLDCLTMAQTMNHHLDCPTMAQAMTHHLDCPTMAQEMTRHLDCPTMAQMAQEMTRHLDCPTMAQEMTHHLDYLMSRCNFRPNQQQLSSPVLYRDCLLLKNIPPMIRTIRCCYCCCSQQKRRMPKSGEETLRIVSFLIIIN

SEQ ID NO: 144726 - protein, 152 aa, Heterodera glycines
MKLFSMFLLLTLAFAAFAESSSSSSSESSESSEECSSEEGNPGTEPETTTVVDSDENCNATSDSPNDESSPVPSSDSPNDESSPVPSVPSSDSPNDESSPVPSSDSPNDESSPVPSSDSPNDDSSSVPSSNSPNDESSSVPSSDSPNDESSP

SEQ ID NO: 144727 - protein, 124 aa, Heterodera glycines
IHPIMNAKIIRVPKIACDLRLEKNGVSKNRNYAQKASQPILAHPIPSTIAFIHPIMSAKIIRVPKIACDLSLEKNGLSKNRNYAQKASQTILALPIPSTIAFIHPIMSAKIIRVPKIACDLSLE

SEQ ID NO: 144728 - protein, 146 aa, Heterodera glycines
NGLSKNRNYAQKASQSILALPIPSTIAFIHPIMSAKIIRVPKIACDLSLAKNGVSKNRNYAQKASQTILTLPIPSTIAFIHPIMSAKIIRVPKIACDLSLAKNGVSKNRNYAQKAPQTILALPIPSTIAFIHPIMNAKIIRVPKIA

SEQ ID NO: 144729 - protein, 92 aa, Heterodera glycines; identical to SEQ ID NO: 124679

SEQ ID NO: 144730 - protein, 55 aa, Heterodera glycines
MTLMPTAETTTANLGTPTEQNQPQEQQQKAGTAAGTTTTAAATDAASAAVVMEEQ

SEQ ID NO: 144731 - protein, 101 aa, Heterodera glycines
VQQQNPQQKDTPAALSVRSQLPIKPGPKPKKPQMEKKQRKEKPPPPPPKQKDLKITCSPCGEIGHMKTNRHCPLYGKEEDLASKTVGEICQAIILLVDINV

SEQ ID NO: 144732 - protein, 157 aa, Heterodera glycines
MNFFFCIYNLVNYWYFKLYYIPCANGQTNAQPKKPFAVVSVCRHRSHKWPPPPQQKTANKGRPRKDAATDAPNIGRPNGRQQSDKTDEKAMDNERMPKAEACSQNLQPIDRLGMGGHQQVSRTKFHKIGIAFVISMEFLRIGNLKMNAVHVYGESKE

SEQ ID NO: 144733 - protein, 102 aa, Heterodera glycines
MSDKSLYLNAQFNVDSNVALPVADNTNPAGPANPNPAGPANPNPAGPANPNPAGPANPNPAGPANPNPAGPANPNPAGALNLNGAAFDDTLSLYGEERLDRH

SEQ ID NO: 144734 - protein, 31 aa, Heterodera glycines
MDVWADIAKADFMDERFSRVITANKAYNLFQ

SEQ ID NO: 144735 - protein, 31 aa, Heterodera glycines
MASDGQNDNGCKMIQADQQNNNKITVTQNVM

SEQ ID NO: 144736 - protein, 155 aa, Heterodera glycines
MSKKNFQETSKEIRRSKNTKNYFKNSSNLGKCFEEVESHTNENKKFGIKEHVTTFYFKCPENEDPEQMFKKILKKLMTDAMNREAEPGWKIEKISVDLYCSALSDPVIIPARPFQHSNPDIVFNEFMHRQQSFGEVNLLDQRISIIIATYSFPVK

SEQ ID NO: 144737 - protein, 659 aa, Heterodera glycines
PNSPPPKFSTQDGNVSSKKFKCGRRKLYFRDFWMLSQNKLADLPKTLGLKTAAKLYFPHKYNKNENFGKRLPNLPSLGDYCPDNMKEEEAVKLEAWHNENFQTEFELGEQLKTYCENDVEILMESILKTEFELGEQLKTYCENDVEILMESILKFRQLFLGITGDLDVMKDSVTIAGVVIKIFRAKFLKDRHIPIMPEGGYEKAENQSKIAVKYFEWLAQKGVKVRHACNGGEVEFGAEGGLCDWGREKNNVSVLKGCAFHGCPRCFLPSPNGRTMNVSVLKGCAFHGCPRCFLPSPNGRTMEENQSRTEIRMEILREKCKNFSIGEVWVCDVREELKKNKEMCDVREELKKNKEMKKFFESVPDKGPINPRDAYAGGRTMPFCLYAKATEEIEISMFDIISLYPFVNYGNTPYPVGVPKIVVTPYPVGVPKIVVSRNFNVNWTAPDDVPYDGLLKVKVIPPKNLLYPLLPVHIDEMLLFPNCTTFTSIELRKALELGYRIVGFYRAYHFEQDSQLFKGYVRMFLKIKVEASGWPAEVKSEDEKRAFIEMYKAKYDIGLDYDKIGFNPGLRMIAKLGLNSLWGKFSMGLNSLWGKFSMRNTLSSTEIVGKCTGKRRSSSGSIKCRNIVLSLWTTSAARLLYEYMAVYRKGGVLLYCDTG

SEQ ID NO: 144738 - protein, 232 aa, Heterodera glycines
MTERTWPTSTNNNVEKQMTKSRNCRRSSMRPSIREGRNETESVSRIAFKGAGGERAEAERPTYFHIFRGEVQLATETVARADYEPKGRGDRFPDKKHVEAELLRRDGTIRAEGTVNRSDYANDGKRGEGHEISWVNGREASAPLKLRQWPLLAKHMETPMYNKHKDENEVGKAVVTVGKEVVKVADKIIDHIPLLAQARAIARVAANRILGNKEKWECGPDHEIKVVDELLH

SEQ ID NO: 144739 - protein, 28 aa, Heterodera glycines
MTPFFPAAGLQGNQILRIKLKTLSVKLF

SEQ ID NO: 144740 - protein, 64 aa, Heterodera glycines
MPTKDGTEFEFFNVRKGIICPLKNLRFFFAIAILGMFVSCDQSVSQLGTTQPTEDKLSLMGQFG

SEQ ID NO: 144741 - protein, 141 aa, Heterodera glycines
MSTSSKLTVINTIATMRQFVREHRKQNANLCVALVPTMGALHQGHLRLAHQARQWNNDKKEQNGTTDQCASPPLVIVSIFVNPLQFGANEDYERYPRTLEADLAKLEGVVDCAFVPNAVEMFGEEKQPLNHKDEEDGIGIK

SEQ ID NO: 144742 - protein, 89 aa, Heterodera glycines
MMFFLSAFAIILQCQIAVGQLVAPLLLHAQTGPDFIVHPHVEPEHLDDDDIDDAPVPHSARLGLLEHFLGGQRTLELIEQEHQFHEREK

SEQ ID NO: 144743 - protein, 33 aa, Heterodera glycines
MCYADAQDNGDCCAKKGVPSENPMGWRDTCSKA

SEQ ID NO: 144744 - protein, 61 aa, Heterodera glycines
MFCFNTMRAIILLTFVVIQCQIVQMSGGRCYNPSDKFHGCCQQIGMTSTMTNLQSLIRDGN

SEQ ID NO: 144745 - protein, 162 aa, Heterodera glycines
YNIERFLRLKIRVQTLDFHDRINFLKIRSIGSISLCLNDQLLSVLNRTCCHTTTLGDITVEKGTAVVCDLLSLHHDKAVWGEDADEFRPERWLEAGHQLPPFYAFGGGPRICIGMRFAMIEEKLALVRILRKYSIVQTADTEVKLAFSGQSVITPKSVTVGL

SEQ ID NO: 144746 - protein, 16 aa, Heterodera glycines
EAIPEGFGLPINLGAS

SEQ ID NO: 144747 - protein, 85 aa, Heterodera glycines
MTEWHLLELALLEKGQNQKWEKIEQLKEKWKEAFDHHLINREEKSRIFKQIVEKLKVMVTFSIDCSTTLYESLKMAKIVSTSRIL

SEQ ID NO: 144748 - protein, 46 aa, Heterodera glycines
MPTKNGLSNYLIGSGLKLNFKLASGFEPTRPKPFLTIRAIRLPSLR

SEQ ID NO: 144749 - protein, 44 aa, Heterodera glycines; identical to SEQ ID NO: 126591

SEQ ID NO: 144750 - protein, 148 aa, Heterodera glycines
GAWPFLVRGAICLVYSDNERDSSLLNSWLIASGHNFLEGFSVFSRTKLSNNRSVMPLDVRGCTRATLAKSACLPSPKGVGKPVKICRDWDRTLQLLSVNEEFLVGASHQLALNTSLPFVHTARRCPGLSHFEKFGDGIRASVGMQTGT

SEQ ID NO: 144751 - protein, 24 aa, Heterodera glycines
MEKACKIWRDYIDFSALELLVLAS

SEQ ID NO: 144752 - protein, 60 aa, Heterodera glycines
FISIFSESALKHTKLYLQVSLGTLMLFLSKREMNKIFNSFLNRPKSLGLTLKSETDQKRT

SEQ ID NO: 144753 - protein, 21 aa, Heterodera glycines
LGLYSSGHFEANHSREPNDRG

SEQ ID NO: 144754 - protein, 97 aa, Heterodera glycines
MGAEAQFHRKGRELGRGKFGVVKKALFTDQQGNETAVAIKQLHCVKSNKEQVTEFMNDARIMRKLRQNVVQFYGIAVEREPVMIIMESVSGGSLKDF

SEQ ID NO: 144755 - protein, 88 aa, Heterodera glycines
MCGVLGYCAREVLPNGAMPFQFAGYRLPHHVPSPSRVETKRASQGTAPGLPAEVRHAARLGPESQQPILNGRGVRLDEANTEGGRRRQ

SEQ ID NO: 144756 - protein, 171 aa, Heterodera glycines
CTSSNHCCTSSITVVPLLITFVPLLITVVPLLITAVPLLITVVLLLITVVPLLITVVPLLITVVPLLITVVPLLITVVPLLITVVPLLITVVPLLITAVPLLITVVPLLITVVPLLITVVPLLITAVPLLITVVPLLITVVPLLITVVPLLITVVPLLITVVPLLITVYLF

SEQ ID NO: 144757 - protein, 113 aa, Heterodera glycines
VASCSGAAASSSTVGSMVVSHLQQQQQQHHAQAVQQQQQYVQHHQHHGTNADMTATAVVVQSPPPPPYSAGVVSVPSHQLPSGMSGTAAHAVAGGAVPIASNATAAMVQQTQQ

SEQ ID NO: 144758 - protein, 68 aa, Heterodera glycines; identical to SEQ ID NO: 127362

SEQ ID NO: 144759 - protein, 78 aa, Heterodera glycines
MLGITSRQSKCTKIIMSISDHEIVECCSGGVYQYGLKLRRLYAPADAEFEYVLKVRGMTLNYDVINNQGLRYDSSSRC

SEQ ID NO: 144760 - protein, 15 aa, Heterodera glycines
LKAIHCLPVLGTAKH

SEQ ID NO: 144761 - protein, 49 aa, Heterodera glycines
MAAEKYSTERIATLGESLRHAKGRATYYKQEDALETTQINYEAQFRGKH

SEQ ID NO: 144762 - protein, 227 aa, Heterodera glycines
MSSRAKRKPLSVSVSESTAGLEPSTSSPKSAASAATAPSRLPSSVASAEVSEGRGGDSPKGISGTDGRAALADFTFIKVLGKGSFGKVMLAERKGTDEVYAVKVLKKDVILQDDDVECTMCEKRILALAAKHPFLTALFCSFQTPDKLFFVMEYVNGGDLMFQIQRARKFEEPRARFYAAEDNILLDADGHCRLADFGMCKEGITKDSLTSTFCGTPDYIAPEAFFQ

SEQ ID NO: 144763 - protein, 52 aa, Heterodera glycines
MNDNSREEIEKTEKVFESMVQNMKRMIGKMIKVDDSDSTEIVQVKIKPIEAF

SEQ ID NO: 144764 - protein, 70 aa, Heterodera glycines
MVLFNGTAKIRVVEARDLQPTEWSKRFNQSDDPDSQLVDAYVNVDCDEYHVGKTVTRPKTKSPVWNEDYQ

SEQ ID NO: 144765 - protein, 45 aa, Heterodera glycines
MLGKPKMDEQGIEEEFKKRMEELNLEESEVKKMAGLSEALGEVIE

SEQ ID NO: 144766 - protein, 169 aa, Heterodera glycines
MAYVELSKDMAEYKLVENGIKAMALVEQTVYDLDTFGLRMEPQNILDLDRQYLERAERITRNDHLKRHFGLRKRMEEAIKKLNNDFDIIVQRKTSLINGKPKTLWEKLAELDGKADLNLFGTPSDFEGFDSEYIRKIEEIKTDAASLVDYKGLKMRSEMAKQRENTGRK

SEQ ID NO: 144767 - protein, 85 aa, Heterodera glycines
KNRFIFVFGAVPPNRCAQIYGETESFGNSFPIACTLILRWIFAPHNCLSTPNEHLKKSIYFCFRGSPPEPMRHRFMGRPNPSGIA

SEQ ID NO: 144768 - protein, 187 aa, Heterodera glycines
MVRKRTDISVPNNNVRISADLSSGPLSSKQKFLIDGPLVLIDTQFYKVESFPIKDKGISDSKWQKVYSLFKLWYPLSFREGQNEHTHSFHNIGEAFCAVLHLHALNLFGGLDLSKIGCITPYSAQAEKIQKLMAMGRDEGPRFEVSSVDAFQGQQREAIVMSLVRNNKMRDIGFLREHRRTNVSHSD

SEQ ID NO: 144769 - protein, 92 aa, Heterodera glycines
KANHLPSIFLERRRDELNPKTMDFEYVELVILTGIDGDVFACERACERDLRAYCEKRLGHPIATHVDELKGKIKISGADRTIAEQFVYDYET

SEQ ID NO: 144770 - protein, 60 aa, Heterodera glycines
LFFAFDPQRSRLIESSPNFAGKLLRTLQMLINFLRIFCLEEHSSSHLPHQYYFFLIIFCI

SEQ ID NO: 144771 - protein, 79 aa, Heterodera glycines
FAWEEHSSSHLPHQYYFYILFLHLITQRSRLIESSPNFAGKLLRTLQMLIYFLRIFCLEEHSSSHLPHQYYFFLIIFCI

SEQ ID NO: 144772 - protein, 43 aa, Heterodera glycines
MERNTDKTTGAKTIAKKCSGKASALAMCACPTRGSSLQWSPCP

SEQ ID NO: 144773 - protein, 516 aa, Heterodera glycines
ERLALADREKAQAGELGLHLLREKEQLELTHEVFAALCLLLLSQCLEFAQRVGLCQDGIGANTETIGIHSVKPTPCGGDRIGPRVGTQLNIFKSESERLAFELESFQLRVTELETEKRTMREEVSRGKRKGRKERKTPPFVKLKELKQREQFALNENGELEEENVSLQKQVSSLKSTQIEFESMKLQLKNLLEEVVILQTVADEANKLRSLAERQEAEALAAAQQEREQRLALKKEFEQLRNQGHLSTLNSLYLGIKGADRDIVKQLENSFISDNPIETFANGNAKGPKDLFSELNGDLEDRLNGAQAENERLKEAKQTQPRFLSKCFFRFSIEECDVSKLKDYMVLALERFDERMELKKEAKETEKREQRMREALREAILLAGRKDAHLTIARGMIVRLGQTLHTFFTELNGTEEGQQNQSERRHIANGLADRLNAVAQRIQPFENGMKRLGSPPPNGGGESPPPTDVSSFVSVETSESDSPRVLLPSPELCRPMLSQNFLKELEGIKIGADAQK

SEQ ID NO: 144774 - protein, 66 aa, Heterodera glycines
MAKLFAILVFSFLLLWCPYELLFAVSSDLSVGWTPLRLKIVLNVIFLLAMSSTVVSPIVYYHMSER

SEQ ID NO: 144775 - protein, 128 aa, Heterodera glycines
MSIQQKLALTQRLEELEMDRERQMQQLRERGATGDAGGHANAHQPQQSQQPKRTGPGGGQRSGGGATYHQPTTRARQRRLCTCDGRFARAATAFEAFFVKIMENERNARPTQCECLAIFVLGDTDTFG

SEQ ID NO: 144776 - protein, 93 aa, Heterodera glycines
FILHSKKSGFIVEHDFIMSTYLADRVIVFDGQPAIKATANAPQPLVNGMNRFLSQLNITFRRDNESHRPRINKLNSQLDVDQKTSQNYFYLDN

SEQ ID NO: 144777 - protein, 84 aa, Heterodera glycines
MLNLIDNEQSYGPKSLPTTFWDGQKKRTERKVTGRGKSGEERESSREGKREDRVEEDKKDGKEWAQRKQTKPSQAKVTNFKKFG

SEQ ID NO: 144778 - protein, 144 aa, Heterodera glycines
MHHHPPNHEKAINLSILTVSGPALQPYFPRNRKTFVSGKLPTRANKSAGGSLVGIVYGPFSGVEPLSSVTRHRHGSQIHYHRKLIRQTLERHVSGTRPCDQLSCSESTLDARRALGFVANKCTPLWGDWSFGACISSRITTVIQ

SEQ ID NO: 144779 - protein, 92 aa, Heterodera glycines; identical to SEQ ID NO: 131128
  unsure (1)..(92): unsure at all Xaa locations

SEQ ID NO: 144780 - protein, 88 aa, Heterodera glycines
MSYKILSITQLLIAVVLLVATCLAFHGPTIVEKPGFNAEKEVEKLYPAIMNNKMKMKIFNINLERDYSHHLLSQQQPRVDNIPNQIID

SEQ ID NO: 144781 - protein, 56 aa, Heterodera glycines
MWFVLCAFVIPSVFCALLGLYLCIYQTRVPPVRDESAHLLYAAKRQPPSPPPALMK

SEQ ID NO: 144782 - protein, 33 aa, Heterodera glycines
MEQQSFNSSTFATRYSTGGRCFSTIPSTTSKLA

SEQ ID NO: 144783 - protein, 97 aa, Heterodera glycines
EILDSCSLIENPSEAKKCRDGVTDAKVARLRKEGTEEMCVAEGFCGKGEMKELEKKMERMEKRIDDTKQKFEKGLSIIPPVDSNPVDSDTGIKMDNK

SEQ ID NO: 144784 - protein, 87 aa, Heterodera glycines
STGFESTGGIMLRPFSNFCFVSSILFSIRSIFFSNSFISPFPQNPSATHISSVPSFLSLATLASVTPSRHFFASEGFSISEQESRIS

SEQ ID NO: 144785 - protein, 104 aa, Heterodera glycines
MDPNNGFYDKSKDKVTLAIDVITDDEPKVEKFTLDQRKSTGTISMEIEKVSEFSREIFLSERKSKTVHIKGLPWKIWTKIEKNNESTGNEKCLGFYLWCDAPKE

SEQ ID NO: 144786 - protein, 38 aa, Heterodera glycines; identical to SEQ ID NO: 130624

SEQ ID NO: 144787 - protein, 113 aa, Heterodera glycines
CTKKGSEWEIGERIRCLHQAIEYEAKITYKWHNNGVTFYRIHYVGWNQKWDETVCETEAESRFRAWDSSPLPPGMFNVEMLCGKRFQKRRWEYRVRWEGFDETEDTWEPEYKL

SEQ ID NO: 144788 - protein, 17 aa, Heterodera glycines
MATEACSKSTLQYQLFF

SEQ ID NO: 144789 - protein, 83 aa, Heterodera glycines
MFNNIFFFFLIVAPFIAAYKPSCKCPENEQPGQLSCNGCEPSCDNRKPEVCTKMACECSCDCVPGLLRDKKTKKCVPKEKCPY

SEQ ID NO: 144790 - protein, 131 aa, Heterodera glycines
MFLKRRISEPSDEDEKQRTNQIPIDNNSCVDGIPLNIQSLRKTYVDREEPFLLEKDMLSCPFDQFSIWFGNAITQTDLKYEEVNGFALSTVSRLVYVFCINLTTPNSDQIITKVHFEQTAKYAIFISLTGI

SEQ ID NO: 144791 - protein, 149 aa, Heterodera glycines
MFVPQVPLNLVIKHNGQFLPIAPENLACREATNGSGFNCELSVNQMVVDDECRDVSIWARMDNDTSTLQLLGEQVKKKKKLKQFRENWIRDLSNCTKTDDHMNCVAELVIKPDQIGQLQRVPTAAISKMIKMPKSNLTEKNRRRLDEGN

SEQ ID NO: 144792 - protein, 75 aa, Heterodera glycines
RNQPHSHCLEDICRPRRTSFFSLLSASVVWNEKERRQGKTEIEKWNGSNDGSKKNKFDGKLRCVFYPIFFFAPIH

SEQ ID NO: 144793 - protein, 15 aa, Heterodera glycines
MITGRNSAILVFIDT

SEQ ID NO: 144794 - protein, 171 aa, Heterodera glycines
MITPESYYPTLQVKDIGNASKPNEERLAQIIRWNWGENGAQRIVETHTLNKGSELNYRRCDNASSFVIRILKKRETKNAFPASSNSLPDDDLTVEIGDKQITDNLSRSDGRVRPLADVRFPGDQSHAQRGDEGEAAANDHFERIGRGHGPIQRIFGGHHLSYNERTFSAQP

SEQ ID NO: 144795 - protein, 255 aa, Heterodera glycines
MDPDPEDLGQITISHELIDGKKIHQSDVIQLLQNWKSIFESCPLNLSIRFLSDRVWRLIERDIFPLMSKNIENLDLSDNIVRICPTILSQCAILRTVNYTLNSSIYDPSSWQPVQDWLISPRADNGTPLRIVNFLCESEAVNLQCIQELKKAFRLATSRASFIMVFFDQHRLSPFSINNKCTGEELTLIRHDRVFNNFKLVRHGRPNFLPKATLDRAAEWLMEDEMHRIVVNLRDDDVGDGLLDSFPSAGPSDRH

SEQ ID NO: 144796 - protein, 81 aa, Heterodera glycines
MAEMYNWSDIAQRTERVYGNSLKEPEGSINHKLRNQLNAGFWFGLIWAWVTAVNILFASVLDWVDPRDGIETVDNKAKTNN

SEQ ID NO: 144797 - protein, 84 aa, Heterodera glycines
MGKSSKNSGRKLNRNKLMAQKDEEEKEDEEEEEKVEEDDDEEEDEEEQGEEEGDNGRETEPYIDGWTNGRTKGKATGSNFFLTI

SEQ ID NO: 144798 - protein, 268 aa, Heterodera glycines
KTHPIELTIDSGSIRGEYLTIGANTIGANEFAVFKGIPYAAPPVGSLRFQMPEPPAKWRGVMNASQYPPQMPEPPAKWRGVMNASQYPPMMCAQRPRDRKVDPVKLYKIHVSEDCLYLNLFAPSQCQCQFTNDTYPVIVWVHGGRFQYGSSADYPQNAILNNFVSRKAIFVSVNYRLGPMGFLSTGDSVLPGNLGLWDLMLSLKWVQINAHVFGGDPNNVMMMGHGSGASAVSLLMGHGSGASAVSLLALSPKAEGKSKRMNEKRTKH

SEQ ID NO: 144799 - protein, 138 aa, Heterodera glycines
MTDGLSVMVAEQLVDNLTQGFSGFTNHRLIREGAMHEYVWTRVDPSLKVSALNESILESNIWTPSMWEICKRSLIWTSNWAIIRCKNAYGTNETTANRKNAEKVLATWMLLFCSLFFFAILVGLACYCTRKETDEDEL

SEQ ID NO: 144800 - protein, 326 aa, Heterodera glycines
MDGSSKENSTEQNNPDAADNQEGISPEKVELINSTLDKLYNDPSSPAAFAGVTALWKEARKKLKNLRKKDVQHYLEGHRTYTLMRSRRVRFPRAKTVAAGFMTDVQVDLADFQALSRHNRGHRYLLVAVDVLSKRLFVVPLKNKRAEEMLEAFRQLIDQMPMVPHRIFSDKGTEFKNRLLKEFFDEQEIEKHEPVHSSVKASVAERAIRNVKQRLYRYFAQKETLNWVDAVQKIVDGINSAPTRVHGMRPIDVDFSNAQKVWKRLYGHPALQKRTPRFRKDEFVRMSREKGQFEKGYLPNYGDEILEIDDVLKAVRPIRYKLGMST

SEQ ID NO: 144801 - protein, 119 aa, Heterodera glycines
MQFMQKSVGHIRTANFSCLRSVRHTEPVTVCIQQLTLCYLMQYSPQVGAVVVEQPDDLYDKCTRVMQCVKLREALTNLVRCVDTDKSIRLRAEHMRTMRGLDMGKFNGRFTKCEQWKVM

SEQ ID NO: 144802 - protein, 52 aa, Heterodera glycines
MTTEEKRRPIETDSRRFEETGMLESKNSRTASCACPGDAEGHGFSVIIEHLP

SEQ ID NO: 144803 - protein, 230 aa, Heterodera glycines
SLPSRSDLREEWMNIRKNDVFFLLKLKPIHPVGHKFDVRKPFKSQFEIEYLRGCEVEGILGPDGRVLDEMENRDIIRKINRDIIRKIPGDLRIYRVRFDANQYREDALRGVETDVYFTFNLVIRRDPKTNNFKAVLATIRQLLNTECVVPDWLHDLILGYGEPDTAHYSKMNSMNSTVASVDFNDTFLSFDHLKKSFPGKKHNLEDQKPVPPFRSFPFTTTDCCCICHFP

SEQ ID NO: 144804 - protein, 108 aa, Heterodera glycines
MCYVPATTTAQRRTDASTAVRSPHERASHIGAANQPSEAARHRHIATQQPYTGFHTCSTERYTTAPTYGSTPKAWIVRQLPRNVGQRPQVISNDLCPSADGGIWWCQR

SEQ ID NO: 144805 - protein, 123 aa, Heterodera glycines
KLAHCFCGHNFLEGFSVFSRTKLSNNRSVMPLDVRGCTRATLAKSACLPSPKGVGKPVKICRDWDRTLQLLSVNEEFLVGASHQLALNTSLPFVHTARRCPGLSHFEKFGDGCSGRSVCRLEP

SEQ ID NO: 144806 - protein, 1174 aa, Heterodera glycines
MRKRKMKAMVFRPRKWDNNTIGTEIEIGTITQCIVIWRETMDAELLAVLTKVEEICYELLCIWVVPKGVPIHVMKKRFPAIVRVPEEENINNLLTKLEQIGMPIEKRGEQKWHETVATNAQKVNWNQLGNGRREKAAGSHSHNSFVPTHFSSYLPTTTKMFFPTPEMPKKGENFGKIQSENFDPFVVLGVKRKSQSPESNYEYEDIFEGPLCTKRTKFWVNSKCETTKTEPLDVKTFFKNENKEIYQPHWKPIVLSSPSGKKGAFFFGKNFVFSNFHPSSFMMDGFKWDNVEQKYCFEKASYFGYFNLAKMIKFKNGITEPSEFKKFTDKDMDQYKSLEENPKSFDQYEWNRVREGVIRPILWAKFTQNEKFGQMLLETGKLPLYEASVNLSWGIGIDIRERQLIFSNMDQGFKGKNMCGRLLEDIRQKLNPMGTVNQKRPTNQINEKDLDQILKKIENDRKISVFKTENILRQCTRIKEVVKENWDMNVFIQGSIYNGLGRKESDLDLVMINSKGIPNDWTKNDSCQFFDKLRKKLRESGMALTRTLIIPSRNVSILEITIDSDDQEINAQISCNNLIGLINSKWLACYVQLDARFKTLYFAILEWADYFEIHQSANGGGTLNSYGWTSLLIFYLIKIPNPVLPNLIKILPEIFEIRNITYTKKQIFEILKQKLIWETTNSQSISSLLIGFFEFYTKINFEESRLNMKEGKIDFWEKSAQEMKMHLFILEPFGAFNVARSVTQNGFSKIKNAFHATWEKLKFGIQNPKKLLEAIKGKENDEIIEEKLNLNRILISDQELVQGQEANTPMDSASKSRKWVLNSQKYFFNALMIINIINFCVATQPMICHNRAQTKLVQFKRDTSSCGKISRFLEQPTRALMLDLFRPNPDNFQFEAWRCIKTRQTQKYRTDLFGYKIEEIPDQILLPTTFEDCHQMAIYKKCEFGVLSGEIGQKHTNKKLIIEQSWWKIGFQKTESENCFLSKITLFGTPGSDIIHSPADDTKNCKYSDGQCQLENGVYLLWEIKKNIKNLFDEKTCVYKREAKINGTYVPGIWMSNDNNRALVFDQNSKKVESCGERLRVSAQGFAIIEEQFKELMKNEKNSFDQNIRNKRKRFKRWNTPFSSEIEKSLYRFGATVSARPFRRNRFGAAVSAQCRFGARVVSARNQKKGRKKS

SEQ ID NO: 144807 - protein, 160 aa, Heterodera glycines
MCRRDCRRPMGRSDHFQAPRRNAEPLGNELQEALSSAAFFDDFMPFVLAFEFGATFCGENGGTTKLCKEKCLSQTLVAPKTKAPFVGTTKFHGTTPRSVPKTTFGIVPTTEQTFAFKPFVRHVDHFGTNCTHIFFTSEVDKFLLNITATPYEIACNDYEK

SEQ ID NO: 144808 - protein, 109 aa, Heterodera glycines
LFEYPKRTLEKIDFFVFGAVPPNRRAQIYGETESFGSSFPIACTLILRWIFAPHNCLSTPNGHLKKSIFFVFGAVPPNRCAQIYGETESFGNSFPIACTLILRWIFAPP

SEQ ID NO: 144809 - protein, 18 aa, Heterodera glycines
MKMKMAHPMSKMEIIEDT

SEQ ID NO: 144810 - protein, 146 aa, Heterodera glycines
MDTAQRRIAIRRKLKKDEAYDDDDQRKKYRIYQPPPLPRAKVKVEHPRPPPPRPRPNVKREQQQKPKSEFKPPATSKKTGHPTPAKRVPEFVDLDPRPSTSRQAGYNPPPPTPKIKHEPTTKRPMPYRIPKREPKVEEAPQQQQPQ

SEQ ID NO: 144811 - protein, 37 aa, Heterodera glycines
  unsure (1)..(37): unsure at all Xaa locations
NASLFGRSPKPRSLKKSDRIYKSEKNNAMXNASFAAQ

SEQ ID NO: 144812 - protein, 183 aa, Heterodera glycines
MKCCQICHGIISRYILNNEKEIEEALQVLSRMIREGGITLWNDYFNTIFFAIQQIISQDLERHFNIIKISALKTLKELCLVQPKRLVAKTELLVMIILNAHECEDATVVRAAEDCGAAVANHLPTNTCMHLLLTVIDDKHSKYHQLSGAIKMLGSMLSKLPPEEVVELLPTVVPRMTQSRNFL

SEQ ID NO: 144813 - protein, 88 aa, Heterodera glycines; identical to SEQ ID NO: 133373

SEQ ID NO: 144814 - protein, 16 aa, Heterodera glycines
EAIPEGFGLPINLGAS

SEQ ID NO: 144815 - protein, 90 aa, Heterodera glycines
MCGDGANDCAALKAAHAGISLSEAEASIAAPFTSKVADIRCVPTIIREGRAALVTSFGVFKYMAGYSLTQFVTILQLYWLNTNLTDFQVT

SEQ ID NO: 144816 - protein, 148 aa, Heterodera glycines
MFRVTARYLIQNFDEDNYCLFYAMQATLVRSISYLDRRRFHDYVNGNSEMRGKLKHDALEMMNAVNSPAGQPITMRKYMCRELWTGGMGKNSLVNGISKHLSSDRQAITSLYSNMDQRTMLYRSSFTSKRGILMVCRKVGICSASHIV

SEQ ID NO: 144817 - protein, 137 aa, Heterodera glycines
MQKTEPVHFYQSACMIFLQLIFFYSLMRLIKFGKKTSLHKNFTFNVDDQREYEFTLIFNDTYKFYVNRILFYEQNTSITPAWAINFVRCESEDGISMELYSLLNYGELVKIEGRVDRNATVIKIYLFHEVAQFTEMS

SEQ ID NO: 144818 - protein, 65 aa, Heterodera glycines
MLLLEEPTTVEIDQILPTNLYRNKIFVPCPIVGKQRQKLQKRKQFCNQFVAQPTRTAHQRCFSYE

SEQ ID NO: 144819 - protein, 151 aa, Heterodera glycines
MDPSAVFRAQRRAGKYLRPGAQDMKSVGVQYIEALRLLLNANGHKPFLRTVHVLFGPDEEIGGHDGMEKFVQTDKFRALNVRLCIGRRVGQRNGCLPRVLRRKGRLVDENHLSCRFGMLSICFLDFPIEKPLDTDHDLSKTQLGPYARLAV

SEQ ID NO: 144820 - protein, 129 aa, Heterodera glycines
MLTTLEELKATPCGTQLASFCGQIVSILPSEKKLTALLACASGKNVVLTEFKSVSSKFSKICSLGIVVKFYMLKAQRFQERFDGKTIYVTPLDYEFVVMTFTRMELIQCAIATADSFEKLTSGCIYCEF

SEQ ID NO: 144821 - protein, 295 aa, Heterodera glycines
MASSPSSPSPLFYVLSVLANSNLFPFFFALSIGIPSALLYCLELVVIVANFADFNSAFFVLVAFRVVSLWRHGLPLFLAVTFILPLPLTIPILNKGTYIHVQDDNATFTLDNYKTDNKFDSSEIATSFSFFVGVVCLLLNLASIVAYKLRKVGHQNATIEHKLTIFTMITFFGHFIATISWVLVSLTSINEVDEQNKPSSYVQMWFGLTFEENETLFQANFNQFPWVNDLSMLAIPAWLLLWASSKMREIIAKKFNWIRRNGQQKNIAIVTVKRNVVPMSAKVQPQKHLLTNQRN

SEQ ID NO: 144822 - protein, 131 aa, Heterodera glycines
MEQMARKNVERSVHCRAEFRAEYEKFEPLSLRVQQTDGHLRSNRRKIGKVKKELNFFFKLTHLLFSIDILLVTGSRASHIEVKKANDWQNQWKNGFSQNVRHMFENMRREKSTLLVIDDKMDVLIEAVNSI

SEQ ID NO: 144823 - protein, 43 aa, Heterodera glycines
MQEHGMIFDAVHGRTVHKFDERLGGGADVMDNIRMLYLRKDKT

SEQ ID NO: 144824 - protein, 110 aa, Heterodera glycines
MISRLLEQKEAIYQYAFENRSFDLTLTEEEWKLIEELISLLQPIEEASKMLMKSPLSAQIPIAVTLHSKLFSAKLINKEIDSVRCSLVNEIEKYFFGLREKRFINTYLFS

SEQ ID NO: 144825 - protein, 263 aa, Heterodera glycines
SVVALAVVRHCLVGRALAHHRGARVPVRVHLDAATMTVVHVLARLCAVLARAVCPVRVHHVTDRVNSQRIGEKSRMMNIFDYKPLYIIGKFGVDNKPIKITDLEKARAKKEESEQKLMEKKERRERKKRQMAELRERARIERRRKNFAGAVDLLLTYCRLITSFAVLVGNIHKTFIPRYLAPPLENVYDSPDLLMFFTITLLIDVGFFWLLVFWSYCQQMALCCRLGFCRFLLWCVALVFVGGGLMLYPMHFVHEQLGLLLIL

SEQ ID NO: 144826 - protein, 55 aa, Heterodera glycines
PSLTRHSFFNRNDRPMPCNLINRSRMRRSAPSQAAARKQPLRKSPRQTLLSGFVL

SEQ ID NO: 144827 - protein, 107 aa, Heterodera glycines
MTGLIRDRSRYFSSLPPRVESPFSGVEPLSSVTRHHHGSQIHYHRKLIRQTLERHVAGTRPCDQLSCSESTLDARRALGFVANKCAPLWGDWSFGACISSRITTVIQ

SEQ ID NO: 144828 - protein, 213 aa, Heterodera glycines
MNRRWICNDVWMDIFPSFDHAQLGLKLALLSPRFNALVDKHFDGKSELTIWRRIEIRRKDKGPEAKLSVLMGEYKFAEFQLPDRPLPSKIRLKCLMIDYIDHSVIAFLRSNHQIFDKRGTKLRLGILPSQTTDDRQPIWDVFVREIWPIFASNIRRLRFIDGDHLDNLRRRTSPTILTDLDQLIAIYSIHLLPDPIGDNFDGPNATAGQALSK

SEQ ID NO: 144829 - protein, 21 aa, Heterodera glycines
MAVSFFSWGFDRKLGTNICLL

SEQ ID NO: 144830 - protein, 19 aa, Heterodera glycines
TFAFSSLALPNTHTIFEML

SEQ ID NO: 144831 - protein, 19 aa, Heterodera glycines
TFAFSSLALPNTHTIFEML

SEQ ID NO: 144832 - protein, 19 aa, Heterodera glycines
TFAFSSLALPNTHTIFEML

SEQ ID NO: 144833 - protein, 19 aa, Heterodera glycines
TFAFSSLALPNTHTIFEML

SEQ ID NO: 144834 - protein, 19 aa, Heterodera glycines
TFAFSSLALPNTHTIFEML

SEQ ID NO: 144835 - protein, 19 aa, Heterodera glycines
TFAFSNLALPNTHTIFEML

SEQ ID NO: 144836 - protein, 234 aa, Heterodera glycines
MAARFNEAMVARLIELVQSRQDDLNPPTRTAKANEKQKEAWKFVTDSMNRVPGGVQTGLNIGDTIFFEGKEQEESAEFSSQQVVVEEGKSYAVLGTVPRGEAVKTPKFESSTSRVPFRSRAGTASTVTAADVMELQRSVLEMQLKEMTKKQEIFKKFEDVLDDAKTFFTEGREFFRGKHSNEKEMADFQTFLANGLVAATMPLFSASQTYGKHLKVAKSKELFWVIVLIQHVAG

SEQ ID NO: 144837 - protein, 120 aa, Heterodera glycines
AQSVNTNFADLVDSKRKSPYMQTSYQQKSCSKNKHNDGSVRHRKIKPVKLLMNNPSADVEAEVVKRPSSLSRPILNTRRLEKGESSMSKYFDDSLRRSRSKNSSFSSTSSSSSLASEFLV

SEQ ID NO: 144838 - protein, 178 aa, Heterodera glycines
MRKGLFSCLSIISAHRAILSSASDVFEAMFRYNEGQIEIPDIEIGAFKTMLRFIYTKSFDGLDANNLLEVLKAAHKYNISGLVKECAKFSIQKLPNVFVAFEQALLLKMEDFALRCLRYIDQNISALIKSKAFLQINQDLLCIILESDQLKISEIEIWNAALRWADEQCRQKGIECSR

SEQ ID NO: 144839 - protein, 117 aa, Heterodera glycines
MANFKCLFQCAFCFFFLRFSVIAVEHNEKDLFDEIWKNLNNKTPKVKGFEKIKVKMEPQMDNEQMINMEKYGQIGKTKVKKEKCENGQTEKANYSTRKQIKKEHQSEEGTEINRQTK

SEQ ID NO: 144840 - protein, 91 aa, Heterodera glycines
MMIRRARKTMLDVRSTHPSPVRTSKIQRKYVSCSGFPESKDSRPPTSSDDLILSLTCFSRQPLSLRLFENPPTPTPLEEKVHPPFQFHHNV

SEQ ID NO: 144841 - protein, 43 aa, Heterodera glycines
MDQFPRGFSPAGSDSSRPQHYKRSWPTRVERGREFWANRDFSG

SEQ ID NO: 144842 - protein, 206 aa, Heterodera glycines
MRSQCHRQKRCQSEDGDPSLKGMSTTTRIFGNTPRRQLSVKERSVAEEADSELGDSSATEEGGTESIRWTAAGDVPLLQNERLSRQEFVAVLRFASLRHSLAPSVYNNRSERRQTVPIRGTRRSRGTLALPHAAASDGTAERARDFRAVGGRVGRDEPKDEQRGTGREKVGTRGDGGGQRQTKANGSDGDDATPQRQHRSTIGQTN

SEQ ID NO: 144843 - protein, 22 aa, Heterodera glycines
MSVSLRFFIRILFIKWLMAGYF

SEQ ID NO: 144844 - protein, 24 aa, Heterodera glycines
ITGVSIIAVLFLVFLMPSQNLVRF

SEQ ID NO: 144845 - protein, 24 aa, Heterodera glycines
MEKACKIWRDYIDFSALELLELAS

SEQ ID NO: 144846 - protein, 28 aa, Heterodera glycines
MRFVVPTVIWANLESDGANMRPRGKLEF

SEQ ID NO: 144847 - protein, 716 aa, Heterodera glycines
MDVDKVQPITNLPMPQTRKELHSLLGFFTYYRKFIYSFGTIAAPLFKLLQENVKFSIGEVEKEAIKSLKEKVLKDVVLYFPNFEKAKNDPSRCFIMMTDASKVGLSAVLCQHDDEMKLRPIYFASRQCSKYESRYAATELEALAVRFGAKKFAQFITMLPTRVLTDHKSLVPMFKSKEETGNARVDKWLMELNSRFILKVEYQPGKMNVIADLLSRSFQLNNEGIAEPLLEEDKALIGMIKILTAEEVEASIEEKREKWSRASEESEMKHIYEFLKKKIFPDDPRQAQNLKETCHKYTLLDGLLYLCEDNGKLRLFVPSEFRENLVKQRHEGKCAGHMSDKKLFLQLAEQYFWPNMLKDCMKIHQHCRICAHTKEARANEPPLKVVRTSEPFELLCIDILDVGPSQSEFKYICVMVDHFSKYLIAEPIRNKSAEAVAKVLVEKAILIYGTPKKIHSDKGKEFVNSTIEEIVKTFGIERSLTAGYDPQANGLVERVNRIIIAMLKKSTASCWTWDERLPYIVFAYNITPSKTTKFSPFSMIFGKIARFTMDGEVPLQVNPAYTIDSDTYLQLFRENVLNMLNEARKNSDEERMRSKIWYDSQPKVTANKFEAGQRVMVAFPGLNRRSRHKKFLWSHFGPYLILEINESSAFLVPIDNRNAEPIKVPIERLIRIPPGIPDISTLPKGKNPFKNALKSLIVSILSSFEVCESDGQMAPL

SEQ ID NO: 144848 - protein, 301 aa, Heterodera glycines
MTAARSFVKSIIEGAPKEELHLFVTKKGDYVATGQCPTEEDQMKALECWFEKCSVAKHALEESGFKKIGMYEPVGLNHLADSEKKKWEEAMGETPWVLEKLRAKIIHKATKLIALPRVIIGDSTAHQLAEILDQTAVIGPKNGTLAETVRSLKPVVLSSKVKAALIIVGRDSLLGGETIAVMMEQYEMIANLCRRFPQVKFFWTCPPYVHDKHDEYEELIESLVPMMSQKPFLPVWVTESDNGWTDERGRFASAEGMAVHPIRLPGRSEAENSVNSIDRSCRCYDRSGGPSPSKHFVFGRK

SEQ ID NO: 144849 - protein, 381 aa, Heterodera glycines
MVLGLCETWLTNNETIIFSDQTLNENYVIFSAIRNNSKEKYITNNTIIIGDFNIGSKDITWVNNIPVPHTGLGITFLDFFNKFSLNTNIIGPTRGNSILDLCLFTNPDLVSSIELKDSIVFSDHSALYFNIDIPFQRQKPPKITVRNFTQSKIKAFNSYLLSNLSSSLTTTYTLESKYNVFANTIQNALDLFIPKNTFVKNRPPNFPLSLRSSIKEKACIWRKMKKDPVKFKPIYDSLALHIKIQVKKFYENRQRKFLSANPINLYKIIRKHNFSSTSIPSIETESGFIFDDFEKAQYFAKYFSQTFSNDISSSYPLPGGDQAQVYLSEIIFDVSDTIQKLNLLDGKNNTSPDLINNQILKNSFLPLARPITDLLKLSFNT

SEQ ID NO: 144850 - protein, 100 aa, Heterodera glycines
LWSIRQLKVLAPLALVANLVYLGAVLIILEYMISHLYSIDELPAVGNLSDLPLCFGTVIFAIEGIAVVLPVENHVLPVENHMDRPQHFISPNGVLKPSCL

SEQ ID NO: 144851 - protein, 77 aa, Heterodera glycines
IFKFILYPRKMSIFFFEKFYTSQKRLRMRRRAVHNRHFISQRIFIFRGYPRKMAISFFDKFYTHTNALEHDREGGAQ

SEQ ID NO: 144852 - protein, 92 aa, Heterodera glycines; identical to SEQ ID NO: 125147

SEQ ID NO: 144853 - protein, 35 aa, Heterodera glycines
MIGRAVRNIPFIFEGIFKFILYPRKMAISFFDKFY

SEQ ID NO: 144854 - protein, 70 aa, Heterodera glycines
PTQQDYIELHIGASELNLYAMAVMDRILKEQAITVDVPHGDAWLREEGSRPLVLIAGGTGFSYARSILLT

SEQ ID NO: 144855 - protein, 20 aa, Heterodera glycines
TGYREAVPEGFGLPINLGAS

SEQ ID NO: 144856 - protein, 54 aa, Heterodera glycines
NFVEAYTEASRPVSEICLAIKAASRPQTGASRPFLNFVGLLRPLRGLRRALRAR

SEQ ID NO: 144857 - protein, 92 aa, Heterodera glycines
MNSTQKQIFMGTLELIQNSMEFKETRKDKDLVGEYQDKLLDAMNKVASGLPDSAKLQAIISGGSPMPIIIAEKPFFNAPPPPPAANEDDDAQ

SEQ ID NO: 144858 - protein, 42 aa, Heterodera glycines
KQKMGKIIKLIAWLKFNQINISWYHSISFNSFNCSLSEYNFS

SEQ ID NO: 144859 - protein, 149 aa, Heterodera glycines
MGFNLFIRHADLHHEAESMCQMYNQLTPKFMACMARANADSRRLGAFNAIKGGWSCFSGIFLIGMLKTVGFNSLQLIPKSNNSQWGAEMLTKLILSFLDELFEVPEDNGDVEVNEEYFSIAEPIDFGALYVDFLRDLMERSRVKNGQLK

SEQ ID NO: 144860 - protein, 84 aa, Heterodera glycines
MGACCSRQRWRKAAFPPRDGIADAISGTRKKHKDGEWLKKDKKLQKLIEYSGAHPEELSGIGAYLIQHLNRDLDKKNYTRVEVN

SEQ ID NO: 144861 - protein, 43 aa, Heterodera glycines
MDLQNSMRARTINTHKTRKMIKMRLDRNKRISMRKVALEIGLN

SEQ ID NO: 144862 - protein, 125 aa, Heterodera glycines
YICLTFSDRIDLFVGGMLEDPVVRGLVGPTVACIIGPQFARTRDGDRACIIGPQFARTRDGDRFYFENPGIFTRAQLAEIRRSSLARVICDNGDDFRTVPREAFRTGPIVQCIEIPQMDLSKWKE

SEQ ID NO: 144863 - protein, 19 aa, Heterodera glycines
EPVNSCIGCKCRRCCTPNS

SEQ ID NO: 144864 - protein, 246 aa, Heterodera glycines
MGEAQRTEQLEGMSQFDGSEKESHLGTLDNIARGDQSEQFGHNCRRKGIDGRPMDEGKAFEQTSDPSVVPIGQFEQRTRNRGTVQRSISTEKHTNAREERMAEGKQKKVRRIRVEFIQKMPAKNGIENRAKCQPFVAFLPLPQFAFECIFFRFQFFSVFTFLAIFGLLIGYLGQIHLERAELNGEIVRRQNDDHLRSANHLTDKARLKAFEAKARRSGPNGEKRIEEGELKKEENRTNKQMEKGME

SEQ ID NO: 144865 - protein, 44 aa, Heterodera glycines
MPVIQALRHSMRSIGAPELRSVKRELEPQVRACTPKPHSRAEQV

SEQ ID NO: 144866 - protein, 95 aa, Heterodera glycines
MFEYPKRTLEKIDFFVFGAVPPNRCAQIYGEAESFGSSFPIACTLILRWIFAPHNCLSTPNGHLKKSIFLFSGQSPRTDAPRFMGRPNPSGIASL

SEQ ID NO: 144867 - protein, 78 aa, Heterodera glycines
MIKLCPVGMQPEPSAIGYVPCDLLAPGQCSEGKFYCETGQARATAPHGRASARVQMGTNAMSQLANRMCKFKKTKLAF

SEQ ID NO: 144868 - protein, 148 aa, Heterodera glycines
MSHSENRHLSTEEKMEENNNLKQKITQKGALKMEKIGARSRPLSIELEVSEDKLTTNNEQLHSFSQGEIVIFHAQFSDGNFSLFLLLTSNANLLVQYKFCASSQFASVSLKKFFPEKDFSHLATVAITADSSLIVCLSNDGPTIFMVP

SEQ ID NO: 144869 - protein, 78 aa, Heterodera glycines
MELGIGERTLIKWKNELLPNYYKTKNNYSNEDKLIKMKQYFKMKASNVEISDGIIAEKLGIGRATLFIRWKKEFIHFN

SEQ ID NO: 144870 - protein, 80 aa, Heterodera glycines
MSLFVRFVRISGHCSYFINIFIILWQNVTNLSRKYRSGKIQPNFDEIFGERWDKNEEEDQMIKIELNQLNGKYEADQMDE

SEQ ID NO: 144871 - protein, 239 aa, Heterodera glycines
MNFCHLIFIIFFIIYKIESGKIRPNFYEIFGDGWNKNEREEQVIKNDEQNENSATVDQMDGENGNGPNDQQKRETIQKFEAIKERLKQKGKYEWKNNNKIEWKIAKLLGQNRQKIYKWKKELNLNKTKKKSFYEGKKNEFIERFDEFKSLYGQRKQKEFVKELGISKDTFTRWKKELLPNYNKTQNNYSNDDKLKKMKQYFKIKEKNPKITDQRIAKDLRIGYSTLKRWKQELVSISDM

SEQ ID NO: 144872 - protein, 34 aa, Heterodera glycines
KISGIFMSDHFWDENVFDLIVELEKEGRHVRLDW

SEQ ID NO: 144873 - protein, 57 aa, Heterodera glycines
MRRNVQIGKINESIEKAKRCVLVFVKGYACYQKKCKIGRLDRNHKLYHNLVIRTKKL

SEQ ID NO: 144874 - protein, 92 aa, Heterodera glycines
MCRILFIVPIYAFDSWLSLLFFSNDVYIYFNSIRDCYEAFVIYSFLSLCYEYLGGESNIMAEIRGKPIRPTSIWTFTCCLSGKQYTIEFLRF

SEQ ID NO: 144875 - protein, 107 aa, Heterodera glycines
PFPDWTSPITFAHHKANASIASHPSSSPMATIILFSCVRCSTFRSVNVMQKPFPGGVRVRLLPNSKNNGRPLIQSANISSTNGEQQKNLIAVVEQHLEQYTKDLVKE

SEQ ID NO: 144876 - protein, 63 aa, Heterodera glycines
NRNYAQKAPQTILALPIPSTIAFIHPIMNAIIIRVPKIACDLSLQKNGVSKIVITLKKLLKQF

SEQ ID NO: 144877 - protein, 45 aa, Heterodera glycines
MSQNRDENSQPHVLDGPYPPAQEGVEFVEDEAPLMLEVLERLIQG

SEQ ID NO: 144878 - protein, 98 aa, Heterodera glycines
MSQNRDENSQPPVLDGPYPLAQERNEFVEDEAPVLLEMLDRLSQGVKGHIENEDGTSTRVMIEHYDKYNGLCGFESFLASCAFTFFGFFVHVSYEDDD

SEQ ID NO: 144879 - protein, 77 aa, Heterodera glycines
MIEGERGCYVERRRNKNGIVQIRGYIFKDDQTMDECGIAKADVIYGRNIFGWKKISEEPKSASSSRPKLEKTGNKAT

SEQ ID NO: 144880 - protein, 132 aa, Heterodera glycines
MSYSYSSTLKTPQKCFHDYENLQTAELHITPHPGYPRTKAGKFIKFFLTVRWAKAALSAAALSGMLSPPISAPLATTAAPSTVAGNGTIVADSRCARSCQPTTVAAATSGQQQMPSTLPTQLSRGGGHNSLI

SEQ ID NO: 144881 - protein, 46 aa, Heterodera glycines
MTAQIQQQQWHQQMQRQQQQGQQPMMGKFSQWRLSAPPCPHFTLFF

SEQ ID NO: 144882 - protein, 146 aa, Heterodera glycines
NGVSKNRNYAQKASQTILALPIPSTIAFIHPIMSAKIIRVPKIACDLSLEKNGLSKNRNYAQKASQTILALPIPSTIAFIHPIMSAKIIRVPKIACDLSLEKNGLSKNRNYAQKASQTILALPIPSTIAFIHPIMSAKIIRVPKIA

SEQ ID NO: 144883 - protein, 92 aa, Heterodera glycines; identical to SEQ ID NO: 125147

SEQ ID NO: 144884 - protein, 192 aa, Heterodera glycines
HIGMNIIAALDANCGIGRSNALPWHLPEEYAHFVRVTTHTTDPRKRNAVLMGRKCWESIPKKFKPLKGRLNIVVSFDSNKINDQLIVAKQLDEVFAILNDEPFKDTVETIWNVGGHDIYANVGGHDIYALGLQHPSLHKVVLTRLDKAFDCDVHFPTVDWAQFERKDDFNGPEEMHEERKVTWHVTSYTRKK

SEQ ID NO: 144885 - protein, 16 aa, Heterodera glycines
EAIPEGFGLPINLGAS

SEQ ID NO: 144886 - protein, 115 aa, Heterodera glycines
LYLFYHCCTSSITVVPLLITVVPLLIPVVPLLITVVPFLITVVPLLIPVVPLLITVVPLLTTVVPLLITVVPFLITVVPLLITVVPFLITVVPLLIPVVPLLITVVPLLTTMYLF

SEQ ID NO: 144887 - protein, 53 aa, Heterodera glycines
MFAKEREWKGAAIAPKKPSDQAEKESKGKETARKDTLADLIKKDERNEEPTNS

SEQ ID NO: 144888 - protein, 108 aa, Heterodera glycines
MCRLAMKEYAKGIIPRACAKIRRLFGRSAAIQTAADGAGTGSTTTPSMVQRECKAKLMVIYMDIKMNEIYFEKIFDFMIVAKDLMIKTRADVGDPRHIQSARVIRKLN

SEQ ID NO: 144889 - protein, 68 aa, Heterodera glycines
MHAFCARAIYHRACQSKAKQQRCCFERIKGIESVNRLLEKYICNLSTILRSELEMIIFTIQTNFRCSN

SEQ ID NO: 144890 - protein, 142 aa, Heterodera glycines
MVTIVSCNAPQANPKVVHINQLKRFKTHNPPNSQFPSSFSDQFHSPTKSDIRSFMDSDNRSMSSDTSTIRRVIDEAVDNVVCSELLEGQDPIDIDLSYALEVELLGPQEPTNPRITPQPDNNSEVWQSCDDDNMDTSSSKLD

SEQ ID NO: 144891 - protein, 33 aa, Heterodera glycines
MQKSLPKYPNDPERLPKEVILRRAAELAEALYN

SEQ ID NO: 144892 - protein, 24 aa, Heterodera glycines
MSKRGRGGASGAKFRVSLALPVGA

SEQ ID NO: 144893 - protein, 45 aa, Heterodera glycines
MTQQKTVIKKRCEHWSHFFNRLKANYWSKIVLNTKPKKKHGNIEN

SEQ ID NO: 144894 - protein, 74 aa, Heterodera glycines
MFYCHWQQLRTIDAARYPVRPKLHLLAAHVGRYAHLGTPEKVVEKLVKHVTLLNALHDRGVENNQENGNKYPNF

SEQ ID NO: 144895 - protein, 88 aa, Heterodera glycines
ESRRRSLNRLANCRITSNKSTDHKAKALHTDAVPNICLFVFVLEVSNIRFATPPPQPPPVLRNVPLPPVTSNNNEMMVDRTCRNNTAK

SEQ ID NO: 144896 - protein, 28 aa, Heterodera glycines
IFFVCVSNIVRLFDRARQEKATVGTKFA

SEQ ID NO: 144897 - protein, 177 aa, Heterodera glycines
GAKQIQSALSDIYEFKIYSVRRPHKMISDDTKIKVTVRTLSTELCCPICLDLLTCTMTTKECLHRFCSECITTALMRGNKECPTCRKKIVSKRSLRPDPNFDFLISKVHKSRTKQRCSPSSLFGLILNKGNIKSIEEGIKAQAAYRKQRVRSYDYESCNLKFPEKKTNLKFPEKKTC

SEQ ID NO: 144898 - protein, 380 aa, Heterodera glycines
MESTSQNAVSLSGSDFDPIYFSPEENQRWGKLLDRMRTFEQAVCRQFRRIEHTFVQITNQTQIQDTVERVKNLESSIKELENATELDTFETKEKLIDAEEEVERVKMRIDGYERFTKVRFGKIIEKMKSEVGRITENLDTLQGRVQLLEYEQDEYGRDAEWMEDENFRGQALISPEQNDKRDDISVGECEIMVSDPFLGGIAPLEGYDGNPSVSFSRWVARLEDMLSLYPQLTEPQKLSRLRILLRGQARAEFESIEPAPETLVVALEHLKMKFENENTRSIARQTMTRPYSLCNYVKVADWKGEYSTDIWTANSGDFALTFVNRTDKADCDGKWFVASDQSFAIPRESYLEMIDKTGSAVNRIKCKSYAKYPKIVRGDR

SEQ ID NO: 144899 - protein, 1107 aa, Heterodera glycines
MVQNFTGERVRNNAAISQEAVEAQLVKCNPKPVLKNKCSMAGARPNVIEMEKHFACNIPLTERWLSVDSIPTTSKRRKNEPAEPGPSENRKIVTIAMMRVNSCDEKFRVMARVNGYEIKMLLDTGAHVSLCNVETARKLGIKQLSPSDIVGVVGISDKMIPIIGRSTINLEVAGCQVLSTVYVVNSKIGSTGSYEMILGRRGFRQLPLFLDLQTGELVRKSDGKIFVCEKVETDKNLVKPMDNNLGKPVELVKCLDRYSDIFSKHDYDLGGCTIKAPPIITTSATPERVRPYPVPEKYEKELKGHIEKMLEAGVIKESFTPWAHNVVLVKKSNGQLRPCVDFRPLNKVTVPDPYPIPRMDKTIYRVAGRKFYSTLDLASGFWQIPLDGNSSYKCGIVTPWGLYQMLKLPFGLRNAPSIFQRTMDKVLEGVRNVTVYIDDILIHTNTVEEHIEVLGKVFDRLRKSGLKLKMNKCSFLKKQCTYLGHILNEKGYRPSLSNQEVIEAFPAPKNAKEVKRFLGMMSFFRKFIPNFAEIANPLQQLTKERAEFVWNSLEKMAFEELKGKLIEAPCLRAPNYKLPFYLFTDASSIAYAGALMQSEHEQEMYAVGYWSRTLSIAESKLPATHGELAAIVNAVQNFRPIIYGADLTILTDHRPLTFLFSKASSNPKINRWLMALQEFEPQVIYLEGKANRVADALSRVPIKWEQIEMKSKEEIPFLLVAEEETEVNRSIIEKESEKDPIVSQVIAKIQENWQEPIPEELMQYFRERDKLSFDGKIVWKNPGRQMVIPEKLRGQILQMLHRAHFGIVRSKARARSLVWWPQMSEEIENFVKECNICQMNAPSVPKNDPEHKWPEAKLPFERVHADLAGPVWGTNFLVIVDAYSKYPFVAQMQSTHSTAIITYLRELFGMFGSPKTLVTDNGPQFVSLETETFLSNEGVKHLTSPAYHPSSNGEAERFVRTFKEGMTKLLQEGKSLKVAQFLLLQEYRATQCQANGGDTPSQKFFGRQIRTALEKIKMPKKVPEANEGDDPPGRTNENKERSQRRDNPFSPGDMIWFRAAEGQWAPGILLQPMGERMWEIELEGSNVPRSAHVDQLKGRRLGSVRHN

SEQ ID NO: 144900 - protein, 163 aa, Heterodera glycines
MDAENVPPQNELEKLEREALDSKKSKSRGHEERLKNEIAQMMGQLREAMKEEVRGAVEGLWAKTEPLLVAQKRSTDALTEAFDEFTSQVHIGGKNIDEYEFTSQVYVAGKSVDEERCDNPQPADDPSEKGGETDPPVGGGANPPVSGEPVQASSLPPEQPTVN

SEQ ID NO: 144901 - protein, 264 aa, Heterodera glycines
MDAENVPPQNELEKLEREALDSKKSKSRSHEERLKNEIAQMMGQLREAMKEEVRGAVEGLWAKTEPLLVAQKRSTDALTEAFDEFTSQVHIGGKNMDEYEFTSQVYVAGKSVDEERCDNPQPADDPSEKGGETDPPVGGGANPPVSGEPVQASSLPPEQPTVNVRAPQRGGRGQWCPSGYKGQWKAQGSGPKHQKRVGYLMRQLERELREEQAPEGCMCWSCRRGKWNGDRGGRGGGMGRGHRGAYGRGRTNYQQHAGPSHRGH

SEQ ID NO: 144902 - protein, 269 aa, Heterodera glycines
MTVPSVPKNDPEHKWPEAKLPFERVHADLAGPVWGTNFLVIVDAYSKYPFVAQIQSTHSTAIITYLRELFGMFGSPKTLVTDNGPQFVSLETETFLSNEGVKHLTSPAYHPSSNGEAERFVRTFKEGMTKLLQEGKSLKVAQFLLLQEYRATQCQANGGDTPSQKFFGRQIRTALEKIKMPKKVPEANEGDDPPGRTNENKERSQRRDNPFSPGDMIWFRAAEGQWAPGILLQPMGERMWEIELEGSNVPRSAHVDQLKGRRLGSVRHN

SEQ ID NO: 144903 - protein, 247 aa, Heterodera glycines
METLTDDEGICREPSDQLKLLACAYYTIGYCSLSRKFLSFPWVASWDVLDAVRRSRMMSALGQPGTATTGSCSRMFSAMFDSFGERISEHIERFVSARRTQLEGFSARCFGTDRTDFDNGAFAIFKGLAPLMFFCVSWAEHMGLFAQSPLKEEHICLLLLSAGLTNQPQNVINSEERRPWLSETPVEWAESEATPRRAVTRPGRRFSSFVESLASRDFEQLHCLDFAHLGLGSAAFMFMVVLCPTPN

SEQ ID NO: 144904 - protein, 260 aa, Heterodera glycines
MAPPKPKKIVIPTNNNLTEEEDQLASTDKQQQQQVALILEENAEKETTKETENFLIAEDDDDQLFLGAAAEGANVTNLRQGDEHGILVNRIVENTRMLEEKHLQEDGPFVEADEPDLQEQRRVRVEIESVQRVLQRATQNVQPLVRTMEFAADDFDTMLRELEECRKQSLVVERKLQERSTGVSSEVVALSTTLRALDNDIREKLMKRRLDFDNQSPMANGIRLRNDHLTLEYRPDKPMLRSIGKAVSFLMSEVFSRSPM

SEQ ID NO: 144905 - protein, 270 aa, Heterodera glycines
MGSTDQTKALFSTLIQRPTLTDQLLQRPPFKFIHDIVHETLRVTGFLDGLFTSDELDSTKAGSSRDNKMAFLQKLIDALNMDGHLDDVKPAKIVAGKEAEMTNFLLQSLATEATMYAKQDNNKQQQGDVAVKKSASHSSASSKSKSTTVEAASSPSASKSKNDDDEKRKSKKESSSRRDKEKKEEEHHRSSLTKHRSKDKVSSSKISRTNGNHRISNETAAEKKPSTDREKRKKRSEGLPKKKSASSIKNANDAAVLDENVLNHQQKHNR

SEQ ID NO: 144906 - protein, 24 aa, Heterodera glycines
MKEENAGTSGSTQTNNTYVLLPDI

SEQ ID NO: 144907 - protein, 148 aa, Heterodera glycines
MPQSQQELNNSSDDDTLAVSSSSSIQPVEGGKIVQSFTVPYISPLVLRRELETLVTNAADGALVLARPGMRIAHPIIFWNLFYYCRRLELPTHLLTWVAGAVVIHCVQDMPRLPSADEDKQQQQQQHNDAVAEPSSGNEAEEPGRTRN

SEQ ID NO: 144908 - protein, 39 aa, Heterodera glycines
MPSRQRKPPPPSSALMGRMLPSKSDESVRSWQLMDRRSP

SEQ ID NO: 144909 - protein, 131 aa, Heterodera glycines
KTTAVHQFVRGDLLSINCHERTDSSDLLGSIRPKGGGGFRWRDGIVLQAMRRGQRLLVDEISLAPDSVLERLNSLLEPQRAILLTDAGAAHQTVTAAGGFQLVTVTAAGGFQLVATMNPGNDHGKKEVSES

SEQ ID NO: 144910 - protein, 95 aa, Heterodera glycines; identical to SEQ ID NO: 133575

SEQ ID NO: 144911 - protein, 34 aa, Heterodera glycines
MSASKFFLKSNDDEVFEVDRNVIRLSTTLNTMFQ

SEQ ID NO: 144912 - protein, 37 aa, Heterodera glycines
MAFFLGLGMAFWLWFCAVRIPRLQNIVKANINYLWEP

SEQ ID NO: 144913 - protein, 303 aa, Heterodera glycines
MKEHYDAQAKVTENKFQIGDRVMVIFPGSHIRSPHKKILWNHFGPFRITELNKSTATVIPSDNPYGNPMTVPLERLVRVPKELPNICTMPKGKNPYKNVLNGLISVAGLICQENIKLYGEEKLNSKPDGIIGQLRSIAFLGGEEEHMETEQTDDKEAETNESENEENVEEKMDGKEVDANGSEKEANLEEEDQISVVQEEEEPKTLSWTLACVGDGHKCCSDVVVADLDAVLDRSGIGLTKIENPLKALLAMFLLKSEAVASASAAKKLISQILDTDADWELATYCSAREDDVKNGTFPSESD

SEQ ID NO: 144914 - protein, 84 aa, Heterodera glycines
MLVREKHGNDGHHANCGHWTVNESLGKDKSLWHFSALPFAVDFVGLGLNYWLFICLKGQLQIASAFSIPKTTVIKIGLIFSNVQ

SEQ ID NO: 144915 - protein, 54 aa, Heterodera glycines
MNEMVILFWHCVFALEFVVVKDLSSVWILDLEFDATAFEHFDLLWPRVGQITDY

SEQ ID NO: 144916 - protein, 38 aa, Heterodera glycines
MTELVILFWHCVFALGFAVVKDLSSIWILDLDFDATAF

SEQ ID NO: 144917 - protein, 40 aa, Heterodera glycines
MFMQRREEKNFPYSNSAKLRDLKSTVDLLTSITFFRMKVG

SEQ ID NO: 144918 - protein, 75 aa, Heterodera glycines; identical to SEQ ID NO: 129999

SEQ ID NO: 144919 - protein, 77 aa, Heterodera glycines
MRSVKHGGKKGMRFRYKLNLEFDLEFYFHFKYIDQQAQQIDTINSCRFFNTFSSLIKKAWQTQLSSRQNLSAMGTGL

SEQ ID NO: 144920 - protein, 31 aa, Heterodera glycines; identical to SEQ ID NO: 134217

SEQ ID NO: 144921 - protein, 148 aa, Heterodera glycines
YSFEGFYPNLKSFKNSESLIMNLTLILTNKGRHLKTQALAAIKIMNINEDEEEEIKAEINMLKKYSHHPNIATYYGAFIKKLPSSTGKHDQLWLVMEFCGGGMEFCGGGSVTDLIKSFEGGYLKEEWIAYVCKEILRGAHLHRGAHLH

SEQ ID NO: 144922 - protein, 267 aa, Heterodera glycines
MAQLSLSVQTLRLSEAELSVLVISGFTVLGVRSQPAGQHNIDTLFSLYRFHQWINALGNLSSDTLDMLRQQTLTADRLASVMGLDISMVTQAIACADVSSLQSWQNINAVLQWMDVASELHTMPSVIRRLVNIRYVTVPNKAESDLPSWDEWQTLAENMEAGLSTQQAQALADHTAERLSSVLCHWFLANIQPEGIFLQSRDDLYSYFLIDNQVSSAIKTTRLAEAIAGIQLYINRALNRIESNARADVSTRQFFTDWAMNIRYSTW

SEQ ID NO: 144923 - protein, 146 aa, Heterodera glycines
MSNYGPDYLQMLKKRRAKESLGMPFHGIGIKVPVNNKGIGYRPLSDDAKENAQLKRNIETMGTTDNEEKKAELKEKFYQMYSWVQFANDEMDFGMGLEFGHDLFMSNYACFDGMAKSVLMTSYELLGRKQFATLLEKHMEFGVCFW

SEQ ID NO: 144924 - protein, 24 aa, Heterodera glycines
MTAEDAFITNAKVAATDRFLCDPS

SEQ ID NO: 144925 - protein, 201 aa, Heterodera glycines
MIDESCLFDSEEEEDEEAKKKTPEERKYLFRKELRSMLFGFGDERNPNDDTLEALEQIVVEYVKEVCRKALELRNASKYADERLNSKALAIELQNARTFLTILLPFIVPLLSGLIILLTIYHFLTTQIAQLRTEFSQTKSELALQFADTKLDLTTQIGQVNRRFEHEFTDMKHQFAEVCKKMDEILVQTKKSKKFSVFRRE

SEQ ID NO: 144926 - protein, 220 aa, Heterodera glycines
RFPTKKASSTLVFPAKFKLSAVPMTSRNVSKNIAWCEAAQKTANGKRKKGEGPIPSWPGEPFSLDLLVEQGLIEVGAGRFGPQIRPWLQCSVNGFQFCEFAARDDFSQLGAVSVGGDIQLNSLEVSTAEGPAIAHEGGDKGPREADEENAQEQPPIVMPAHPEPQPVPAEPTPQQPQPPPAQGPLVSHTINPFRYAVDEGIFESFAVGALPSSAPCVASD

SEQ ID NO: 144927 - protein, 48 aa, Heterodera glycines
MYVQYSSNWWVFPCRSLSGSVGYAENKYPEFSRSLITNMIIILAYSEP

SEQ ID NO: 144928 - protein, 239 aa, Heterodera glycines
MNAKIIRVPKIACDLSLEKNGVSKNRNYAQKASQTILAHPIPSTIAFIHPIMSAKIIRVPKIACDLRLEKNGVSKNRNYAQKASQPILAHPIPSTIAFIHPIMNAKIIRVPKIACNLSLEKNGRIQFLSTIAFIHPIMSAKIIRVPKIACDLSLAKNGVSKNRNYAQKAPQTILALPIPSTIAFIHPIMNAKIIRVPKIACDLRLEKNGVSKNRNYAQKASQPILAHPIPSTSPLYIPL

SEQ ID NO: 144929 - protein, 32 aa, Heterodera glycines
MESNHMFNQGRMLQCVVFWVADFKYGTISVNF

SEQ ID NO: 144930 - protein, 53 aa, Heterodera glycines
FTKYRPVIFRHIREELSGSTEISAPAPTKTQTKNNRVDWKKERITNQETFGQM

SEQ ID NO: 144931 - protein, 71 aa, Heterodera glycines
  unsure (1)..(71): unsure at all Xaa locations
GYFRLNITNSEFHEASLHSFLVLXNCLKCIPKNALKMIKPVFSRISCQYFPIRNDTVNSFASLIHSCFASD

SEQ ID NO: 144932 - protein, 98 aa, Heterodera glycines
MSDRRKEGEEKMAKAIFISADCWLSVFDLLTPSQLGLGIALISHRFDFYVDEHFKTRKWALKIIRIERKIGENGTKQMEITNDNRKSLPIPKMQLPRK

SEQ ID NO: 144933 - protein, 63 aa, Heterodera glycines; identical to SEQ ID NO: 137894

SEQ ID NO: 144934 - protein, 26 aa, Heterodera glycines
MEEEKRGKQREKFNATPMQDNSCLLS

SEQ ID NO: 144935 - protein, 167 aa, Heterodera glycines
MFFGPTLLFLSSIGVQLHLLCITSGNSEGLGTIRRNELYSSASVYGIQPKYISFVDPEERRFPDGFRDWNITSLSALIYSYIRRLKPDGLITFDEWGISGHPNHRDSFKAILNLNTEGKLKELGLKTALALKSVAVLRKYVGAVDLFLNEFVMSDGNTFVTYSANPL

SEQ ID NO: 144936 - protein, 54 aa, Heterodera glycines
MAGCLDALPHQAHFDWDTKRNTYSAVASGFLFFLAWWLMIDTAVTAQKAHWTNW

SEQ ID NO: 144937 - protein, 74 aa, Heterodera glycines
MRNSSQLGARLWLMFGFIGSFACIVAGVWVMFGDFVLKEGQNDNWPGIALFLHTFFIFVASLVYKFGRTEELWE

SEQ ID NO: 144938 - protein, 180 aa, Heterodera glycines
MPFIGVGPGGATPSGLEMAKRLARHVWPKGQWRVKGRVLFAFSLLIAAKLLNATVPFLLNATVPFVLRDIVDFFNGKLPAELSLGFALPGEAILSAGIALIIAYGAARGGAARGGTSLFNELRNAVFARVAQRSIRDILRNAVFARVAQRSIRDISRNIFLHLHSLDMSFHLNRQTGALS

SEQ ID NO: 144939 - protein, 113 aa, Heterodera glycines
VSIAFGQCTNYAELEQTLFEMCQANGQMHYRMKVWFQAENWLCVKHSVVDTILMANSNLKRRGPRSAGDLSLMTPRLKKHSFHNETFDRYDRRECIEVVWMKLMQAVITWMKQ

SEQ ID NO: 144940 - protein, 253 aa, Heterodera glycines
RARSVPIRGGSPTAVKSRVRSVPIRGGSPTAVKSRVRSVPIRGGSPTAVKSRVRSVPIRGGSPTAVKSRARSVPIRGGSPTAVKSRVRSVPIRGGSPTAVKSRARSVPIRGGSPTAVKSRARSVPIRGGSPTAVKSRARSVPIRGGSPTAVKSRARSVPIRGGSPTAVKSRARSVPIRGGSPTAVKSRVRSVPIRGGSPTAVKSRVRSVPIRGGSPTAVKSRVRSVPIRGGSPTAVKSRARSVPIRGGSPTAG

SEQ ID NO: 144941 - protein, 75 aa, Heterodera glycines
MPKKAFKADEALRGTSIENNFFLAKCYQHLNEKEKAIEYFGKLLTLEPNNLYEAERQKLTVEILTKEFKMNPLKL

SEQ ID NO: 144942 - protein, 82 aa, Heterodera glycines
MALAKLKTSVFAIFVVLFVSIDKCRCTNILFTFFHDTGSHFQSVFPLMQNLNVTLPMTFGHAVFPPLIWPFILGHVTRNSEF

SEQ ID NO: 144943 - protein, 18 aa, Heterodera glycines
MFFLNLDLIWTKTSKIKD

SEQ ID NO: 144944 - protein, 307 aa, Heterodera glycines
CDEKPLWESLMGHGFLVLFCFALIGNCINLLIYNSDQIRFFIAIRMLCTKLLMNTLMNTCMMVVMVPQALRVIRFWDIGGSTDILYWTFWPYQAYLTNVFGFAYLTNVFGFCAMWLTVLMTAECYIHIFFPSKSKTLCTKQTVWRSYLVIFFAALILASIYPLNRTVSLSNRCNRTIALILASIYPLNRTVSLSNRCNRTIVKINTSQNFVMGFFEKVHTLADLFVMGFFEKVHTLADLLLSILLPLTLLVSFLNSICHTVPLQRKKRENHFAAEKRGVTRIGLITCFIQVPPPGGGFVSALSLQLL

SEQ ID NO: 144945 - protein, 247 aa, Heterodera glycines
MNKLFFPLVNLYKDNSLQLMHEKLKNQQLDTWEQLQNAILKEKEARKQKMEELMSQQRNKSSTKIVNKLTRKSIKNHSKKQLETNLEKGSESFEGVQVPILNLAKDGQKCQTFLTEGPNDDIGMDSDIEYGTESKMLKPNPQKERKIDYHYFYRFDANAIICRYCPYCRPTQKRFKPTNALKSHLKTQHMSVLKQYRRSNYILKEDSGKEQKEGGTIKTPAKQWEGSSLKNLEDTTDEAKFRKYLNF

SEQ ID NO: 144946 - protein, 49 aa, Heterodera glycines
MCRSRSSSFCSRRRFSTNSGLDSVRANGANVPQSGEIGGNNAADGTESY

SEQ ID NO: 144947 - protein, 333 aa, Heterodera glycines
MIVDRLPDIKGNEGSDLIRNFFKKYSQYTIDWPNKKRIESLEAKLSGRAERAYNAALASEPFAYENIKRSILQQLEETDCREMSAFNDLMNGVLRKSSENLDDLADRISSLVRRAYPGLTRNLADEYSIKHLIRSLNNPELALSLELHRRNGMSFDEFMALASRAETTQKAAKIQNGERSKPYYERNFQHTHQGERNSEMISKNFSPRPICYNCNEPGHISRNCNKAGVQSNRNAPAFFPRNQQQQQFHNSPATGANRIVQNSKNGVTPAVRSQNFLKQNCIRMEEEVKTDATDATVAGVKLEKEVIEYLRDELEKSETFCSGFEPNAMIGKM

SEQ ID NO: 144948 - protein, 45 aa, Heterodera glycines; identical to SEQ ID NO: 124527

SEQ ID NO: 144949 - protein, 95 aa, Heterodera glycines; identical to SEQ ID NO: 128210

SEQ ID NO: 144950 - protein, 683 aa, Heterodera glycines
MAAKRNGTSQQSGPSTKKWDFRSIGNNFTEEMETFKLVDYRSTICEKFGFTKNIVEFTINPDVGRPDKAMQDAVDTMIQVAFKNTEERMMRKVRMFGVAITGAGLAFPVWVPYRAYPQNNAEVIMQEINKLGQSGDGEENKKMLLLSEPITMKITCVTMPSGEGPRNVHKFDFGFKEHQRIGITNADKLCLFYALVASKFYLELHVDSFRRFMKNIVRQRDAAIELLHNCGIDINEYSYGVEQLPNVQKYWDEIYPGKYRVVAFEKSADPRKSIRVLWKGPMGRENVVPIFLENGHWDGLKNYVCFFNRGRKFCIDCECFFDKDVKHTFECRARCYYCNRVRGMPCEKESGVKIECPKCHRYFYNWECYNYHHGHQTCKLWRRCVICDKTYRFNPKKEHECGETYCQLCSVSHDPKRGCYIMPIEEKEEKDVYRIVVWDSETSQDSIYKGDQKEHVINYISVRVTCTECCDDKNRTNCKICGEERIKDWSEAEGHEPTKDFVEWILTAFTNYDTYIFAHNAGRFDGHFVFNYLCRTGKNPLPLINGLKIYEFKVQNSKKHSKLIWRDSCLLMPVKLESLKATFNLDCEDKPFFPYYYNKKENYGIRLEHLPPMEDYSPGSMNKDKFIKFEKWYNENKGAPFYLDEELRNYCRNDTEILLLSIIEFRRILINDITKGFDPLPRS

SEQ ID NO: 144951 - protein, 77 aa, Heterodera glycines
PSRGAARRGKKTPATIWEIGFGRRQLQSGPIGFGFETPPIVDFLWGGNFKGLHPSHRHGLVRETPATNPQPFGTIYY

SEQ ID NO: 144952 - protein, 85 aa, Heterodera glycines
MTRSSVRSRGCPSVCNIKTQGIELVTAALPSLSNEAFQHLHNEFKLLHNKNIADSIIGCEQTSAEDGTTTTTTPKCSLGEAKIGI

SEQ ID NO: 144953 - protein, 51 aa, Heterodera glycines
MQQNTGEREDRKKRGGEGEGAAEGEANARGDKRREKGRAAKDAPTEYTEGN

SEQ ID NO: 144954 - protein, 419 aa, Heterodera glycines
MISPGHHQDHFSNPSFGSPSYNSSPDEEEQNRRQEQSSSPSLSEIEEKDHTFLKIDVETEKESSPQQMRSAGGGIFPQNSANFHRYNVNDHRATVKMETTAEMGGDGEKCGCIGEMPPTSCAENAIPTSAHAPPISIPSSMPPFPSNPSQQPQHTVSTTIFQQQWFTQWLANNPFFASALDGYLNNNNSNISAIGGGGGIKGLLTHTQQQQHSNVASHNHSSSQMAMLQALIAAATSSTSASPSFGNYSSVVNASTPMSNGGFKLAPQQQHQPPPKKAKTATGGGKGKASANVAAADASHHRRQQQKDTKIDGGIGATTDNDLLSVHIPHNHFHSPFSSNGSANSPTSQDTPTTVTSKGSGEFSGKKSRGKAERIRQIVTRITTAAEEVAEEKVREELIDCARQLQLVTSSAEEKDEEA

SEQ ID NO: 144955 - protein, 80 aa, Heterodera glycines
PNVFPPAPLLRSTAALPSLLNVTPTQSAGLLPSSNLQSLLGEVPSLLKNRGHQLFAVPPNIPPLRLFDVHEQKQPLPNGF

SEQ ID NO: 144956 - protein, 192 aa, Heterodera glycines
QQSIEIVNAFLGNHQKNPTAPLNNTILSQLTNKHSENVPSLTANLAPSAEQQQPLPVPPLPSETSSMDTFMVPPPPPPPVRACQNSQCLADSPMDIEDDQDEVETSEKERNAKECEKKGRNKKVQMADELMKRALRPYFKRRRITKDEYKEIMIKGVAKLKKRHSLKAEKVEKFVSKYVQLVAAKRKNQFGY

SEQ ID NO: 144957 - protein, 132 aa, Heterodera glycines
MIKLKFHSVHTRNVLIDQNLSQAQSPVDRRSFIVHAKTSVTVADHQQQRHTFNQLPQPWRVHNDLTDEVLLFEHVITNQQQQRVIYLLRLRRCHANQLKDADKFYAKHFEDFLFFKDHPCKGFVESPKLILG

SEQ ID NO: 144958 - protein, 154 aa, Heterodera glycines
IPQFRLPYNVVDFEIQLAKDIGVKIETGRSLHRDDLTLDRLQKQGVKAVFIGIGMPEPKRAPMFDGLTPENGFYTSKDFLPLVAKASKSGMCHCAKTQLPRLSGRVIVLGAGDTAAGDTAFDCATSALRCGALRVTVVFRKGFTSIRAVPEEVN

SEQ ID NO: 144959 - protein, 30 aa, Heterodera glycines
MYSKAYVLFMDFMLICTKKPNEVQEIFNNK

SEQ ID NO: 144960 - protein, 109 aa, Heterodera glycines
LLLLLIAQAVQNKMNFPGTETFREMPIIHQQKKQEVVDSDDESTTSFSSSYSSSSSSSSSTECQSPLLKLGGRTLFNKPTICRKVAITKHSWTKGTAEANLNKNAVPIV

SEQ ID NO: 144961 - protein, 76 aa, Heterodera glycines
KMWLSTMKSTLVVFGCTFFEMFDIPVFWPILVMYFIVLTTLTMKRQIMHMIRYRYIPFTFGKPRPQGKEETGKTHI

SEQ ID NO: 144962 - protein, 70 aa, Heterodera glycines
MPQQAQFPILQQRLDIAFQLVELERRLGWGEDVQDEINALQQQMQQLLEQLQNLVARGSTGSETILLIRL

SEQ ID NO: 144963 - protein, 63 aa, Heterodera glycines
MLLIQAALFYLPKWTQEKLLQKSCLLTNAVAQFAVVNALTGRGHRWWGIEQIYVFSKRIILSK

SEQ ID NO: 144964 - protein, 29 aa, Heterodera glycines
MAIYFFEKFSMQQTLSNMKRSAKNGYLFF

SEQ ID NO: 144965 - protein, 29 aa, Heterodera glycines
MAISFFEKFSMQQTLSNMKRSAKNGYLFF

SEQ ID NO: 144966 - protein, 29 aa, Heterodera glycines
MAISFFEKFSMQQTLSNMKRSAKNGYLFF

SEQ ID NO: 144967 - protein, 120 aa, Heterodera glycines
MLSQPFFWMNFPFFLKDHLKHPCLGHNCAHFCFAVPSSDQSAPLKRKCACKQGYKVNPNNELACIRDIMEPVEPLCPRNGSQFQCANGRCIPLEWRCDGEDDCLDGSDEIDENTQASCYK

SEQ ID NO: 144968 - protein, 153 aa, Heterodera glycines
MAPGVRSQGLKQTETVPTADGEGTSTQAAESGPSTSALDLRPRSSPRPLSATPIRRHERVRPTTTEKATHMDLTTMDKATDVDLAYEDAATQTKQLDKQLKEQEQVISFLQQQVRNRDALIADLRRRLEQQAKDQPTRKFCRIFRAIYHPNCF

SEQ ID NO: 144969 - protein, 71 aa, Heterodera glycines
MLISKTIQKFQNHVSEHFALVQLCQQFGTMLSNVIPAFRPLDKPLGVGGIGILSLLVLCSSGCWQRIFLNF

SEQ ID NO: 144970 - protein, 207 aa, Heterodera glycines
KEMRRVDEEMQRLRHEFEGYRPAASRSSPYTTAGEENGNFGTQKSHPDSTCAPQGGGSSLSNGAGGGAMARHSPTYDPYLENLKSPLIKDESDGKTLRLRFDVAQYRPEEFDVAQYRPEEVTVKTVDNRLLVHAKHEEKTPSRTVYREYNQEFMLPRGTNPEQISSTLSTDGVLTVEAPLPQLAISTLSTDGVLTVEAPLPQLAIQN

SEQ ID NO: 144971 - protein, 127 aa, Heterodera glycines
MVDEVIKWWIRIACVYSTFLFLRDIVLPCTLAYLFNPVRVTFLSLMGVRRQPLQPMLGKTLRQEEVPLREVLRSPQPRTSPHRSLSPVHLDVIARSARYQQTRAQSDANLAEVDTPFGRRTRRREEH

SEQ ID NO: 144972 - protein, 200 aa, Heterodera glycines
MDNTAPKKFLTSFDQLQIPPEIDNDSTIPDYAKLLIKQLQSLLATASSLVQSQVTANDAIEEDRRQRTVVITNVPEFQSGKGSERGEADRALVNLILDTVDLDQTPVVFRVGMRTPNRARPLKMEFPTRHAARHVLRMKGKALALNALHGARIRESMTKEQLAERRKLIEQCAKKRKEDAGDWIIYANQVILRSDIDTNS

SEQ ID NO: 144973 - protein, 95 aa, Heterodera glycines
LFEYPKRTLEKIDFFVFGAVPPNRCAQIYGETESFRNSFPIACTLILRWIFAPHNCLSTPNGHLKKSIFLFSGQSPRTDAPRLMGRPNPSGIASL

SEQ ID NO: 144974 - protein, 231 aa, Heterodera glycines
TSTSIIRQALDTYKDVQLSRGKVPSGLEDFVNRIFNQNLELKEYSLVVGFSSDTRRIDMIERTVNAVSKDGGSTTTILMDTLNKLYESHLDVEFHDQVLGLIIRFLECQKEPNYFALSQNNALMAYQLAFDLYENAPQEFLNQMKMHLFPSSPSTEEPKTETKTPEKEKLERILSGVETIKHHMQFLIKNNHTDMLILRQLKDASRVNCTHNAVVIANGLMHCGTTCDDFL

SEQ ID NO: 144975 - protein, 98 aa, Heterodera glycines
MKLLSATPDSSISHDNSCQNERLALCDKINYFSNSHQRFTPAGHWSVAHRHHWAKRSLVPMALVVLLLLDNGAVKMHKQRDGWLMECVIMTIIRDMIN

SEQ ID NO: 144976 - protein, 678 aa, Heterodera glycines
MATDWIHNAYPEQALGGGGGDEPVNGNVNWLQIMDDDDDQNEKREMQSEVDEENKMKKAEIAKVIPRKCSCGGNGQSQQQQQPQQQREKTEMPLIEHLCERYKCSTKELEVLFQNLKSRRQILQHMRFNVRLRTNYLHPANRNFVVQCNDLSSLSASEAFAMRGYLGITVQTYFYVKHGVRLRHPNLPCAIRFGGRDHHDLFPMECLNKNNKLMLDIQNCTVTFKVLKRPLNKTEFLAIAHNGVNVEWNPRRFHAIIMRLRYTPRTVAALIFQSGRVVLTGVQHPDRAKKEAKRVLRRLRASLRCANIETTLLLLILRVVNIVGSHTFTHRIHITHLVPIMHSSTSFCSVHYDPTIFPALRCKIKLNDDDDDVYATSSEKSWNSIAESVDRKARDNNFQWPSTHEKGTWAAVAATGEESRARAQTGANVRDGNEMVQAEAISEREGGVALAAATKNALSERGSEVEQQHQQVVVMARGGAISNGDGARAKAEATGGAKSVVETRITEHHGEERLAAATAVIHREERREERRRKIRVRNRDRQQGGEERQRGEGHRQSHPNERHNDNFHSSLQLNLPPNRMNRREQDEHMHHSRDGLMGQSNNQQGEERQQGGGGHRQYRPTESPNDNFHSSLQLNLPPSRLEGREQEERIHHSRDGLMGQSNNQQMRKRIQRECFCTC

SEQ ID NO: 144977 - protein, 56 aa, Heterodera glycines
EKQLFLMEQNFQIFNVDDTKFRHPFTLTISGSTGSGKSEWVMRFLKNVDTLIPMGQ

SEQ ID NO: 144978 - protein, 84 aa, Heterodera glycines
MLRHKLQMEDDVGAILFFLKELTQYSARIIVVCRNSQKVTFLALCPPMECQKQGELFQSIKQNLIESIGPYSFVGLDEPPAIKK

SEQ ID NO: 144979 - protein, 192 aa, Heterodera glycines
MATDWIHNAYPEQALGGGGGGDEPVNGNVNWLQIMDDDDDQNEKKRDESEVDEENKMKKAEIAKVIPRKCSCGGNGQSQQQQQPQQQREKTEMPLIEHLCERYKCSTKELEVLFQNLKSRRQILQHMRFNVRLRTNYLHPANRNFVVQCNDLSSLSASEAFAMRGYLGITVGHINWIWYPHIIILNTVLKPL

SEQ ID NO: 144980 - protein, 59 aa, Heterodera glycines
MFLVEFDLDLDPGLDFSWIQVQAWIQVSRSLDFSWTWIFLDFCPGNPGPGPGIFQNVEL

SEQ ID NO: 144981 - protein, 366 aa, Heterodera glycines
MTNSDPSLATSAFLTTNFDSTMDPLFSPPPAPIVPILTAEEGNTLMSAGDSNDPPELRHWANIGETNHQPKHLSTQKKTNVKRRDRRRSSAFVPSARSKEELESLLNGNIDPNKPVRNVLVEAGIGAEFGLRLKSSSTLPTLFERNFVPAIEVPKCRGNISKGRRSMELAKAMGQEEGERSGCVPSSTHLLNNLGPSSSMEEQRTKRKNRTESVQKMDQPMLSSQLFTQKIPCSYKGCQKTFVKQSAMRKHLQIHGPRQHICQQCSRSFIERSKLKRHLLVHSGEKRFVCDFEDCGKRFSLDFNLRTHIRTVHTGERPFQCPFCHKQFAQSANLRIHRRSHNCRPTVDGGKEKQKNGANRQKVTSC

SEQ ID NO: 144982 - protein, 44 aa, Heterodera glycines
MPHRHQSVGDDISFNNNQSKHSEIVENELLTVAERNGEELEMVP

SEQ ID NO: 144983 - protein, 28 aa, Heterodera glycines
MSAEEAARLSWMSAYESGKESGKLRISR

SEQ ID NO: 144984 - protein, 281 aa, Heterodera glycines
LNSFYQQNYVLVYSLVRLSPSEALFDSVPGTRWEAKMLTQSVEPGEEPQRSKWSPRAVLLTRSSPTEIFLKVTPRDDPTQADAFWDLPADYEDWPWGVDLQYRLTRLGSCRKLSKADTEPVIMENVQDKQVLLDNLHPGSEYEVTVTLRQVLLDNLHPGSEYEVTVTLRQPPGVDRRVAPKKAVQRFQTADQPPSGAPNKLRVEGRWDTKLAFGWEPPECLEQNGEISQYEYELNGLDEWNQGTRQGVSPRTRADIGELLPGSLYRFRVRCFQKALCPIHS

SEQ ID NO: 144985 - protein, 253 aa, Heterodera glycines
VDSLTMKTGGAKNYTVMVPGNSIKFTELQPDTIYTIYNITVQGGTDSGYGATVWGSWATLSLGKTWILRLKDRTPGSLTVEWDPVWGIAHRGYILTAKALTAKAIHSTHPHLRIGSMRTVDVPSTATELTIRGLEPTSTYNVTLQLKDQMDGAWSIYSTLQPGCFLPGDIRHCDQTPHATSMSWEPVLGAAATHYQVRYIHLHQIRTLWVEEPERHRKELLCPKDPCNLCPKDPCNRLCYLVFNLANPPEEYA

SEQ ID NO: 144986 - protein, 42 aa, Heterodera glycines
MAIEREGNQKEKDKPGQVGTECKHRMETLSPKKTKLIIWVAY

SEQ ID NO: 144987 - protein, 294 aa, Heterodera glycines
ITSPLTATPFLAAGWPWWWLLLLLLLLLLCLLLCCLLAWLLAKCRLSRSSHSLLIFLLFHSLLSSLLIFLLFHSLLSSENAASDVNGRERERLLRDEKTEHYERSRGDFEDGYAHGYRAARAGGRAEEDYRGRDEAFRPTNPMFKEGYAKGLRDAGERGMSTSMANLARPTNPMFKEGYAKGLRDAGERGMSTSMANLAQRPTQRLGYSSGYMQGFRDGNSGVFGDRISESLLRRLEEQYPDNEEFRAGYIDGFKDGVSGGRVSETFRDSRRIQQTFRDSRRIQQSLTELTERL

SEQ ID NO: 144988 - protein, 102 aa, Heterodera glycines
MPITKTETAATTTYDGSAQKTKPRQKTSTIKTGRTSTKPCRRDKRCGDGGDEAATSVGEIKGDGMAGGMGTRRGMPEGTRKDIEMTRKRRSTQREEGVNTKE

SEQ ID NO: 144989 - protein, 48 aa, Heterodera glycines
MWRLKTAEQRKKYENLNKILLNSCFHQVVACRSDHKTGQWTTPRPSRS

SEQ ID NO: 144990 - protein, 72 aa, Heterodera glycines
MCLRKLSCDFSKRAIGCKWANPEGLAGDVNAWEIGVRKKQKDAANTLFDGDIALAQLHKNAPAYLVSETIQA

SEQ ID NO: 144991 - protein, 52 aa, Heterodera glycines
MPHVIEHKIRLLGSPSSPHRSPPPSEFGRYVELQKDKSWAEMPFERNDAKEK

SEQ ID NO: 144992 - protein, 263 aa, Heterodera glycines
ISITGTQPTNISITGTQPTNISITGTQPTNISITGTQFSCISITGTQPKSIPITGLNPPTFQSLALNPPTFQSLALNPPTFQSLALNPPTFQSLALNPPTFQSLALNPPTFQSLGLNPPTFQSLALNPPTFQSLALNPTAFQSLALNPPTFQSLALNPPTFQSLALNPPTFQSLALNPTAFQSLALNPPTFQSLALNPQHFNHWHSTHQHFNHWHSTHSISITGTQPTNISITGTQPNSIPITGTQPTNISITGTQPSSIQSL

SEQ ID NO: 144993 - protein, 64 aa, Heterodera glycines; identical to SEQ ID NO: 129150

SEQ ID NO: 144994 - protein, 220 aa, Heterodera glycines
NPTAFQSLALNPLTFQSLALNPPTFQSLALNPPTFQSLALNSPAFQSLGLNPRAFQSLLNPPTFQSLALNPPTFQSLALNPPTFQSLALNPPTFQSLALNPPTFQSLALNPPTFQSLGLNPPTFQSLALNPPTFQSLALNPTAFQSLALNPPTFQSLALNPPTFQSLALNPPTFQSLALNPTAFQSLALNPPTFQSLALNPQFQSLALNPPTFQSLALNL

SEQ ID NO: 144995 - protein, 64 aa, Heterodera glycines; identical to SEQ ID NO: 129150

SEQ ID NO: 144996 - protein, 162 aa, Heterodera glycines
SSGSGGSMVAKLKLNAWPFLVRGAICLVYSDNERDSSLLNSWLIASGHNFLEGFSVFSRTKLSNNRSVMPLDVRGCTRATLAKSACLPSPKGVGKPVKICRDWDRTLQLLSVNEEFLVGASHQLALNTSLPFVHTARRCPGLSHFEKFGDGCSGRSVCRLEP

SEQ ID NO: 144997 - protein, 72 aa, Heterodera glycines
MLIGLREMSAKLRSDIKHNGPCSIDLCKPISVLVGSSISMLLFGHPLKERLAGRFKRFDLIEKAKKTSINSW

SEQ ID NO: 144998 - protein, 82 aa, Heterodera glycines
MRKKDGNSAEDGGIKILRYDLTYEKLSEFDLDFDCVDTFEGVTLERVAMGCGQTENRLFLYDRTMVTGEIPFWQISLDWTKV

SEQ ID NO: 144999 - protein, 124 aa, Heterodera glycines
MVFSLEVHSLFLNLWSLSSESFSIFFVSRLIGGLSKASVSVAIAIVTDIMPTEERGKGMALIGGSFSLAFLIGPSIGAFFSIGARESGEFNPSPALLAIALTLAELALLVFFLPETLAKAKARL

SEQ ID NO: 145000 - protein, 81 aa, Heterodera glycines
SDRRLRKSVPSSPQTILVLAGLFVCGLILLISGLIVLITDLFNVAANAAASEEKRASEEMAMVGGNKKLKRMLAQVPSTMI

SEQ ID NO: 145001 - protein, 44 aa, Heterodera glycines
TDITTHSDKINKLTNAVDQIEVSMMSAAEAKREQNDKKPQKLFF

SEQ ID NO: 145002 - protein, 116 aa, Heterodera glycines
SLFIFENMPTPICDTPSISGVKKDQFEATKKWRKALKNFHESMPLSTHRRQLRTFTETFTGKDALDFAEQIFPSVFPLCNTRDKSRQLLERFLCFGYITNVRDENCKSFSDNGHFV

SEQ ID NO: 145003 - protein, 243 aa, Heterodera glycines
GYEGGVPEESLDFFRSPMFLLSERAASTEEPLASEAARPSENERQRKAAVIACHYQVIKGTENGERKAMAFVVGVKTKPDQVQIFFNDLIVCASDPVPLHWPSFCVPFARIFDLRVFERPEKIRIRLMERLSRMAKWQEIGEVFLPLLADHKTGTSADDNRKEEGSLVGLQFASTVHRGSFKDSLGCGGQAPFMQGRLFCALKSTSGKRGEKNEERKGQREKVGKGKSNERENDQKSKGDRNE

SEQ ID NO: 145004 - protein, 102 aa, Heterodera glycines
MDRKKTEILQKCRKRKFLDNNDSENEGNSEHREQNAENDGCDDDFEEERAIINFELLKMEAFVFGLKVGNLLEKDENLSKAFGTHTKKTTDGGALCVAAMPA

SEQ ID NO: 145005 - protein, 25 aa, Heterodera glycines
MGPLGAQTFNAWVQSQATLASYPFR

SEQ ID NO: 145006 - protein, 318 aa, Heterodera glycines
MTIFYEITNGENPAEGNNRKLTLKWLQNDGSAILCNENFQKIHENLRIKKTNGDEAFIEKAENNWNNFCAMFKNGKSIRKIETNLVERAKESVLNLETMPPALVKNIRKIAQNENFNAENKQKMAELLDQFIVGLNIFRKLVGDTFWTDKIVKHQQQLQLARRKRRANLIKSAECLFSIGLGALAATLGIVLGADLGQKRHNDVESYFELNERLEVAGIFLCFFLFVFCIVYICKTCRSQILSKNNFYSLRILKHPTIAPPSGIGGAQDNAKGMHGTKEGRTKCRLDHLRGKHCQAIGDTGNATPTNKCPASRRGKWT

SEQ ID NO: 145007 - protein, 33 aa, Heterodera glycines
MILGLGFLGKSLFFFLSSPWPETHEKHVFLGCC

SEQ ID NO: 145008 - protein, 151 aa, Heterodera glycines
LFEYPKRTLEKIDFFVFGAVPPNRCAQIYGETESFRNSFPIACTLILRWIFAPHNCLSTPNGHSLEKIDFFVFGAVPPNRCAQIYGETESFGNSFPIVCTLILRWIFAPHKCLSTPNGHLKKSIFLFSGQSPRTDAPRFMGRPNPSGIASL

SEQ ID NO: 145009 - protein, 195 aa, Heterodera glycines
FKVCCINSIINMTFFNILRTFFKKFSFLKSGKETDPKHDHEQFLGKDEARQYEELTPEKSKERLAKLVPKMDLNSDGQVDKLVPKMDLNSDGQVDELELEHINFMQKRYVNNDVERTWKNYKEEQLKNGLLDWQDYRNLIYGKPQNLIYGKPQEGQEISPEYVKMIERDERRWKVGSGPKRPANLLNREANGRIL

SEQ ID NO: 145010 - protein, 146 aa, Heterodera glycines
MQKPIIVNIIALANLGTGIKLNSLTITECEFKYNPRKFNAAVIKCTTPIKATALLWESGKMICLGTKSLIDCENAIKKFIEIIKGSGCPGASYTGLNFKRGKSMTALIFWTGKVVITGTKNNSEIKEMYHHILPYLKMAQKKLGRR

SEQ ID NO: 145011 - protein, 50 aa, Heterodera glycines
FSKRIFNFRIRKIIIKKFRIEKIKPAQKVWDQKDLNLQKKKLNFLHLSLW

SEQ ID NO: 145012 - protein, 251 aa, Heterodera glycines
MSARIIRVLKIACDLSLAKNGVSNNRNYAQKAPQTILALPIPSTIAFIHLIMNAKIIRVPKIACDLRLEKNGVSKNRNYAQKASQPILAHPIPSTIAFIHPIMSAKIIRVPKIASHPIPSTIAFIHPIMNAKIIRVPKIACDLSLAKNGVSKNRNYAQKASQTILALPIPSTIAFIHPIMSAKIIRVPKIACDLSLEKNGVSKNRNYAQKAPQTILALPIPSTIAFIHPIMNAKIIRVPKIACDLRLKKMV

SEQ ID NO: 145013 - protein, 75 aa, Heterodera glycines
MIYNSDRRGATVIKRGTTVIRRGTTVIRRGTAVIRRGTTVLEEAIFEEKFCPSENQKGLPLGQEIRNNFSGDNFF

SEQ ID NO: 145014 - protein, 28 aa, Heterodera glycines
NHCCPSSNHFCTSSNHFCTSSNHFLPLL

SEQ ID NO: 145015 - protein, 95 aa, Heterodera glycines; identical to SEQ ID NO: 143146

SEQ ID NO: 145016 - protein, 87 aa, Heterodera glycines
SADDYYALRLLYNLPVGFAIALLIYHLAWYRINFADSILINPFWKEFVKWLMIVSAALSYSLNPVGGGDVLQQLMLASTLMVTSFSV

SEQ ID NO: 145017 - protein, 181 aa, Heterodera glycines
MPKQTEIVLKYSFLDLTWFLDIEAVFYAISKTKKCLVVKTIFHISLHNFVSSARIETGIRPLERAARALQEVKKLFEFLQFCFHNFRKLFGIIMPKQNEIVLKYSFLDLTWFLDIEAVFYAISKTKKCLVVKTIFHISLHNFVSSARIETGIRPLERAARALQEGMERKNSYFWDFFRNQN

SEQ ID NO: 145018 - protein, 93 aa, Heterodera glycines
MLGERLKSCTGCECRRCCTLSGCCAMTENCLKNIHQKKGNKIRNTLSRIACRQTEGGAGGGVESSRGLNFCWAGFIGNTGCNAAIGFDVDIAC

SEQ ID NO: 145019 - protein, 129 aa, Heterodera glycines
LKAEGKSEPLEADKAIVAKNKADPGQPSDPSDMITAKDKNALQPVLPMNPAQQKFNPREDSTPPPAPLTIFRHCTATAKRTATAALASGAALQALSKHIVFFSISTMNGVITNFVDVFAFNRSIIKIIV

SEQ ID NO: 145020 - protein, 48 aa, Heterodera glycines; identical to SEQ ID NO: 133532

SEQ ID NO: 145021 - protein, 105 aa, Heterodera glycines
MLDINPEKRMSATAIIDFLNGGCAPNIGIGNEEKMPIFGKVDADFLSISLRAEIYRVKGIYEENKKIRLENLEKIQALLTTVTKRQKLLFSMLAKRKHICEGQKN

SEQ ID NO: 145022 - protein, 96 aa, Heterodera glycines
MRRGTPIPTQPPTSRTLALMTTRRPDQWTWTQLFFYAVQFFAIFAYTVVQYALVRVYYAFRYLTTRAAWYAIKYTILWPILAPYYAAVSYYNKARF

SEQ ID NO: 145023 - protein, 18 aa, Heterodera glycines
MRTRPIWQVKQRLLTSQK

SEQ ID NO: 145024 - protein, 235 aa, Heterodera glycines
MSKGKDRVGKILVTNVETYGTQTVAMLDGGAQISLIGAGFLYELIKERGLDLKKSDFSRTSARIADVNGQQLKCFGVVTIPITRKGCSQIPICFHITSAQFGYDLLLGTNSLSKLGFLLYDTANKEMIEFEEISQNDSNSARVIFSTKIQPRSTRLIEIGVGDQWNGKDVVISPQTVKGNVKVEESVGKVENGKVVAQITNLSAFLAQIDEKTEIATVESAEIVFDSENSIIQAE

SEQ ID NO: 145025 - protein, 19 aa, Heterodera glycines
KNSNINLYQVKIIQNYLVF

SEQ ID NO: 145026 - protein, 41 aa, Heterodera glycines
MDLTPEQERELYNAYYRPNVPEDLTEAELSHETHLEAFNRA

SEQ ID NO: 145027 - protein, 181 aa, Heterodera glycines
MQKVKIRVGQIMDEEYLIQLDEMFPEILQIDLLLPWTQTVLYKRLLATKSGTDQHLRIECRFALPVLFHRLKWLIVKTPTLKGKVLALFREKLRKVQRIAFRGLRRELVGIRQTELMREELLKSVCILQRFYEFASAISALPNGAKEMPTEEEIRNWNTGRNCMTEEGLIRAYQVDKGFIL

SEQ ID NO: 145028 - protein, 502 aa, Heterodera glycines
MSKIVRAKMISFSLCFLFLLFLANLNDGGKNKKLKQKPMKSAQKFEEKKIFWERNGEFSMAKQWTEKANECLKNVDTLAEKEEEEEEENGEKDECNKLMANFVLFFKKSASNDAAAKEIVPTLNVNSMLWFIRRKIINLLNFSKILFANDENVVGIIEEFVREWKKTFGKNWRENAQKKREICTQYKFGIYFIKLMVYYAKSCEALAEYLRKEISLEIFRVDEAIFLNCDINGQTEQMYNNLLEQIGHINGQNFMELLDIYENFREFFNGFENEKMRKTKEAMNKLVKSEYVTKIEDKFPNIFRIDIILNSSLFERLQSLLTNKSFSTAYRMEFSRLTMAFLIDRSFNSDLLLIGGGKGAHSSDRITANWREAMAEAIAAAYTDLGSEQNLCMLIKMNEFAQLISKKRNEKGSEKLPWDLRMDELCEDGTERAKIMDKFVGAELGEIYTAAIERVVAYRREHFIGILRIPGAKTRLKQLVESEQRMTELASKNGLGEALREI

SEQ ID NO: 145029 - protein, 111 aa, Heterodera glycines
MLGFVYADDLSELNGDNAMEVLYAAKKYNITGLIGPPLQIPISELRNVFLAYAQALLFELDALRWADEKCRQNGVECSPENLRAVLGPALFKIHLPNFHEADFSKYVGKNV

SEQ ID NO: 145030 - protein, 50 aa, Heterodera glycines
MPRKMKRIVSLNWLNDAIAKRQVTAPSKACHLPSIWSSTRYNPKTFAKLS

SEQ ID NO: 145031 - protein, 154 aa, Heterodera glycines
FFLIFLPQTWYQQLPSLVWPYQTILRYLKRKQKKFLTKKCLSLFSHFFTAKLVPTVAFSCLALSNNLTIFETQTKKILDQKWLSLFSHFFTAKLVPTVAFSCLALSNNLTIFETQTKKILDQKIAISFFSFFYRKLGTNSCLLLSGPIKQSYDI

SEQ ID NO: 145032 - protein, 88 aa, Heterodera glycines
MGTNYSTSNSAPFDYGMTSRKKGKNRTYESNHFDKNYLIEGTEFWAENEYRKDSYLFERRKGSDRANCEFEKGEEAIDQFISRKGNPI

SEQ ID NO: 145033 - protein, 654 aa, Heterodera glycines
MDSSFFYSNNSHISNSYPKIEKKKQNEIGDTLFRNKRSTNFLIECITGGITLNIINPVDIIGVCSQGYCITINKPNLKETIIFPQEIIKNNYEFEIKLILNNTITEVSKSNCNASPICEMIKCKICIEYLRAPQCIEHFHFIIIISVVLFTIYILSISMQIIKFIYSTLKWIFKFVFFCNKKKNLKPKTKSKSRSYTLKSRTAILLLMILNFIHLTKSCDEITNLIANSTNCPRDENGKIECTFDQTILISIKPEHKTCLKLEDKIRNTTFKTIKFSTEELILTCERESEYFMRNYEILSESVKRCPTMGQCQGSTCEKIKSDSSNPEISDKANKKPGYSYCVPSCGGWHCQCFIATDGCLFYRTYMEENGNDYFEVTKCNQWPIELNFKYEIESDDGSTADSTLLKPGILNKKDNIEMTLTTMTIPPTPIFGSKFIINKVNNDAIIVNNEDLLRNSIRCPDENSAKTFSCKFPPEACKCNGGDTQVNCECTKDPLPEMFEQQNEKLPIDFKGSHLFFENNQIKAKLKQTTALQLQITLKGFKTTPFYDKTKCTVESISLSGCYACKGADWKFKCKSEFGSALAQLVCPNQKVEINCDTEDKEQIIQLTYNIEEINEKCSLICPGVKRKAESKPDTELKHTKKDENKTDEFKIL

SEQ ID NO: 145034 - protein, 558 aa, Heterodera glycines
MITEIESLVNSRPLTFIYDDINSYQILRPIDFLLPHQNICIPPILEENEFGDPTYKPKFNSYEKTVELWKKTSKLLDDYWKLWTEEYIPSLRERYQINHKNPKQCVKDFPKINDIVLIKEELPRALWKTGIIKELIIGSDNIIRGAKIEFPNKSIMNRPLKLIYPLELSKNIDENDEINKQINNLILNSRDSIHTEIKKCSFCFSNDHLQIHCTKYKGYRMRKMRAKNLSLCYKCLKPGHRIKNCKNEENFCDKCKIHKSICLNYREHYDQNSSNNDDLNNLLSKKRNNLSQTINSTPSTLLQKLLFIALLLFVVPMNTYSNYNCPKDLKNYTTILTSFCVEEGIIVRKNLQNNEFCSDMLSCLNRHLIYNHTPYCGPKCECSKWAQQCSFVPYQSIKKYNKKIVKKLIRQAGPSICAFKQNPRCMNKTKGKFHAIRLYDNSIYFVKNLHIRYAQIESKYDYLCLGEGNLTIGSPGYCELFHCDKKGTKFCYHDQRERIYLILGKIEIPIKEWGIIETEYYTEDNQKRKKHKQKESLDSLFFNSNYTESHQKAKKKKD

SEQ ID NO: 145035 - protein, 113 aa, Heterodera glycines
MLRLEEHRQLGDSEEIADGLAREHAEYGTEALDDVIRPCRTLRKRGIELSEKGDDLSELLNSTKGSDSVGPKCDELNRMAEVLGGAVERRGQMLEKSRKMHAQIAKVSGEKKL

SEQ ID NO: 145036 - protein, 136 aa, Heterodera glycines
VFGAVSPNRCAQIYGETESFRNSFPIACTLILRWIFAPHNCLSTPNGHSLEKIDFFVFGAVPPNRCAQIYGETESFGNSFPIVCTLILRWIFAPHKCLSTPNGHLKKSIFLFSGQSPRTDAPRFMGRPNPSGIASL

SEQ ID NO: 145037 - protein, 24 aa, Heterodera glycines
RTLSTAVRQRSSKIYSMPQILWAG

SEQ ID NO: 145038 - protein, 24 aa, Heterodera glycines
RTLSTAVRQRSSKIYSMPQILWAG

SEQ ID NO: 145039 - protein, 122 aa, Heterodera glycines
MVPSIRKTADLVQEIAAASAEQSTGLEQINNAVHQMAQTTQMTASASEELSATSEEMSAQAMHLQDLMRFFRVGEMHKSAPRSVKAGPGSGGTGKQERMRRLSMLDAAEDEASVDESSFKRF

SEQ ID NO: 145040 - protein, 238 aa, Heterodera glycines
MHIFPWLNPEQVSRKLALLSARFDGLVDTHFKSRKWAFVWMLIYYSNNVNRSGVSGVDVGFRGLRIDELTPSKNLIDFKCIELRYFDSSVLSLLHRFKPLFLMGITLQLMGKGMEAPRGWALRIHQLLPLIGITNIHKLYVSTGGYSRLCGLLVSISATFLIDCPNLRLIYYDAIMTGPDRPFDTAKKVQEWLQWPRGDGRPKVLFRSYQLPIVDEFKQARRAQAIGRNAYAKASNHS

SEQ ID NO: 145041 - protein, 114 aa, Heterodera glycines
MKFLISNLQIMDRNDFLTATIPANYIICFISFGIHPENVEQFQLDNKRTNERLKIERKVLDQQQQQKSKVCMTRAPIGRDERQWAEWMRKAWQEEEKRNLLIFWISEANMGPDI

SEQ ID NO: 145042 - protein, 105 aa, Heterodera glycines
FCVGFLLPINCLSTPNGTLKKIDFFVFGAVPPNRCAQIYGETESFGNSFPIACTLILRWIFTPHNCLSTPNGHLKKSIFLFSGQSPRTDAPRFMGRPNPSGVAFL

SEQ ID NO: 145043 - protein, 135 aa, Heterodera glycines
MNVVNRQLMITAENRQYKKGRLAEKRKDRNAAFKCTFGEDIAKVLINPRQLLQLLQLGPAEFERVVVGLYVVHKVAKFIAPSAEHIKRKAQELEEALRETQQMKRTAEDLAGPMHNTKRIKDNEQYDEEEEDDDE

SEQ ID NO: 145044 - protein, 79 aa, Heterodera glycines
MSNDVTLANHMESSGVPGRIHITDATLNALNGTYRVEVGNGQERSRHLVEKGIKQTWLVVSEEGKEKAADHRKLHSVIK

SEQ ID NO: 145045 - protein, 65 aa, Heterodera glycines
MVDQINKAKSEEIEKMREQIGQLHKEIAMIKQNSEWKMQEIFTQFGRIQTGIDELKHQNENVLIK

SEQ ID NO: 145046 - protein, 56 aa, Heterodera glycines
MNGLKEHIGEEEYVKLEKVLEEKRQAEQKPSIIEKKHDKDGENSEEGMGKRIKDKR

SEQ ID NO: 145047 - protein, 39 aa, Heterodera glycines
MICSVLHLFYHYKMILLLLQELIKQLIDFIHIWYIFWTF

SEQ ID NO: 145048 - protein, 95 aa, Heterodera glycines
MFEYPKRTLEKIDFFVLGAVPPNRCAQIYGETESFGNSFPIACTLILRWIFAPHNCLSTPNGHLKKSIFLFSGQSPRTDAPRFMGRPNPSGIASL

SEQ ID NO: 145049 - protein, 86 aa, Heterodera glycines
MGNDGQKGGEGPEYGGKWKKEKTKSKGKGRKSEKGREIWGKERRREKKRILGAIGKWEKGKGKREEKPKENGKKRLLGLCLFTFIV

SEQ ID NO: 145050 - protein, 140 aa, Heterodera glycines
MREQIEKRSGFVTKWFNKWPNVAEIEDFERGLREKKRNLAKWSTHLEEVLEKAEGKVTTKEHLKEVFYDAVKVKRITKATDAKDFISICDLAVDERMVKRKLRNTDLTKKSESATLSWASWATKQACKVQIGKKSGKMKE

SEQ ID NO: 145051 - protein, 112 aa, Heterodera glycines
MTLANCRIPQLCFILLFALLLLINLAQSDQQLSKGILLITFNHFIYYFAIFGEQSPMDAELDTNNEHEQHYGDGVFVDAVPMCGGGANMPKRAFVEGQKINGVKAADKVPKE

SEQ ID NO: 145052 - protein, 52 aa, Heterodera glycines
MCSFCPIHCAVALRPGGLAPMDSDPDASKIHPMSGVSSSSTPNTAQTIWGGI

SEQ ID NO: 145053 - protein, 115 aa, Heterodera glycines
SCIGLSLFAFQIVIGICAMQRKANSKPMRSIMLKMNEFYKDFLDFVIFPEETILNESVENWPLCDCLISFHSTDFPLKKAIEYEKARRPYVLNDLHRQFDLVIRRPPFRPISNPE

SEQ ID NO: 145054 - protein, 44 aa, Heterodera glycines; identical to SEQ ID NO: 126591

SEQ ID NO: 145055 - protein, 153 aa, Heterodera glycines
SVGWRVYFGPFLVRGAICLVYSDNERDSSLLNSWLIASGHNFLEGFSVFSRTKLSNNRSVMPLDVRGCTRATLAKSACLPSRKGVGKPVICRDWDRTLQLLSVNEEFLVGASHQLALNTSLPFVHTARRCPGTAISRNSGTVSVSVSVGMQTG

SEQ ID NO: 145056 - protein, 199 aa, Heterodera glycines
ESGRVRRDAAKTQSAGQTLRGIAEWSGEAAIERDEVKIWPKLVPVTSKSEPSPILWPPVPTTKRPQTVPKEEGKKRISGGNDDELQTNGESRKEKKKEEVFRDLPSGVEVVSSLVEKAVENGQKSRNKTQRQKIMETLGKVGTENGRTDHSHIYHLPITLRQRTEDELGQKSKIDQHNKCREFWIAIRPSRQIRDERLQ

SEQ ID NO: 145057 - protein, 79 aa, Heterodera glycines
IVKNIRKLFSVLIMLYNTFKPRREAGQFQNFVPHFTVESPSTLLDNYVSMSTVAFGQLWNGKMGISDGVRSFLKIPLFV

SEQ ID NO: 145058 - protein, 51 aa, Heterodera glycines
MMSKIGRIFTGVLALSSVAPGAANASQKGGEVQAVKKQQCAPPPQMPGRDL

SEQ ID NO: 145059 - protein, 95 aa, Heterodera glycines
MGDGIVGQVQAGQLSEVDKRFGKTEQRKFTLKNGENFGKNGGLPGHNVCAYVQIGQIVAETDFFSHFDNFWGKKDWDKLVDGFLKKLKNWNHAKS

SEQ ID NO: 145060 - protein, 722 aa, Heterodera glycines
MDTDVNEIAEFKSNNLLHYLPHNPVIKESSNTTKIRPVFDASAKLKGNNSLNDEIHQGPKLLPDLCGLILRFRLKNYVLIGDLEKAFLRVGLNELDRDTTRFLWVNKSYLNEIRQNYREIEMRDIELRRFTRIPFGVNASPFLLTAVVNLHLSKINEMFEKFKTIQVNKELCLNDKEEEFKNLCVELKQNAYVDNFVMMCDDEKEIQFKHYWSKEIFKLASMNLREFVSNHEQSNKEIQKLEGSEIPKVTKMLGIKWNVDSDELELQIKIPLMSKDTTKRQILTMIAKNFDPMGWISPVILKYKLFFQKLWRLNKDWDDKLDDQEIIEWNNISNTDMITIPRSPFTSQYLNHSILHIFSDASELAYATSAYLHTNDQVNLLFAKTRLTPLKGLTIPKLELLGLLIAARAAKFIKTESKLNLENTYIWSDSKCVLSWLKCKKNLPIFIKNRVEEIKQIALELHITFHYVKSADNPADLASRGATMSELKYNKLWWNGPKWLKLEEENWPPHSFYSPDQEEAPYLDNTEEIINTQINLIKNEYNGIIEWDKFSSWLKITRICQTLLKFIFFKLQNSKKFKEKFIYSKFENALQLKIMAQKMLIRIIQREMEPNKEEERQLRIYLDNDMILKCEGRLKNAQIQGVNPIFLPRKHYGTHLIIMDYHTRNLHAGTMTTLSEIRKTYWIPKGRRIVDQIRRQCYHCRRYNAKPFQQPQMPPLPKSRVK

SEQ ID NO: 145061 - protein, 35 aa, Heterodera glycines
MAASSFRHRWSYSFTSTSAFCRVSNADGLGDATLD

SEQ ID NO: 145062 - protein, 151 aa, Heterodera glycines; identical to SEQ ID NO: 132093

SEQ ID NO: 145063 - protein, 77 aa, Heterodera glycines
MEGKGPKGKGIYPFQEISMKRIKAAGFAWCLDGHSPLLTVLNSASNWHCFRPVSMLQWTNISTAEGLVFCNTLDGHF

SEQ ID NO: 145064 - protein, 61 aa, Heterodera glycines
CQKLIENINLYSGYSSVKNDATLAIRPRKKSSFEWYLQIKCQKEAEIQKKIPSQGQATIAV

SEQ ID NO: 145065 - protein, 17 aa, Heterodera glycines
HKHLFDLFYHIHNLIKI

SEQ ID NO: 145066 - protein, 25 aa, Heterodera glycines
MILEYADPQNVQVSKLSFFIIRMGL

SEQ ID NO: 145067 - protein, 41 aa, Heterodera glycines
LGHFVGQRIQESFLRVFANQTGQSWYHSKAADEENLFLSKC

SEQ ID NO: 145068 - protein, 32 aa, Heterodera glycines
MAQILSKLALQVADYVTVYLAQLKTCFRKNKK

SEQ ID NO: 145069 - protein, 87 aa, Heterodera glycines
MDKEVELSSTIFPICIHCGAREKFEEGKAYIAGWGYLKNSCTQKSQKSPLTLMGRSAQLVKCKKSFFNDGQERICIEKNTIEQVGKF

SEQ ID NO: 145070 - protein, 15 aa, Heterodera glycines
LKAIHCLPVLGTAKH

SEQ ID NO: 145071 - protein, 43 aa, Heterodera glycines; identical to SEQ ID NO: 136181

SEQ ID NO: 145072 - protein, 58 aa, Heterodera glycines
MAQMSAHGQMAKLLSNNFLKFDLAICHCAEQLRLANKVGFPSTQKMSIPSAWSWPICI

SEQ ID NO: 145073 - protein, 240 aa, Heterodera glycines
MLHRQFEPCQHRGTEDHQEAERAAQGVAGQPGGHAAPVAANAGPGQLECERVTHCICFCHLQYALAQRKVSALAAELEECKTALDNAVRARKQAELDLEEAHGRINDLQSINNNLTAIKNKLETELSTAQADLDEATKELHAADERANRALADAARAVEQLHEEQEHSMKIDALRKSLEEQVKQLQVQIQEAEAAALLGGKRVIAKLETRIRDLETALDEETRRHKETQNALRKKDRRIK

SEQ ID NO: 145074 - protein, 19 aa, Heterodera glycines
MEGTTTRPPTLTLALHSLK

SEQ ID NO: 145075 - protein, 108 aa, Heterodera glycines
MPINPTNVILLLQEHYHGKAPPPTQLTPEEKQLAKDFLNTLEFCAKQGSEIETLEDLIVDELAVFDQKDQQDSDEQFDLEDDESEDSEGSFSSPASTVFLFSLDQFLH

SEQ ID NO: 145076 - protein, 32 aa, Heterodera glycines
MLLMNTNKLCRQQHRIAYLIQLMKRTIAKNAF

SEQ ID NO: 145077 - protein, 49 aa, Heterodera glycines; identical to SEQ ID NO: 137875

SEQ ID NO: 145078 - protein, 127 aa, Heterodera glycines
MMRNGTVTIPRPDTAPKCVGKECKAAKKERKDKPTKVRKDTVVVPYGGYTVIRWKIGDTRFEDAVHFFGSVLALLTDLLLSDFFHHNVTGRRRFDLKISQKENRTERVEKRTRWMRFSKKSKAMSNV

SEQ ID NO: 145079 - protein, 94 aa, Heterodera glycines
  unsure (1)..(94): unsure at all Xaa locations
SSFXAETEEPIYGLANLDYHWHGETADPNWDGGEKVDFLLNRCTARQCVLLGCPFRTENGTFAAFDGRKFKCHSIDELRNNGKLNNYPSGHGYD

SEQ ID NO: 145080 - protein, 303 aa, Heterodera glycines
MPVSIIPDPNDPYFIPSVPMYRDFRKEIDLNDSICDRFFEEQQSPKAGHPVEQPVPKVQAKQRPVSRRSLSQVREQTAIAQPTMRFGNTSRRSVITKGTSNEGMPISSGPVTRSTFSSAKASDVSHAVRSTVPEVQAKQRPVSRRSLSQVPEQTPTFVQPPMRTSRRSVFTKGINSEGMPVNSGPVTCSTVSASKAPDVSHAVRLTVPEVQAKQRPVSRRSLSQVREQTSAIVQPPMRFGNTSRRTVISKGTSNEGMTVSSGPVTRSTVSAAKASGVSHAVRGICVVRNMPTNNKKQQTKDKQ

SEQ ID NO: 145081 - protein, 191 aa, Heterodera glycines
PEGIYEGGGRCVECQHNTVGVNCEKCLPGFYRHNTVGVNCEKCLPGFYRPTNVSHYRTDACRPCDCDLVGAESNQCIRDETEVTEQMRRPGDCRCKLGFGGRRCEHCALGFRNHPICEPCPCDSAGSLNFDTCEEDQCVCKRNVEGERCDRCKSGTIYLDRENPEGCQPCFCFGKSTECREFDWDTAKVGN

SEQ ID NO: 145082 - protein, 123 aa, Heterodera glycines
MYIKIYKPQPICFTLAEKDGNNCDLRLFAIVGQSHVLGTEPNAKAAAVTENELPQSYSATLPPPHLDATADFFSTSNSDNDVLPPFDLVASVALPPAVQCRKFFADLRPVRVCWFCGVRENDI

SEQ ID NO: 145083 - protein, 94 aa, Heterodera glycines
DFCEIPTIFRAHFPQISADLRHCRCFCVGFRAEHMRLTDDSEQSQVAIISVFFGQYQALMPILFVFLMNYVASVLGLNQYIMSITPENHGAHIL

SEQ ID NO: 145084 - protein, 68 aa, Heterodera glycines
MESDSNPQQQSVPVQQLPSDASPQPQQNGGGDSADKIGPDQMRLLSAQIAAYKMLARNEPVPRALLRE

SEQ ID NO: 145085 - protein, 169 aa, Heterodera glycines
FQQKQLRSAQACAWAAKETEQVVMTQRWPGIRASRTWEEPSRRWTQLRGQCTGTHTSTPDFPVRTLPQAKGLRALMSRVFSNASTLVPRQGVPIHELIGLVNHGNTPLTRIPTPPPTLGSASPVLSSPQHLCLRPHLHKSINSANFFNTQTSCMFIRVDSCQSLEKLRP

SEQ ID NO: 145086 - protein, 18 aa, Heterodera glycines
PYRDRDLSFSKPGTGNRD

SEQ ID NO: 145087 - protein, 248 aa, Heterodera glycines
MTAHVPKVAGRESYKLWGKFTPQIEVIINGFAARIEILYIIKVGYFNAFLEAMQTFQGGTEDQFFVNNRVTLRIEPPNDDIVHGPSGSAAVFCAVFGLACNRLCSSDTVVSATLERGQLFGVGSLLFKIRAAKAKRMKTLVLSVDNQLEWEEIAASAPHEIGTTRKVAAYGLHASGRTPTALLDGDVRLGLTLGALLLLLLRVTEEVQVGHDQLVVHHKARLTTDFAAQQQNFTSQQPPNQSDGVLLL

SEQ ID NO: 145088 - protein, 118 aa, Heterodera glycines
MRFHREATKRSPRHRPEKAGECLGVQVIEDDNGNVIDGELFIMTANVPKVAGREPYILWGKFAPQTEVINGFAARIKILYVIKDGYYNAFLEAMQTFQGGTDDQFFENNRVTLRIEPG

SEQ ID NO: 145089 - protein, 84 aa, Heterodera glycines
FFCVNLLKCSSSIEEGKLLGSNADNISGYRFDYNIFHLSRTDCNRQFAGQRQFSEHLMRFHREATKRSPRHRPEKAGECLGVQV

SEQ ID NO: 145090 - protein, 185 aa, Heterodera glycines
LIRLTNECPPPAMYRELMYEDSAAPIKKYCELCQSLPTYGVTFFLVKEKLPGKNRLIPRLLGVNKDSVMRVDERTKAVLKEWPLEQVRRWAASVRRWAASFKTFTLDFGDYKDGYYSVQTLEGERIGQLIGGYIDIILKKKRIVDLIGGYIDIILKKKRIVDSGGIEGDEGATMVEDIVAPAKAT

SEQ ID NO: 145091 - protein, 187 aa, Heterodera glycines
IDSGALFPDGIADDGPNATAGQALSKWLHTPSKNGQPKQLHRNNYFGPPKLEWVNNFKETFRRATTSVSYTIQLYIIVEPMPIEPFELVNEVTNEKLTLKHSEELDYNCLYNWLLKRCPIGETAPVKWKNRENSGANLNYIRFELRYANYSGANLNNIRFEVWGGNSCIGPLSLPAEEEEADESNEN

SEQ ID NO: 145092 - protein, 118 aa, Heterodera glycines
MLFVEKEFALIDELELLNQFVYQSQSQSSETQNQQKPRNEFYQIWTPFYMDSQLKKLSSDAEKTTNTRKRRRKAHHSMEERSDGRDFLLSNCRIVQNLFTKFQNSCKGFMEFDANVPR

SEQ ID NO: 145093 - protein, 63 aa, Heterodera glycines
MTDRVTREDGSVIEEEKTENGEFVVIFERANGNGNPSGFKQSKRMQKGRGYVIDLSPDLQVAN

SEQ ID NO: 145094 - protein, 135 aa, Heterodera glycines
FQSLGLNPPAFQSLGLNPPAFQSLGLNPPAFQSLELNPPAFQSLVLNPPAFQSLVLNPPAFQSLVLNPPAFQSLGLNPPAFQSLELNPPTFQSLVLNPPAFQSLGLNPTETQQHSNHWDNSPAFQSLALNPPAFE

SEQ ID NO: 145095 - protein, 66 aa, Heterodera glycines
SKRNEGIGGKAHDGIGATENGQSAVGRENWGGKQRVDSPAKGRGRVPSLPAAHGAAMFAVNGRPQR

SEQ ID NO: 145096 - protein, 52 aa, Heterodera glycines
MFGRCRSEMAKTNSWDDIRFIGLNFQPIETLGKALNRLRHLHAHTIAFIFHF

SEQ ID NO: 145097 - protein, 83 aa, Heterodera glycines
MHAFCARAIHHRACQSKAKQQRWCFERIKGIESVNRLLEKYICNLSTILRKSVNRLLEYIFAIYRSILRSEVETSRFNQFSLL

SEQ ID NO: 145098 - protein, 62 aa, Heterodera glycines
MAHPPTLFPNHSPVGRFTPNPFENHTQVGPTPNKQLTPNPSTDCAQIEQLVPNGRLVPRWTD

SEQ ID NO: 145099 - protein, 17 aa, Heterodera glycines
MPLVFILGLFSRIYIKI

SEQ ID NO: 145100 - protein, 32 aa, Heterodera glycines
WNVPDGERRELKLYTEEGLFRLVTTFATKEAE

SEQ ID NO: 145101 - protein, 83 aa, Heterodera glycines
MSPIALKIELIDSPILYFMRKNWHCDKIPDEFEEYERTECQKYRKYLDILYEYLYREYVGIPTVKPKFVFKKEIEIEGPIIYA

SEQ ID NO: 145102 - protein, 227 aa, Heterodera glycines
YIDHSVIKFFRSKKRFFDKSGTKLEVFVHSIDTYVQPIWDVFTREIWPIFAKSIRHLGLHNANALDNLRSRISPTLLTDLDQFSIDSGYLCPDGIADDGPNGNAGQALTKWLHTPTKNGQPKQLRFRAYVSPPNFEWVNNFKETFRRATTSVSYKIQLYFWVEPMPIEPFELMNEVTKEKLTLKQEIDEFDLNVYNLGKPRKSEPLAPPAEEKEGEEEADQSNKNVV

SEQ ID NO: 145103 - protein, 57 aa, Heterodera glycines
MRKVITNFAELNGKWVTKWPFLWQYNCPLKAFSEIQSKDDQLPCPNKGRSIAVCQIS

SEQ ID NO: 145104 - protein, 17 aa, Heterodera glycines
MMVLLLLFELDDEFSVQ

SEQ ID NO: 145105 - protein, 98 aa, Heterodera glycines
INRFIFVFGAVPPNRCAQIYGETESFGNSFPIACTLILRWIFAPHNCLSTPNGHLKNRFFYFINIFSESALKRTKLYLHVSLGTLMLFLSKREMEKNF

SEQ ID NO: 145106 - protein, 24 aa, Heterodera glycines
MYGYKLEAPKGYDLSKKKMRTIGE

SEQ ID NO: 145107 - protein, 182 aa, Heterodera glycines
MPTITELGQYVCVFRTNSTEFDLLFFTAERTLIRFPTDARASWPMIVATIRMRRRPLFYVFNHILPCVLISSMALLGFCMPPETGEKINMLNTVILSMGVYLQSITESIPPTSEAVPLIGMYYVASLAIVCLATAMNVYTLNIHRRGTTNQGRRVPWWMRKYILGYLATFLLIRVHEPDSIT

SEQ ID NO: 145108 - protein, 948 aa, Heterodera glycines
MEHVILADIEKAFLQLGIRHADRDACRFIWLNNPETAELNPISHSELRIYRFCRVSFGLTVSPFLLNATLREHLALFDSDLARRIEENLYVDNIMFDAKPTEKLQDLVTQAKTIFEAAGMKLREFYGSNIEELKKLQPDDLAKDLEDNKVLGIRWKPKHNRLIFKLPIFEGKITKRTILSQIAKVYDPLGLMSPVLLPAKLILQEVQNLNPKWDDELPANINKDWLKLMAQWLDRGEAITIEFPRHIKDIDSVEFHCFCDASKYGMRIAVYQKAKTTIMKDECNLIYAKSLVKPIKVAAHDGTIPKLELQALTLGVKAVKFIQAQIKFADHQVIMWTDSQCSVERLRENKRQDRFVANRLQKIREANFQVRHVRTDSNPADMASRGADPQCLRTALLWRFGPIWLSKADKWPESNVIYRPGDEFKEVEKPPIVDIPEQPIQAVHSFIASVMDDSVSLAGSDDESQQPRPKKKFKIPKRRSALLRPIGQQQSPLQGQHKRRKQLQDSGLRKLFQAISDQQGSSKATTKAIEESREVQKAPRHEQIEHEQRMVRKSQQEANRHLQPKKRQQKEIQEVPHSTTEEQQRETKRQQIERQQNDEQRAINQQTRSKAWQELARQFDYDLMDQPDPTEKQPEETDQPTKSKQQSTKDKEDKELERHRIGRKKTIDMQEKRQRSRDEWPEENETLLSYVQRIYGPENWTSAWQRGRVLRELHELEDQGRWMIHHKSDRLQLSVSRMYGGKRPFAEFRFVEGRYYSHMVPEDVIFLQAVPTEEQLEIITINDTTAPATNTEQTKHPTKPQRPQSPKLEEYRMADSKPNTHSQFNLFEPCDNTHTTCAKTATYGSTAGNRFQMEEFQNFRANNFFEALLFNWLTRNMNLPAEEIWAAHEGYIQSDTTVEEVAQMFYQQKVADNGRQIARDQHLNEVINVWRNSCDRFGELYNQPAHKQ

SEQ ID NO: 145109 - protein, 223 aa, Heterodera glycines
IEENLYVDNIMFDAKPTEKLQDLVTQAKTIFEAAGMKLREFYGSNIEELKKLQPDDLAKDLEDNKVLGIRWKPKHNRLIFKLPIFEGKITKRTILSQIAKVYDPLGLMSPVLLPAKLILQEVQNLNPKWDDELPANINKDWLKLMAQWLDRGEAITIEFPRHIKDIDSVEFHCFCDASKYGMRIAVYQKAKTTIMKDECNLIYAKSLVKPIKVAAHDGTIPKL

SEQ ID NO: 145110 - protein, 170 aa, Heterodera glycines
MRHQISWSDEAVLHVLFPVLLPLLLLTGVVRSGQPISGLPDDGGFDMPERSDGAKVGHLRHAFSILEPELAQSVWSREGLKNPIRRTTTIPMNDRLDIGNTGELQPKGRFSDQRLRAITFLITHSLSAGANKPMKRRPRKAETVSEYDTLNDDFLTEYDLLNLDFSLDEP

SEQ ID NO: 145111 - protein, 154 aa, Heterodera glycines
  unsure (1)..(154): unsure at all Xaa locations
AHSNCPRRATDSYLLTNIYXGNNIHKGTTRIMVQEVLKRFARIRFEQWRNVRQIKTKLGSMKRNCSFPPVDDHSWKRKKVGNEGGKVAEEDVIDRILFSPSQIPQNLSERFHRLKKMDRISRHQMIVPICGMSSFVGLSNVRIAKMAKSCSTHK

SEQ ID NO: 145112 - protein, 60 aa, Heterodera glycines
YAQKASQTILALPIPSTIAFIHPIMSAKIIRVPKIACDLSLAKNGVSKIVITLKKLLKQF

SEQ ID NO: 145113 - protein, 123 aa, Heterodera glycines
MLYNLENYVIFGGFLPILALSLFLAFRLSHSDFVHPPSPLFSAAAADQRRRKDDASDQFVLASVHVFSPLPADDAPLSPTKHRQFNLGVVANLLAQLLPVPPPLPLFMGNVEPANAIADDRGY

SEQ ID NO: 145114 - protein, 75 aa, Heterodera glycines
MASVSNDYRQMKTVPPPSKYQPSNQTGQGKRIVDSLWDLRLDSILGDQQITEAVHQLIVAIIIIALISAVLYLEV

SEQ ID NO: 145115 - protein, 113 aa, Heterodera glycines
SASSDSSLTSSTASSTLNSTNNTTESEEPFHGQSRKGTSQEESRNEASDKTFMQKKELHLPISDTCFSPGRFHPQPFVAHRTAKWEQAKVVEQHVPYICDEQPKRKPKRFPLD

SEQ ID NO: 145116 - protein, 37 aa, Heterodera glycines
MAPINMSSEDPLYLAYRSVGPSADLIVPAVALNLVVL

SEQ ID NO: 145117 - protein, 103 aa, Heterodera glycines
MSNFAALKASQNLLGQFQQHQQMLNNCHASPAIQRQRSIDYDTEREKNSEMGPMTGGVGTAMSTADLVTALGTIKAQNNSSNIGTDKCEDNEKTRRNLRNFVK

SEQ ID NO: 145118 - protein, 92 aa, Heterodera glycines; identical to SEQ ID NO: 125147

SEQ ID NO: 145119 - protein, 75 aa, Heterodera glycines
MIGRAVRNIPFIFEGIFKFILYPRKMAISFFEKFYTSQKRLRMRRRAVHNRHFISQRIFIFRGYPRKMAISLFDK

SEQ ID NO: 145120 - protein, 82 aa, Heterodera glycines
FIFEGIFKFILYLRKMAISFFEKFYTSQKRLRMRRRAVHNRHFISQRIFIFRGYPRKMAISFFDKFYTHTNALEHDREGGAQ

SEQ ID NO: 145121 - protein, 124 aa, Heterodera glycines
FYFREFLNLYSISEKWLSYWLTCVKELKRDFSQKIVIASIMASFNQQDWEFLASRSEEAGQDWEFLASRSEEAGADALELNLSCPHGMGERGMGLACGQVIQISIFKYISFSFTKVENISTYFI

SEQ ID NO: 145122 - protein, 75 aa, Heterodera glycines; identical to SEQ ID NO: 138893

SEQ ID NO: 145123 - protein, 16 aa, Heterodera glycines
EAIPEGFGLPINLGAS

SEQ ID NO: 145124 - protein, 100 aa, Heterodera glycines
MACHPEYQQKVHAEIVEHFGAIDGEEEDDEQLLQLTASDVNKLPYLDRCIRETMRMFPLIPILERELQADLRICDKTLPRGAIVAIMPLVIHHNEKVGEG

SEQ ID NO: 145125 - protein, 145 aa, Heterodera glycines
MTGLPFSPSIDSSNHKTTKLFPLVNFLKSTLNYVDKWFRVERFPTNLKWISLKEMKVTSAEVMSLAEQIAPEVNDNELFDEITTLNEILESISDEKFGEMNAEQKWMKVFEAELPNLVLLVSKILSIPVSNACVERVFSLFSSVD

SEQ ID NO: 145126 - protein, 548 aa, Heterodera glycines
MAVAAAVIVGLQYFINRLAYTEISWKQFYTDFLEKNNVERLEVIDNKWVRVITREPTQTVFYFNIGSVDTFERSLTQAQQHLGMETSQQQVPVLYKSETDIVGMIPHMVNFLITGIFLFYMFRMFRGFGGKKPGQRGGGGGFPGMGNLFGVGQSTARVINREDVKTAFADVAGCEEAKIEIMEFVNFLKNPAQYKALGAKIPKGALLTGPPGTGKTLLAKATAGEANVPFITVSGSEFLEMFVGVGPSRVRDMFEMARKKAPCILFIDEIDAVGRKRGGKGAMGGHSEQENTLNQLLVEMDGADIANVCNESALIAARDAHDEVTSKDFENAIERVIAGMEKKSQVLQPDEKKTVAYHEAGHAVAGWFLEFADPLLKATTYFPKLISIIYFPIVLGVNHSAWKGPRLRAIYAQGSIPLLEGAAAGQNVHDFGCVTCGRVSEEIFFGRITTGAQDDLRKITQIAYSQVVKFGMSEKVGPVSFDTPEPGEMAFDKPYSEATAQLIDQEVRDMVSAALRRTRELLMSKVEQIERVALRLLEKEILAREDMI

SEQ ID NO: 145127 - protein, 74 aa, Heterodera glycines
MRRFVNSAKCQRFVNSMIRQLSQNATIRQLSQIQNATIRQLSQMSTIRQLNDSSTQPKCDDSSTQPNVNDSSTQ

SEQ ID NO: 145128 - protein, 39 aa, Heterodera glycines
VRLGYSNNYGEQKSNAELSTGYKGAIPAGFSLPINLGGI

SEQ ID NO: 145129 - protein, 95 aa, Heterodera glycines; identical to SEQ ID NO: 124528

SEQ ID NO: 145130 - protein, 194 aa, Heterodera glycines
MPKQNEIVVKYSFLDLTWFLDIEAVFYAISKTVIPNPQIFESGFQKKCLVVKTIFHISLHNFVSSARIETGIRPLERAARALQEVKKLFEFLQFCFHNFRKLFGIIMPKQNEIVLKYSFLDLTWFLYIEAVFYAISKTKKCLVVKTIFHISLHNFVSSARIETGIRPLERAARALQEGMERKNSYFWDFFRNQN

SEQ ID NO: 145131 - protein, 58 aa, Heterodera glycines
MLSVLFAGVIAFCRQSRKGAIIFSGLGLVIFLVTWLLFSAAFPLTVRVFCNRLSDLCI

SEQ ID NO: 145132 - protein, 56 aa, Heterodera glycines
MQEPNTSPGATSKALGDKLVPGALPLAMIRQLSMEQNEAEHKLEALLARLFNGSAE

SEQ ID NO: 145133 - protein, 153 aa, Heterodera glycines
MNAISGLDLPYTRMEMFAAATKPLIGTQGIVENLSALADFDLSKLQFPSEANSNDPNQGANIFSRQYIEEWFRYSARNVLKLNYDQSSADNKATAANYSSIETQQQQLYSTTASIQFSEAAALGVIQLNCLNARNIQQKVAEFVETLESHPNL

SEQ ID NO: 145134 - protein, 396 aa, Heterodera glycines
MDNEKIFRKASADQEIIKKNIGEWESKREEVTSLIAQAKNDFSGHIQSIKNGKQLSQLPKIQVPKPPPGPKIMPLAPIQPHSSSTSLLQNNGGGAPQQMPPSPLPLDRKVITPPGRSHIGASAPQQQGLAGAGLGQVRIASLNSPLNPNMTNAASAGRQSISSSANVTPVKFHSQPTAIAALSQPPPQAHPPGHFTTIAPIGVRPQNYQNGITVPSASSSSTTIQHQKMSGAQRHSPQLSGASMIGGAQFHANAPPPPIQQFHVVGNSLSSVGQPNATLQQKQQQANAGGGGSFQTWGGGWGDQLNNISELFGQGRSFGPLGSEFGGSGGGVVDGMRSASVIHPPAAGVIGAPSSTVSTGNNVSSNNPPSSQPIGAGRNLQNMSPSQQRNGWPSFG

SEQ ID NO: 145135 - protein, 33 aa, Heterodera glycines
MPPSVKGYDEQIDGPLKTFLDLSKKIGGDVATM

SEQ ID NO: 145136 - protein, 81 aa, Heterodera glycines
MLLYYLAAIFKGLHPRVDDDFVDKLNYHYTSAIIFAFAIIVSAKQYVGRFTTCPIFAWAVVGVLTSLFFMVSSKCFTWAMS

SEQ ID NO: 145137 - protein, 77 aa, Heterodera glycines
MINYMLLFSRQGKLRLQKWYVAYPDKAKKKITRELVTTILSRKPKMCAFLEYKDTKVVYKRYASLYFCCAIEQTDNE

SEQ ID NO: 145138 - protein, 150 aa, Heterodera glycines
AFTFNPTQSSSGNGDGSPKEFGAAGTTSPPQSAGLVKHHSSTNCNGRLSSDSRPSSPPAEACTEKQQHKIAAKVAGQSAGDGEDDQGEEEHVCSLQFINSPAIRRVPKLGLCLWLGTSAGAVVAFQLQVPTNRTGASLTVTPSAMFNGPK

SEQ ID NO: 145139 - protein, 20 aa, Heterodera glycines
TDQKRTKLCRDTERKRNNLF

SEQ ID NO: 145140 - protein, 54 aa, Heterodera glycines
MKFAPLALLVILLVSLVAAVSANSNNPFDADAADNGGMVRHALASNFRFWHFCL

SEQ ID NO: 145141 - protein, 100 aa, Heterodera glycines
MATAPAALSGHRLTPNFMFPPTASSTPIQRDPSMDFEHPVFMQNQLPMTNAKQRMPNYMKQQPNVQQQQQQQQHHQQTSSDDFDRAVADSMPELHNRSFQ

SEQ ID NO: 145142 - protein, 22 aa, Heterodera glycines
MQRLENFRHGSLCPHMAQLLCA

SEQ ID NO: 145143 - protein, 36 aa, Heterodera glycines
WMFNYRICSNYSPVSINPAVSNYSPVCLRGVLKNNP

SEQ ID NO: 145144 - protein, 17 aa, Heterodera glycines
SISTLRRRLEVLKLKIW

SEQ ID NO: 145145 - protein, 46 aa, Heterodera glycines
MEKACKIWRDYIDFSALEILGVSIIAVLFLCLFDALRKIWFASDQL

SEQ ID NO: 145146 - protein, 36 aa, Heterodera glycines; identical to SEQ ID NO: 143999

SEQ ID NO: 145147 - protein, 27 aa, Heterodera glycines
MHRIIAAVKKLVVGSVLAVRCTLCVLL

SEQ ID NO: 145148 - protein, 120 aa, Heterodera glycines
MVVQCVVVVPVFRSRLSRLLVRVEVVAASFGLKSQNIIIFSGGDVPLAFPRILFQNAMYTCVKGKMGKLDGQIFKMQMKIKVQLTGAGREMDEETIWCPKQRAFKKKWPNQSNIYLDIRM

SEQ ID NO: 145149 - protein, 77 aa, Heterodera glycines
ALGQLGLARTAYETAISFQPGHIDARINLSTILQQLDQSELALETLKDLNYDSCSHIPDERLLCRQAEVLLEQRKAD

SEQ ID NO: 145150 - protein, 241 aa, Heterodera glycines
MTHHSPSFLDIRTRNELLAHRLALCDREDEILRHFYTFMSPNERRPMENQQFNAQLEDEIEAEPIDLNLAIISYGRQFNKSQRGQQEGLSGDQVAQSRGESMPVNKGYGISDLAHLLLSSVNSSLRIHFLDQWVALYVHKFEQFRQIQRNGKGGGNTMPKVFANKNKLERIVKRQKQQFQASLPGQFLRVLPKLATDYRKLAEAKANPMESEQNQWKGCELLGRMIGGFEMIRKDFERRKS

SEQ ID NO: 145151 - protein, 74 aa, Heterodera glycines
MPSNSTPFDEGKQKMAEKKCEMNPGKNLEKEANAYGNLMDLPFMAKIEKFVGTAQFGIKKPFRKNHIVEHRNEN

SEQ ID NO: 145152 - protein, 133 aa, Heterodera glycines
MSKKNILNGTEIGEISRFRLIVATRKQAMDHYVACAGQPFFPKVISYMTSGPVVAMIWEGVGVVRGIRKILGATPDKVPPPGTLRADYRNNSDVGKYHDTVCHGSDSAEDAQREFGIWFDKSEMPAPLSRVSG

SEQ ID NO: 145153 - protein, 73 aa, Heterodera glycines; identical to SEQ ID NO: 137169

SEQ ID NO: 145154 - protein, 74 aa, Heterodera glycines
MAPATQLPQTNAPTPVVEDGPNQKKTSDDIPKQPEVFDETILVCYEALNSFPPTDKIVHQIQSLKKQYPHLFNK

SEQ ID NO: 145155 - protein, 382 aa, Heterodera glycines
MSTIKEKAHSQAMEKWEKEKAHGTVREQMQKKIERNSFRIRNRGSMAVITTMDSPTEFDTITEYISEQIVVLNERNRTSTKKNSVLIDQIHLFVLNIATESSKMFSKEKEEAQSGQSINYDVEMLHPRSAHFALTSLGLLMGETKMLDSASAHENLFTSVRLKWCTASPKLKSDKFPILQRSFPITPAHVSLRQSVCLTSFITNGKSVLLEVFPDVYQGRAEHCKLSPNLHQKLISHYLSRDVNGALLLHCVAMGKKGFTHSLLTDYSNLAKLSANFGGKLSSENVYGPKGSSAELANGLNRTAMAQLIQAAQIVPCPNEQFELVDDESDCDDGEERNSGEEGTEKARCQTVDQIWQNLLVQRETFAVGDIEKETAAERAPK

SEQ ID NO: 145156 - protein, 200 aa, Heterodera glycines
LDLIALNAGDANVWVTGLMALASGTVPGTNGTTASANLRERWLATAFREADADKKGTISEKAAMRLIRSLNTRLLTNRISKKMKNNGGEAQLQQKGRLDEAQFIEAYKDMSTRPEIYFLMVRYANKDYLNTNDLQLFLDLQLFLETEQGLSGVGVDFCENLIDQCEPSAEARELNVMTVGWTVITLSKGKGHFHPNHSSL

SEQ ID NO: 145157 - protein, 336 aa, Heterodera glycines
NSLEIHWSVFIRMIFQVVVLLMDTQGIFDSVSTFKNCATVFALSTMVSSVQIFNINKNIQEDIFNINKNIQEDHLQHLQLFTEYARLALDEDKKSKPFQSLLFLVRDWSVPHVAEYGSSLLFLVRDWSVPHVAEYGSIGGQRILDKRLEVTSRQHPELRQLRRHIRSSFDNIRCFLMPHPGRYVATNPHYRGELDRMELDFKAQLSSLANYVMELDFKAQLSSLANYVFYPNNLVVKQIGGQPITCRELAGYINAYFEVFSKAEMPEPKTILNAYFEVFSKAEMPEPKTILNTAEANHLAAVVRAKAVYMRETAEANHLAAVVRAKAVYMREMEEV

SEQ ID NO: 145158 - protein, 187 aa, Heterodera glycines
MEEEAQKDIEERDALSKRIREREKHNTRHVMSKSEARSKAEATKRLNISEKDDEANDMMGKLRYESRKSYLAKRKEDKRMELEAKVHDDETIFANEKLTKREQLDAKYRKEVLHYVKQYDEAGNVLKVPRYHVPDASSKIIPTEYVEENELPGGDGRRWEDEKLGSAVFHYGAKDAKAKPMEKGQIP

SEQ ID NO: 145159 - protein, 69 aa, Heterodera glycines
MADFDKHAAQREAESLRTLAFFGVCLSTVATVIAVLSVPFAYQHFQQIGALMHERSGLLQNALRQHVAR

SEQ ID NO: 145160 - protein, 101 aa, Heterodera glycines
MSGHFGTLTPRLVHPTSPVLLTKNGPLGAQHSTPGFRVKQPWLHTHLEFENSYPGGNFGGNQLLDGSISLSPLYPSQTIDLHVRIASDFHQSFLWLHPAQE

SEQ ID NO: 145161 - protein, 16 aa, Heterodera glycines
MSILLPLYLAFNEDNM

SEQ ID NO: 145162 - protein, 70 aa, Heterodera glycines
MDDAHFEPIGTAYWHYVDDNELQLFAQCPNLGPYDRKASEALIQIDHFDGLTDGDQWRFVNGAASIHSNH

SEQ ID NO: 145163 - protein, 36 aa, Heterodera glycines
NPWVLYPPTKFHLEIPRTPGDLPLSVEFRQTKYSTS

SEQ ID NO: 145164 - protein, 50 aa, Heterodera glycines
NKLRSHFIVSGNTSEKIDNVFGIHIGIGIIVIILGEVNVIDVVIECAVMF

SEQ ID NO: 145165 - protein, 21 aa, Heterodera glycines
  unsure (1)..(21): unsure at all Xaa locations
KYNVSYEXSFICNHAKMATRK

SEQ ID NO: 145166 - protein, 92 aa, Heterodera glycines; identical to SEQ ID NO: 140812

SEQ ID NO: 145167 - protein, 92 aa, Heterodera glycines; identical to SEQ ID NO: 127421

SEQ ID NO: 145168 - protein, 30 aa, Heterodera glycines
MKALSLPNFYLTKLWTKGFLIEIFTKQEKN

SEQ ID NO: 145169 - protein, 37 aa, Heterodera glycines
MRKLSCTVWNSMVGWGMPVTLHSNTTWPPICASWSDR

SEQ ID NO: 145170 - protein, 123 aa, Heterodera glycines
ETLEKLSPSSDNGDSEANSDQILARLLSVHQTDKAAKAKPTKSTQITFSDSLIDLCPPPTIGQEPLSFALGEDDPFAYEPAELGELADFDLPEDLPGLSGTGTGTGFFKNEITVTGLSSTGTA

SEQ ID NO: 145171 - protein, 25 aa, Heterodera glycines
TCTCGVVVKLSTFHNFSPGFNSPLG

SEQ ID NO: 145172 - protein, 94 aa, Heterodera glycines
FKSLGLNPPAFQSLGLNPPAFKSLGLNPPAFQSPGLNPPTFQSPGLNSSAFQSLGLNPPTFQSLGLNPPTFQSTGLNPPGFQSLGLNPSAFQSL

SEQ ID NO: 145173 - protein, 18 aa, Heterodera glycines
MTSYYLNRLFRVRSMSLQ

SEQ ID NO: 145174 - protein, 146 aa, Heterodera glycines
NGVSKNRNYAQKASQTILAHPIPSTIAFIHPIMSAKIIRVPKIACDLRLEKNGVSKNRNYAQKASQPILALPIPSTIAFIHPIMNAKIIRVPKIACDLSLEKNGLSKNRNYAQKASQTILALPIPSTIAFIHPIMSAKIIRVPKIA

SEQ ID NO: 145175 - protein, 73 aa, Heterodera glycines
MPVITGLTQLMAFNREKEMMREIMKNGPIHASHIMYTGYGSCCKNNEIYEDGSTLARMVLGNDQTPKNGVSLF

SEQ ID NO: 145176 - protein, 61 aa, Heterodera glycines
MGAIVRLILRAFCDFVRVQKFSRHGFEQLQVDFAYVRQKLWYFVADEHMLNTCIEDIVTAA

SEQ ID NO: 145177 - protein, 138 aa, Heterodera glycines
MSTPPGREMPHKVLFGLTCRNLNEAKAMANANQCLLLVTHLISSAVDELASSKLLRKTTICSTPIRKGVSIRSRMFPNWPLLNTSMCPSAAPTHRQTEQFAVHCLRLNSHFAFVRVVNGQSAVATRGQQIIAPNVQRI

SEQ ID NO: 145178 - protein, 45 aa, Heterodera glycines
CKQNKKQSEQLINLILIVHTNRSLHFFTNSPNYRWIQQFGLGTLV

SEQ ID NO: 145179 - protein, 37 aa, Heterodera glycines
GCAEPDKIRFRLNRRFRLWPKIRYGFKTDYDYGPKSD

SEQ ID NO: 145180 - protein, 114 aa, Heterodera glycines
SDSLAVIAANLDCIPYFKNKTTIGYARSMPTACAVDRVAKARGRQCYEVPTGWKYVPTGWKYFGNLMDAGKLSLCGEESFGTGSDHIREKDGLWALLAWLQILAHKKQSVEQLV

SEQ ID NO: 145181 - protein, 116 aa, Heterodera glycines; identical to SEQ ID NO: 127487

SEQ ID NO: 145182 - protein, 144 aa, Heterodera glycines
HATARLTRPLEPILFPKLRIFADFPYLHYSRLEAVHLGDLLRISVRSGRRFKLPSHFQGPCGAHETPQEPRCFTGATSLSQAEPLPGTHTLNEKRTLARTPHDVCEFICVTAQNSSCEPSFLAWRGNEPTSLSATGWTNCASTE

SEQ ID NO: 145183 - protein, 68 aa, Heterodera glycines
MYFPEDVDFTARIRSIVRTLPKEIGDFKAITLKELEGGSDPQALWVEIPYIFADFNMANLCIFGSHFK

SEQ ID NO: 145184 - protein, 98 aa, Heterodera glycines
MYLHKKGIPETLKRFKPRNQKDEVIIRLIRDEDIDETAEIIQESYLQDCLKIKHATPEQCKQMKKVPLERTRMALSKFKAEEDGALIVAETTALTDAG

SEQ ID NO: 145185 - protein, 100 aa, Heterodera glycines
TKTPGPPGPSTKTPGPPGPSTKTPGPPGPSTKTPGPPGPSTETPGPPGPSTETPGPPGPSTETPGPPGPSTETPGPPGPSTAGTSSTKTYTVPTTPKRLF

SEQ ID NO: 145186 - protein, 92 aa, Heterodera glycines
  unsure (1)..(92): unsure at all Xaa locations
LFEYPKRTLEKIDFFVFGAVPPSRCAQIYGETESFRSSFPIACTLILRWIFAPHKCLSTPNGHLKKSIFFVFGAVPPNPMRPDLWXDRILPX

SEQ ID NO: 145187 - protein, 79 aa, Heterodera glycines
CFSIKKEDGEKIFKKIFPYILVISFCFWWGAWNSGIMRTRPIWQVKQRLLTSQKVRCRDETNQHCLPRGTRHGPPKEWI

SEQ ID NO: 145188 - protein, 141 aa, Heterodera glycines
MGPAALLLLLPSLLLLFLLIRALLELIPVSRLDKRSVLITGCDSGFGFDLALRCLGAGMRVFAGCLTQTGIQSLKKSAQEKGIAVELLEPIELDVTSDESVAKALEFVERKLGPGKELGRLADSKGLRRCFPGYGQTKPSE

SEQ ID NO: 145189 - protein, 34 aa, Heterodera glycines
MSAKDALKPIQSILSQKSFVSSYFICWCPITISD

SEQ ID NO: 145190 - protein, 41 aa, Heterodera glycines
MNEWNGHGKERKWWWWCCWTLGVVGLANFSFLLADLAVKDI

SEQ ID NO: 145191 - protein, 17 aa, Heterodera glycines
HKHLFDLFYHIHNLIKI

SEQ ID NO: 145192 - protein, 30 aa, Heterodera glycines
MLIKKGSNTKLIRSLLHGDLISPFWLGTRV

SEQ ID NO: 145193 - protein, 17 aa, Heterodera glycines
HKHLFDLFYHIHNLIKI

SEQ ID NO: 145194 - protein, 47 aa, Heterodera glycines
LEKMPTLVAFKIFRNSDFFINYLFFAKLIHKYFFRKCSETHKTLFTG

SEQ ID NO: 145195 - protein, 78 aa, Heterodera glycines
CGGGNPFYAWKYYRNLTVSGTNHTMNTGCKPYKMPSQSNCVFSCNKEWLQQQYPNKAKTPKTPGGIPLFGTTWEVFLA

SEQ ID NO: 145196 - protein, 100 aa, Heterodera glycines
MTIPRFHRDRLSATEMLQLRKVMEHVWEKILYPAETATDDCGGGASAAHSLATQLPENIEERIELFCNEQKLDSDMDLRTVKHLIWKQGGDLLIFYRPVK

SEQ ID NO: 145197 - protein, 118 aa, Heterodera glycines
MQGSSARSFLNPLKKLQRKEDLEKEFVESGEKDRVQEVVERRLHESGWAKRVESMCEEYIAKKVAKVNKAAWGYERVELQAMVDELKDASRRIVPDEVKRELMQLIQEFVNSRTSTGE

SEQ ID NO: 145198 - protein, 224 aa, Heterodera glycines
HYAYNAGDPNVQGATSFDPQVGGTYKAYFDQPVPGTVPPAAAPQPLASAYVGRPASNAPVFPPPQPPQVQQMAAPVGGAWAASGGPPQQRGPPAPLNSFMGGPPPYGQQTPRGGGDGGFDRRSSGGGPMRQERSRGGGMQQGDVETDQNGGPKIRIYKEGGQSKGECTITFRDTAVAQRVMDTYNGFGGGRDFRRDGGGGSGGRGPPRDGGGFEGELWKSNDGV

SEQ ID NO: 145199 - protein, 216 aa, Heterodera glycines
MKSAINRVMLNIFSKKMASCSSDKSVRLWDLRNPSSHTKLSTPGANLFVTWSYCDNFIIFGDKSDNLGVIDARAMKTLELFTFKDEINEFVCHPNGQLIFVATDLGKLEVLRLDYPVRSVSFSHCSNLIASGSEDRVIDISWTPTGEKCALSKNAYTFSNIQIRVAEVPIATECYDVAWHPRLYLLAYAISGGLNDNRSDRSDQSTLRVFGYSGGI

SEQ ID NO: 145200 - protein, 160 aa, Heterodera glycines
SPLNRRTANPSLEVSRPTYSNKRRECRPDTPVLSVSTSSNFTSSLTLSAECFATFPHGTCSLSDSWPYLVLDEVYHLIWAAIPNNPTPRHVKMDRHRQLDRSCTFSGAPVKGNLNKRANPSSRSIRYTSQPRGAAIQRWTLPSSLAVTTGILVSFFSSAY

SEQ ID NO: 145201 - protein, 20 aa, Heterodera glycines
SRLKTGASRPFLNLLALDGR

SEQ ID NO: 145202 - protein, 128 aa, Heterodera glycines; identical to SEQ ID NO: 125618

SEQ ID NO: 145203 - protein, 261 aa, Heterodera glycines
MTRRNAFFQRNSIRKTWASDALNDTVIRFLIGDAPKSDARNQKARDEQIKLELEFKKFGDLIFLNGITDNYQNLHLKWHAALEWQQNFCKNAEFLMKTDDDTIVHLPRLDRWIEHKFRPALKQNVATYFGWIISGVKPIRDKGHRWFVPKSAYPYEWYPAYMQGATYLASAQAISAVMRHVHEVNGFNMDDIVFTGILAKLANVTLFDAGAHFRVGNALHANEKCVDRIPEAVALYGADSLAQFEEIYDKLDSIECAQSKA

SEQ ID NO: 145204 - protein, 95 aa, Heterodera glycines; identical to SEQ ID NO: 125597

SEQ ID NO: 145205 - protein, 439 aa, Heterodera glycines
AFIRVKSDTLFGFLCSACHRPILDQSFLLVDDQKWHSECCVCVICGQNLEKEPTCFVRDGFLFCHRDYFALSKYGKPCDRCGIPIARGLSKYGKPCDRCGIPIARGELVMKVPQNGNSDQKSLLFHVHCFSCVCCGQMLSPGQQFTVGFSCVCCGQMLSPGQQFTVGISAILILAHFHLNPSLSLGILILAHFHLNPSLSLGQFSHKMSDEEQVTLKNFEFLNFFRNQLHFLTDLCSSNLGGHGQQTNRKVFEQLSTGVISPNNPNRQPIFFCGIEQGKPREKGRGEKRRKRKSQFTKANAILGAIQKGKIFSSNGGETPGAMGANGRQKRMRTSFKHHQLRTMKNYFACNHNPDAKDLKQLSQKTGLTKRVLQVWFQSNSSHWRCFHLSSSECPCQTSAESANSRGSGGGNNGTNPSLTTAMSGVHVHASLSTSVECG

SEQ ID NO: 145206 - protein, 99 aa, Heterodera glycines
MVNFVTTVATFFCGMYQIRGFPTFSLFSSGICRQIWKRGETADIKAYSFLLGVLGSSYWFTYGVLLQHPLIQYVNACQFVIYSAYTAFYWTMSTKKIGA

SEQ ID NO: 145207 - protein, 44 aa, Heterodera glycines
MTAFDELGVLPELATALNDLEWTLPTDIQSEAIPAILGGGDVCM

SEQ ID NO: 145208 - protein, 122 aa, Heterodera glycines
PAVLTDLDDEMEIVKEEIFGAVMLILRFKTDKEAIARANATQFGLASGLCTTNLARAHRVAAQLKVGTVFVNTYNDAEVHIPFGGFKNSGHGRENCVECLHEYSQVKSVYVNIDEGLQHNLG

SEQ ID NO: 145209 - protein, 20 aa, Heterodera glycines
MCFPLDELLAVAAIKKRTLA

SEQ ID NO: 145210 - protein, 256 aa, Heterodera glycines
FSHNPSDGSFAPLVYRPSTTKCLNLRFLSYAGLLLATGLGKTNLSHDGLNPAHVPYWWVNNPTLGEFCFAMIGRADIEGSKSDVAMDAWPPQASYPCGNFSDTSCWKLYTLKDRATLSRSVFVLKIRIKAFAFLLYERFPSSLSSLGHLRYALTDVPPQSNSPPDTVIGAGRRARVARLNTKMDTRRTPVLPIKGIDESSGISLAPCGSHLCYTSHDSSQSQTRVKLNRVFFPAKFAKPVPLAVVSLDSRGQWESR

SEQ ID NO: 145211 - protein, 383 aa, Heterodera glycines
MAEAWNGGNDNLGGGRGGGRGALPPMAEAWNVGNDNLGGGRGGRGRGALPPMDSGTDFDNSGVGARGGRGRGAPPLVDLGLDFGQPHNLSNHRTNHGLSGPETNGVSARGGRGRGALMPMDDAFNVRNDNFGGAEGHGAQPPMDSGCNLGGEGFVPTKRSIAELFEEDARVKDKYITIRDEDENKANYTVPRKIQSLTFPLIKAGHDLKGHAETGSGKSAAFLLPIIDAVMKLKKGGHYKSRRCCPFALIVEPTRELTVQVYDQARKLAEECDVSVSRAYGMFLRHVNLRQISTDGCDILVGTPGRLCDFFQSKNLLCDQIKVLVFDEADQLLEDGFQAVLRQLNNVNNWPQPENRQTLLFSATFPLVVQNWADEWMRKDSMM

SEQ ID NO: 145212 - protein, 95 aa, Heterodera glycines
MFEYPKRTLEKIDFFVFGAVPPNRCAQIYGETESFGSSFPIACTLILRWIFAPHNCLSTPNGHLKKSIFLFSGQSPRTDAPRFMGRPNPSGVASL

SEQ ID NO: 145213 - protein, 86 aa, Heterodera glycines
IVAKTFADYSVIPISIAGTLPLKAHISVATNEILSVGKDKDSQSILKCIERDATFRYNVLTVDSEEAVPCLNVNNHLIFRLDLNEP

SEQ ID NO: 145214 - protein, 24 aa, Heterodera glycines
TLKLFQKPAVKLCIFKGDESTLAM

SEQ ID NO: 145215 - protein, 281 aa, Heterodera glycines
PSPHLDVETIYKKIKEKMLAQFEGWWKRVPEQKEPLYEFFKQLEDISMRYVMAIVDAFFDGISIESFRQEYSLGVKGGAVSGMIRIGFDTLALIQTSKFVYFNEHWEKCQLNLSVLIRDRTTGVGGSRVLIPTESRSIPTILKERSGRIPNLIPLDSEKIQRYPNPAIIIIRPAAHLEFISIYVKVIKTKDQQRPIAKNDRTIHPNQRVGSETEQIAKISANDKTPTGVIGETNAFFDHFFADQHNNNLFDKESHHFNLNIFIQTFDKSLQITKFLTIGLA

SEQ ID NO: 145216 - protein, 117 aa, Heterodera glycines
MYVNIRRFPTDQFADQVDIYRDDPREDVHELWRKFTESIDWIHRLNCGRKLLQFIQLLHRLLPKYTEMNRLKAEDQREQLEEEMFWAAEEEETVPTPPAEGAARGDDEGNSAKNRAP

SEQ ID NO: 145217 - protein, 22 aa, Heterodera glycines
FLLHFCYEIYGKRPKYVLKFEN

SEQ ID NO: 145218 - protein, 73 aa, Heterodera glycines
FVNVLDIFGMNQLSFRLANVSVKPSMVGEARILFRATRKAVADSKHEVHGGIWDPRQSRKFEMAEAKINKSLE

SEQ ID NO: 145219 - protein, 222 aa, Heterodera glycines
MQEHLSLRSPNIGQRSPSIRSPMQALKISPRGEIVANDSAAANEHNVSSSDHSKYDRTESGSAGFFRDPAGLNSGSRPRDPSRLLFQNLLDLVGIPTRGSSDPSRPVTTLYKEFVDFKISASLFWAKKSAKTPRGELIEMYWDDEIMETKSQEKVGGEVSNEKSFQKISKQLINQLSKLRERFNAKPKKGRGFIVLLEDIYFEVGSPGLRSKINKISEAMKK

SEQ ID NO: 145220 - protein, 28 aa, Heterodera glycines
IFCISIEKKILNRLIRKFNTKIRPTLEL

SEQ ID NO: 145221 - protein, 83 aa, Heterodera glycines
MPNQLTRLKIWYVNINQQLRASKAAVVPCWWRQHWHNCCQPAQMPLVFVANRTASSSSPLLQAFDGWKWRMVKAFGSYVQLDV

SEQ ID NO: 145222 - protein, 214 aa, Heterodera glycines
MNAKIIRVPKITCDLILEKNGLSKNPLPIPSTIAFIHPIMSAKIIRVPKIACDLSLAKNGVSKNRNYAQKASQTILALPIPSTIAFIHPIMSAKIIRVPKIACDLSLAKNGVSKNRNYAQKASQTIFLALPIPSTIAFVHPIMSAKIIRVPKIACDLSLAKNGVSKNRNYAQKASQTILALPIPSTIAFIHPIMSAKIIRVPKIACDLSLEKMV

SEQ ID NO: 145223 - protein, 107 aa, Heterodera glycines
MSKEAENKFCIISWALRLPQQNKTSTSERIRHLAYARRHSAELALALSLLGIMFMVLAMEFGLAKWQKMDEAMRWTLAVTTVTLLLVTVRYHVLQAKTRYLKYRNTF

SEQ ID NO: 145224 - protein, 152 aa, Heterodera glycines
MNSLKTDYAINNTLLTSGLMEDHHLEQGTATIKPVDVLMNAWSVAERLYNDGKVKALGVSRTDIEMVKLLCERAKTRPHCWQVIDLAPLMANFDDVLSLCSHHKVVPIVRANAMGASSKFGSQQQRGFYHTLLREMANKYGKSATQVATGTH

SEQ ID NO: 145225 - protein, 44 aa, Heterodera glycines
MRVSWSSVHHSEHTYIICLTSLTPINSFISTMNDESLIKKYSLK

SEQ ID NO: 145226 - protein, 103 aa, Heterodera glycines
MVVAQSVRAVRVVLDADMGVINPDHLLEHFLAKFDTELPHGGTIDMVFYERIFNGEIMAGSYWARNTRFAIEMLHFWANFTVPSRTPFRGGTDNGAIHDNRGY

SEQ ID NO: 145227 - protein, 276 aa, Heterodera glycines
MNAKIIRVPKIACDLSLAKNGLSKNRNYAQKASQTILALPIPSTIAFIHPIMSAKIIRVPKIACDLSLAKNGVSKNRNYAQKASQTILALPIPSTIAFIHPIMNAKIIRVPKIACDLSLEKNGLSKNRNYAQKASQTILAHPIPSTIAFIHPIMNAKIIRVPKIACDLSLEKNGVSKNRNYAQKASQPILAHPMPSTIAFIHPIMNAKIIRVPKIACDLSLAKNGVSKNRNYAQKASQPILAHPIPSTIAFIHPIMSAKIIRVPKIACDLSLAKNG

SEQ ID NO: 145228 - protein, 189 aa, Heterodera glycines
SAFEKAKAIMFSELLLTHYDPHTSIVVAADASKDGIGATISHIFPDKKEVIEHASTVLTNAQQNYSQIEKEALALVFAVQKFHRMLFGRKFTLLTDHKPLLASKKGIPIYAASRLQRWALIMANYDFEIRYINTASFGQADVLSRLIANYPRPEEDILIANICTKTECYISTILQTKTEQLPVTPSLAL

SEQ ID NO: 145229 - protein, 94 aa, Heterodera glycines
MSKLNTHFQAVVVERFALMKDEDFLNFFGTPVDETVEEDKNENNNIHLRSELKAADGEEDKNDLPTEFDAREAWKDCAEIIQSGYAQGGLEDDL

SEQ ID NO: 145230 - protein, 59 aa, Heterodera glycines
MGCRALEDPLVENANGGRNGQRSSRATLYDWLRARYECKSAFLNVYEKICMDNREIVFK

SEQ ID NO: 145231 - protein, 149 aa, Heterodera glycines
MQAPDWGNYDTNGTDYDYIYNNSDERDNWNSEQAGVFRHLVTQLGTGQTLQNLALPTFVLGTTLSPRNLDELIAGAYENTAEKRFLAVLKYYLNSFYPARKTDDAKKPYNPILGEVFRCRWTLPGVPLSASRTAGGPFPGSATNQVQFK

SEQ ID NO: 145232 - protein, 184 aa, Heterodera glycines
MTTGSDRTQLQMQLHFNANNSSEASQSQNSSEQMQNCSTNERVAGEDSVPFIDRETFGDAENDIGRRPPPDRFRLVYLIVLLHGMGMLLPWNTFITIAGDYYLQFKFANVSNEDNYKVYFFNYLTVCAQIPNFYNYYVQKAAKARANNGMNILHEETGEAKANRKVTHPPVKTYIAVFSEGSQI

SEQ ID NO: 145233 - protein, 43 aa, Heterodera glycines
PIRWTILCIQQRYSTDCVNNYVYICPGLADENFQKPHSASKKA

SEQ ID NO: 145234 - protein, 264 aa, Heterodera glycines
MKHNQIEQLDDGHLRNLSSLSLLTLTGNKISQISPNFAQNTPNLRYIYLGDNKLERIDPSSIKQFSAAEIIDLSFNNLAEISAELFNGMENLQVTELGEKRRLGEQLFHALASELGVECHQRRRRRRLRHHSAAPSVAAPQLLGLRVAQHVPRRALPQASVPCPQQHPHCAGQQNNSRLPPLWAQISSQSECKASDKEQQMRRPNGLFFRESARLHPRRFPRDERTRSDQFDNRSKPHLQDELRKRSGGQMSTKTGKCAMEGML

SEQ ID NO: 145235 - protein, 94 aa, Heterodera glycines
MAKQMLTTDIRKNSLPSPEFADSLETKMAKRPLQENGEFSRDEEAAHVEVEEKKPSQKEVVAKHTTPVHPPHPVIQKETNKKNKTKNMAQKLPK

SEQ ID NO: 145236 - protein, 1176 aa, Heterodera glycines
FEVPSGRFVREGLFCAFSSASLDRPLAEMVLLHSTSDFCLLGVRGGGKSLVVNEFAKRLGYPVETIVLYQDMSSRELLQRRKILPNGDTQWIVLYQDMSSRELLQRRKILPNGDTQWEDNQLVRAAKRGALCVLDGVDRVHWSTAESIASLVHHRHWSTAESIASLVHHRFLALPNGTRLVGNSHFELLASQRIERTNANVFRIPDSFRIVALGSESAPKWLNAQLLSQFLFCSLPSLSIDDRLRIIQQRVPNASVGHERLLRLIDRLSNSHDASIRTIASSIRTIASSLSLRRLIHILRRHSAHPEEIFDAVQRAALTRFVPPIVRRAFDATLAEIADGKKKHAEFEKEELEKMRKRAEVPDGMSSVGESETKVGGRPADEAMIPSTLFFDNPQHLIVMANMARDHLIVMANMARDFHLGAHLLLIGNQGVGKNKVTDRLLELLDRPRKYMQLHRDTTDTTVQSLTVQSTVVDGVLTYEDSPLVQAICDGLVLVIDEADKAPLHVVAAPLHVVAILKSLLDEEPFYLSDGRRVCPGKRKKGDESETLVVHPEFLVVHPEFRAILLANRPGFPFLGNDLYALLGDLLAVHALDNPSKESELAMLSKYGPDVPQEVLELLVSVFGDLRSVPQEVLELLVSVFGDLRSLVDQQLISYPYSTRELVNIVKHLQKFPDDPLPEVIRNVFDFPDDPLPEVIRNVFDFDAYSVDTAQLIGEVFQRKGISIGEKDRQCKVVLLIILSKRCRSFVKVSSSNAIEFIIQQIDPNNVPHVGGNTWAGGTGGYNTAGLGGVGGPFRGYNTAGLGGVGGPFRLDAGHAVHQLLDAGHAVHQLPDSAKEQVPEHIRKRAREIAREEYAKRLKEIDMGEYDAEIDMGEYDAAAYEELATRVGRQVRVLRSVIDSLEQRKHERQWAKHQTSGDLDDAKLIEGMAGERNIYRKRIEQPPKRIEQPPDPSNQQQPKRIRLCFDVSGSMYRFNGYDQRLQRSLEAALLVMEGLDGKEDKVKYEIYGHSGESAYEIYGHSGESASIPFVTLDQRPANEKERLNVLKRMLAHSQFCTSGDYTVEALSLAVRELDRNDFDEKFVVLLSDANLDRYGIRPSEVSRALQMGDSVNAFIVLIGSLGEQAKNLQRHLPAGKTFIAMDALQRHLPAGKTFIAMDAAQIPEIMQQIFASTVVR

SEQ ID NO: 145237 - protein, 27 aa, Heterodera glycines
MHRIIAAVKKLVVGSVLAVRCTLCVLL

SEQ ID NO: 145238 - protein, 151 aa, Heterodera glycines
YGHFSGINRKVQLKYLKTSAEKANTAENASSVPTLFLILNASSVPTLFLILKWGGELTTAGILQAEALGRLFRTLYPKWGGELTTAGILQAEALGRLFRTLYPGIRRTDGKDSPEDTQGLGFLRLHSTYRHDLKIYASDEGRVQMTAAAFA

SEQ ID NO: 145239 - protein, 134 aa, Heterodera glycines
MMASPGTDLEAKFRLRVFALLSSAPALHQLIQSKSNTASSARIDLARFLAAYYLGIDLARLFEQLNRCHHVEAVVPGGVATSTVLPNLMVCAELDDGEENFEAVIQADVLFSEEFGPFGLLNECIKALSSRMVA

SEQ ID NO: 145240 - protein, 185 aa, Heterodera glycines
MDPDQIRVSSVGMLKVGTRVHSTKFRPFPEETTLPSVLDTAEEEDNTIYSNLRDEVEQCKQHDVVVNYSRLNLGNSGTSATGDGTNAAASTAAAQDEHQRHKEEEDGQKIYDTICGQAVVPQKGSKTLPIVNKAGPNLGPGWLNLAKDEQFRLQTLLILPFQHITKYQLLLNLYFYFLLNWVFIP

SEQ ID NO: 145241 - protein, 45 aa, Heterodera glycines
PPFSIFFLLSGGNTQTHIPHLFFIICSSFLHSLFTKPYSPNSLYE

SEQ ID NO: 145242 - protein, 54 aa, Heterodera glycines
ECHGTGNFCQNRDRDLPGPVKPGPGPRFLFGTGTARKTGTNREILKIQKNFKNL

SEQ ID NO: 145243 - protein, 148 aa, Heterodera glycines
MAVDIFGTAATAKLSTAVGSLPELLEKKRLIDLHTNVATALLDNIKTRKLDVLYETEEKLLTGQEIPVIETLRDCPDKDDILRLILIALCSRNMPTGFFSFGCRGGTAPRGRHQDGQHVLQTAQPLIALRHGGRPKFGAQKHNLPLTK

SEQ ID NO: 145244 - protein, 75 aa, Heterodera glycines; identical to SEQ ID NO: 132731

SEQ ID NO: 145245 - protein, 217 aa, Heterodera glycines
AEKQVACDLYSASFLVVAGKNFVKSIPTDQSHTKSDAFEPISGAAITSVDFHHETKSIFFVDAAGINKGINRFVLGDSESQVIVKNNYGGYIIKSVAIDWINNNIYFINADSDRSNIEVCQMNGENRKILLSTRTETPTSIAVDPITRFVYWADQGQTPAIQRAWLDGTHKQVVVHDELKEPTDLIIDPNRGEIKKCLSDFIEIQKKTQIFFIFIWA

SEQ ID NO: 145246 - protein, 23 aa, Heterodera glycines
MDEMNKEKEKKSDFISKLVRLLK

SEQ ID NO: 145247 - protein, 206 aa, Heterodera glycines
MILHKVRLESSSTGSSFPAKFAKPVPLAVVSLDSRRDSGNLVDPFVRVGKPTRHLATLRESCYSRVYPRLIKFPWLNIQSTGQIRHGQRPKDHPSPLFLDSRIPRVRASSKLVVQRQPKCIPDEHTRSSAPQAALTTSPRTIQKNSTQPRAKGFTQQPGPDLSQFFSRSYESNLPTSLTYIILSTRGCSPWRPAADIGTIRQEIQI

SEQ ID NO: 145248 - protein, 37 aa, Heterodera glycines
MAEFAHRAGAPLECLCMALKVQKRQEGTDAEGNRRWK

SEQ ID NO: 145249 - protein, 92 aa, Heterodera glycines; identical to SEQ ID NO: 125147

SEQ ID NO: 145250 - protein, 88 aa, Heterodera glycines
SLAAKFKPIGELSDYQQQINGSQGKSFTYGCCTKHLLICIFVLEVSNIRFATPPPQPPPVLRNVPLPPVTSNNNEMMVDRTCRNNTAK

SEQ ID NO: 145251 - protein, 102 aa, Heterodera glycines
MPNILEMLNNDATVLLNPFTALFQSVKKASLPVVVTRDYNIYAAFVCNCCAFSEFTFLVKKSATFPCRSNNNLMEKAVKNEYRIRPPLFLKFVVKNSAVIFF

SEQ ID NO: 145252 - protein, 41 aa, Heterodera glycines
MKIHCIFFILLINELFVVPLIFGQPIKEKSVLEGVPITLNE

SEQ ID NO: 145253 - protein, 171 aa, Heterodera glycines
MARNGMARKALNPQAYEASAVKQMQSYKQTKSMELFKERGMKFTCVDSSQQQQEENRNGRAGGTSGGTLSSIGTVSACPVDMMDPSDREAIQFYEGERNGGRETKGSLAKSTEGGGFGASSLERAKRFGLIPPKFDPRIPPPPIFQPPKRKEIEQPKEKRAIKQETEVVVE

SEQ ID NO: 145254 - protein, 74 aa, Heterodera glycines
SNILGENKDPEFTIEWSTPCEMNEEMKDKAGSLLIEVADRMLPRFQDEHNKKILQELATSVTEKGWLMEEQIYK

SEQ ID NO: 145255 - protein, 109 aa, Heterodera glycines
VAALLYCCQLLCRCLWRLRWDPNVNAIPLLTALGDFLGTTLLAIAFLAHAELFPEYSVNGTNCTNGTISQQDTVEDAMLQVVEQQLLLGNADTTLATETAELMLLNRTL

SEQ ID NO: 145256 - protein, 249 aa, Heterodera glycines
DANSPTWRNQIEGQINLYDAIRGQIHYVNPVTKQEYTLKQDTAAMTSDFLRAYTLLSIKIAHQRNIFAMGGMAAQIPIKHDMAANETALGAVRKDKEREASDGHDGTWVAHPGLVPIAREVFDQIMQGPNQIGKQLQSFETDNKRLTMAPEGVRTEAGFRRNISITLGYMDNWLRGIGCVPLYNLMEDAATAEISRTQLWQWARHEARLEDGRTVDPQLVKMTIASETETSSSRKASEQRTGDGHFCKI

SEQ ID NO: 145257 - protein, 201 aa, Heterodera glycines
MRPRSTPSAAAGGTEAAVDALRRENERLKRENSHLNKSLEKQREEAERTAIRLRRMETQSRANAEAWEERKRNERNAALLRKRVEEGAERERLLQERLERRERHIEQLSREQQGRLGDTERVQATMAQWRAKVALLEQREGTLSQERVVLGERCNELTRRLEAMTREHRNAKKRLAELTKAQREEKAEEKLRVEGKAIGGE

SEQ ID NO: 145258 - protein, 92 aa, Heterodera glycines
MAAGHHLTTFPSLDGLTEQFGDHVRGHGFPWAIFLDKNYTAPTPPQPTTTEEEEEADANDGTVNEAVNDGDHELLTDWEQQQKQKQRRKNPR

SEQ ID NO: 145259 - protein, 15 aa, Heterodera glycines
MTYNPKEADREIEKA

SEQ ID NO: 145260 - protein, 90 aa, Heterodera glycines
MDRIPYNFPTPSSRSRILKLATSTSESRNIFFPLHLQPMFDAAYGNFNNIHRERSKIFPCLSGFGSADGSAFRIDRFCAADTSGSRQAAY

SEQ ID NO: 145261 - protein, 95 aa, Heterodera glycines
  unsure (1)..(95): unsure at all Xaa locations
LFEYPKRTLEKIDFFVFGAVPPNRCAQIYGETESFGNSFPIACTLILRWIFAPHNYLSTPNGHLKKSIFLFSXQSPRSDAPRFMGRPNPSGIASL

SEQ ID NO: 145262 - protein, 24 aa, Heterodera glycines
RTLSTAFRQRSSKIYSMPQILWAG

SEQ ID NO: 145263 - protein, 24 aa, Heterodera glycines
GTLSTAVRQRSSKIYSMPQILWAG

SEQ ID NO: 145264 - protein, 194 aa, Heterodera glycines
MEEFFFGDDDLNLPPGQPNPRPQPNTPPPLNSDQQKVFDAVLLAIQSNPRDSTVPRRFFIYGDGGTGKTFLFGQIIRRLRKAPYTYKVLATASTGCAAILLPYGKTAHSTFRLGREVSLDKLPSIPLESFFARRIREAQLIIIDEITMLHNTVIEVIDRVCKEMAIRQHKDLLFGGKTVIFSGDFKRVAAGRAS

SEQ ID NO: 145265 - protein, 116 aa, Heterodera glycines
MTCAYAKLLGPCFKTGRTDDRLLHRERTSESLSWTELVAGTCRTRPPPTPSSSQHGPETIAQFTQSKQHSPDPGTRPQKAGLKTELTQLLRASQRTPPANAPFATEQKDSKPQSGG

SEQ ID NO: 145266 - protein, 37 aa, Heterodera glycines
MCAKGPGVDPNYNAETCRKSAFDKLDKMTFFIIGDMG

SEQ ID NO: 145267 - protein, 253 aa, Heterodera glycines
MSKIWHIFAHFLRIFVSALCWSLGFLCLGFSVSVSGSSLGVKPREILVSSVSKSIKPKSFHTNYQILNYNFCSAKKQEEARQLPAVKPIFLTEGYLINFIVLVQRFNDHSKYFRQNDPNFSINFELQNELEMNYEIITGNEKNWQNRLIQKAMEEFKKANYEAKKSEIWRKKFKQKTMEQFEKEFKKLWETEKLRMEFENKMKKIYENAQENVKMEKNVSNKSETQRRNYEKKFAALISSPFYEHLIEPIIID

SEQ ID NO: 145268 - protein, 259 aa, Heterodera glycines
MLSFIIIIIILQFFFIPISHANPSMDDNMLIAFMKCHQQTQISEYSTQKYEAYLGTVYFMRKNWQCAKIGKRFEQYERTECQKYRKYLGILYEYLFREFAGHNTVKPKFMLKRHQFEMEEPSIIYVLHSLAKVLRFYLNPFNSNRYQYKLNNLFSNKHFINEFEPKLLNAFGNDNEQEEMPINEAILKLAIYTANGQSDEIVEKIINRIIFDRNLKKMFKKAEQNAKENGPWSANEISEDAHKIIWRSKFDDSLNWILD

SEQ ID NO: 145269 - protein, 51 aa, Heterodera glycines
MAISFFDKFYTHTNALEHDREGEILYLTKALAYETEGCAQSPFYFTEDFYI

SEQ ID NO: 145270 - protein, 92 aa, Heterodera glycines; identical to SEQ ID NO: 129648

SEQ ID NO: 145271 - protein, 97 aa, Heterodera glycines; identical to SEQ ID NO: 143380

SEQ ID NO: 145272 - protein, 48 aa, Heterodera glycines; identical to SEQ ID NO: 136255

SEQ ID NO: 145273 - protein, 95 aa, Heterodera glycines
MLCSNFLAFLFLLFYCHFSCAINPDPKFPVHTIQIDAPHRTATFGGPPGVRPFISGSIFTSGVGPAAAGAISSSHNHQPTAVCSENEFRCDDGEI

SEQ ID NO: 145274 - protein, 138 aa, Heterodera glycines
MAQKIQASGFDSKIKGNADQETQGRFSLRIFGLSQTLITNDPVVLREHLDNRSIDVTAIDELDEEHILLSYENKKEWVEEHDCSNIMISLWMTSAARLLLLKAMQKVVRTPGHGFVDLSPPVRHLPAQNWPTFGSVHG

SEQ ID NO: 145275 - protein, 44 aa, Heterodera glycines
STGYSEAIPEGFGLPINLGASVRGDCLETKKIDFFQVSVWGTQT

SEQ ID NO: 145276 - protein, 65 aa, Heterodera glycines
EKIKKKLVMAAGKKADGEVAARQKKRKRKMSDESNGDDESDEKDSASEAEEGWCAERADIGHSWS

SEQ ID NO: 145277 - protein, 401 aa, Heterodera glycines
SMNSRRLVQVPLTVWNRKRTRKVANLAANHQAVANLAANHQANDLIVGGLEQLITARFCYGPMDLVVLSHENVLVYVLPSGGEWFLKGVETTDKNGRLSIDLGRSLPIGIHNVRLIVQGDRNYLSVNIAVVPTGTPVVVFSIDRNYLSVNIAVVPTGTPVVVFSIDGSLTASVSVTGRDPRLRSLTASVSVTGRDPRLRPGAVDVVRFWQQQGFLIIYLTGFLIIYLTARPDMQQRLVSAWLATHNFPQGLLFFTPSLSTEPLRQKTQHIKHLLDMGICIHAAYGSAKDIPVYSNAGLESERIFKVGGHRRVYSNAGLESERIFKVGGHRRRGCVSLDDGYCYHLHDLHSGKIVIPRRVENSSLADGTNRINSSLADGTNRIQRTLSFGPRMGRYNQKDQP

SEQ ID NO: 145278 - protein, 70 aa, Heterodera glycines
MLSHVFYRKFFELLIVNLTEFQHYLCYHKNIDNYKRWLPYLMGINESYLLEEEFPYIMHIGKFELITLIT

SEQ ID NO: 145279 - protein, 102 aa, Heterodera glycines
KNKDDLLECPKENVPISVLRQNDAHNQDLSAKEYKILDEMQNEFKKILSNESKSNYKNNFVKSDRKKWLDVKMLFWHFNLSIEDAFGKMDEINVYNLFKIII

SEQ ID NO: 145280 - protein, 33 aa, Heterodera glycines
MKQTHLKNLIRFVTVFLIAIRLIGADNAESDEE

SEQ ID NO: 145281 - protein, 61 aa, Heterodera glycines
MKDVCPNPSPAFDGATNVPLLAKTLNPATADGTGASSTMGCSMCQSPLPGFLRTAYLLVKY

SEQ ID NO: 145282 - protein, 118 aa, Heterodera glycines
MHQIGLVLSFSATFVLLATLFPSCAANTECVWATGLVKCNKNQTKVLGAVVELWDLDSPQNTDFQNPLDSDDKATFTEVDDPTGLWKLDGCASDHDWFSINRYQKWCHDNSYNCFDLA

SEQ ID NO: 145283 - protein, 82 aa, Heterodera glycines
MPKYVQNMCQTPKISFVDSSAMEMQILSKQRENYEDFFYFLAKVLSKFGGKLTKNENRETIEIGIDGGHKILESLKNMPIIC

SEQ ID NO: 145284 - protein, 41 aa, Heterodera glycines
MRQEHYNCTTEHHKTSEMFVLFIYYLNNFGGRIFCGTIFQF

SEQ ID NO: 145285 - protein, 92 aa, Heterodera glycines
TANLVPTVAFSCLALSNNLTIFETQTKKILDQKMAISFFSFFYRKLGTNSCLLLSGPIKHLFSHFFTANLVPTVAFSCLALSNNLTIFETQT

SEQ ID NO: 145286 - protein, 75 aa, Heterodera glycines
MIGRAVRNRPFIFEGIFKFILYPRKMSISFFEKFYTSQKRLRMRRRAVHNRHFISQRIFIFRGYPRKMAISFFDK

SEQ ID NO: 145287 - protein, 96 aa, Heterodera glycines
MERYAFNFLQSTADLSISAQEYLWSIFGIKTSSAAVKNLVHHQPEIESQIFTFCGTQIAMNSLARRIAGLSGAAAVAMAGFSAHRGRREIPVLQKP

SEQ ID NO: 145288 - protein, 50 aa, Heterodera glycines
MIRRFTLECLSRFGTEVEDVANRSALDFEAHSNPLALHRRRAARRSQFLG

SEQ ID NO: 145289 - protein, 71 aa, Heterodera glycines
MMNIRSNGKIRFAVSCSSNMNRSMEAHFFLQKRGFNVQSFGSGNYVKLAGPSVDKPKFTSSTHHKEHILQT

SEQ ID NO: 145290 - protein, 51 aa, Heterodera glycines
MSFILFPSTLSLAYWLCSGFGSWVRIPMYVAELIELNPLMGLDPCPWLELF

SEQ ID NO: 145291 - protein, 95 aa, Heterodera glycines
MFEYPKRTLEKIDFFVFGAVPPNRCAQIYVETESFGNSFPIACTLILRWIFAPHNCLSTPNGHLKKSIFLFSGQSPRTDAPRFMGRPNPSGIASL

SEQ ID NO: 145292 - protein, 154 aa, Heterodera glycines
FCLIFLPQTWYQQLPSLVWPYQTILRYLKRKQKKFLTKKWLSLFSHFFTANLVPTVAFSCLALSNNLTIFETQTKKFSKNCYLFFLIFLPQTWYQQLPSFVWPYQTILRYLKRKQKKFLTKNGYLFFLIFLPQTWYQQLPSLVWPYQTILRYLK

SEQ ID NO: 145293 - protein, 198 aa, Heterodera glycines
  unsure (1)..(198): unsure at all Xaa locations
RIQRDAQVHFGCVRSGKLRAFGRQSCELWQFSWHFSCHQFICLENHSIETHCFHLVPHPKVFLTVHDVGKTYLSCVDLANSPTLSPLVGQRAVFLHVSVPGQAPGAENFVGDFPXMEQLGDGLSQVMEQFNLSKCIAXGEGAGADIVCRFAMSFPQLVVGAVLVRCVSTTHGIVAGVKEHFTDFVRNDGEMTHSAWNW

SEQ ID NO: 145294 - protein, 127 aa, Heterodera glycines
MTFYYLFACLYIILLLANSSTGGNNKKGKQNAQSYNENNQASNTYKEYLPGSVLKNGRNIKELKELFVKKIKKIMKEASEDRGQRTTNNECAVDLPADFWDQFQEIAKLPEIKGVKFDGNRMIIEEK

SEQ ID NO: 145295 - protein, 86 aa, Heterodera glycines
MNNIGSDRFMETMFFDEDFRLDHPELGRQVIVEQPEFDRVFGVLQHGQHHDAQEALVEMAGGQREDVNPIVRLTGAHQFAKNGSRK

SEQ ID NO: 145296 - protein, 167 aa, Heterodera glycines
FSQIFTILRQNFEIGILLSLAPSGWWAKFVNKLMGTGQSYDRINIFSLASGHLYERFLRIMMLSVLKNTKHPVKFWLLNNYLSPQFRESLPVMASHYGFDYQLIEYKWPSWLHQQTEKQRVMWGFTLTTMGGFYYADPQFAIFQEFRTFIPLILINLAFSAFFNVLK

SEQ ID NO: 145297 - protein, 32 aa, Heterodera glycines
MKAEKSKVKMTIRRNIVNRNILLSDYFIIKRN

SEQ ID NO: 145298 - protein, 34 aa, Heterodera glycines
GSFEASDGRFAPVSKFVGLLRPLRGLRRALRARF

SEQ ID NO: 145299 - protein, 45 aa, Heterodera glycines
MDQRDSHCPYVLSSKSSDKGTCLTNLSGNEEPGGEGPPRGREEKR

SEQ ID NO: 145300 - protein, 86 aa, Heterodera glycines
RLTRPLEPILFPKLRIFADFPYLHYSRLEAVHLGDLLRISVRSGRRFKLPSHFQGPCGAHETPQEPRCFTGATSLSQAEPLPGTHT

SEQ ID NO: 145301 - protein, 647 aa, Heterodera glycines
MPKYCTWVKKDKKWKYPRQGYQNKIGRMVPVRPSETEKYYLRFLLLNVYGKSFKDLKTVNGVEYDSFGKACLARGLVRDDEEWHKCLEEATYFSRKHAKGLRTLFVNILVHCAPKYPARLWDSFKELMVDDIKRKNPSFSIKQINNIGLKLIDQCLRYYDKSLRDFKDMPQIINKTKIVDEDEIYDPENELELANRLIMMMNDEQKAIIDKMRNILEEKDGQKCIFIDGPGGTGKSFTLKTIYHLVRSFNKNICNMAFSGIAATILKKGRTLHNRFKLPLNIKKTSTSGIEINSSDAEEIKNIEVFIWDEAPMASRFIIDIIDRKLKELMGNEKPFGGKIFILSGDFRQCLPIKEFSTRSETVNLLIKNSHLWNFFITMNLTKNMRANPNEREFARQLIEVGNGTAGENGFITVPDQCISKGDLANEIFGEIIKESNFNELSNYAILSPYNTVVDRYNEEIMEKFPGETHTYLSIDETDLISDLTVTPEILNSLKCPSMPNHILNLKQKSMVMLLRNLNVREGLCNGTRLQIVDTGEHVLNCVIRSGDKIGETTLIPRITLIENKNFPFVLRRHQFPVRIAFAFTINKSQSQTFEKIGIDYCDEPFTHGQTYVALSRAKSWNGIKIKLSEDNKENKIKNIVWHETLL

SEQ ID NO: 145302 - protein, 76 aa, Heterodera glycines
ESKSDFEGHEFDWVIMAICMDNKNEEEDAKKKMEKEEGEVDEESEDREDEIQLVGEKGKINDDDDDDEEIVVVVAP

SEQ ID NO: 145303 - protein, 172 aa, Heterodera glycines
MKRRWDFRSMSFFEQPSLPEQSSSSQRQSQQYDDDNQQYGEGDTTTTAARTGGRKDKQQKAEDLFKQVTHSVHRLERFSVSRHITEFVLNASVEEPEEVMRSAFQMLMARAIQHSEQQSGRKVVKIGVTLQGRGLLIGKCRHCYALTHPFEQAYMIPSSYLFDHQSKTAATH

SEQ ID NO: 145304 - protein, 122 aa, Heterodera glycines
MDLRNFGGVSFMARQTNARRLVTGLKRRAAETCEAPATIRAQVLQNTCTPVLASFPSKDATKKVIKRLRRDENAPRVEPLNLEQLEIPNTYRVYKRTEIDEEQFLLADTGVFQIHGQNGPQR

SEQ ID NO: 145305 - protein, 44 aa, Heterodera glycines; identical to SEQ ID NO: 140010

SEQ ID NO: 145306 - protein, 135 aa, Heterodera glycines
KASQTILALPIPSTNAFIHPIMSAKIIRVPKIACDLSLAKNGVSKNRNYAQKASQTILAHPIPSTIAFIHPIMNAKIIRVPKIACDLSLAKNGVSKNRNYAQKAFQTILALPIPSTIAFIHPIMSAKIIRVPKIA

SEQ ID NO: 145307 - protein, 22 aa, Heterodera glycines
MNVMKTGEEHDITNFKLGKTQK

SEQ ID NO: 145308 - protein, 179 aa, Heterodera glycines
YVPWRQITFTGRLFDVGEGRATTLLFLLKCLIYMALDIVIWVALTFLSYKLLVWTFFTPFERGFYCNDQSIREPLVPNTVSTSLLIAITLGAPFFFIFLADLMRTTRPRRRNITQVINRSTLEYLNYCIAFWLMTLAIDAFKCLIGRIRPNFLSMCKPREWSEVCTVTPDAYVKLAHCT

SEQ ID NO: 145309 - protein, 127 aa, Heterodera glycines
MTFQSLGLNPPAFQSLRLNSQAFQSLGLNSPAFQTMGLKSPAFQTLGLNPPAFQSLGLNSPAFQSLGLKSPAFQTLGLNPPTFNDIPISGTQSTSISISETQFSGIPNNGTQISRIPNTGTQPTNFQ

SEQ ID NO: 145310 - protein, 127 aa, Heterodera glycines
QTDLISHNINTGNSNPIKSAPRPIPFGVRAKVTEMIKDYLDRGIIRQSSSPWASPIVLVTKKDGSVRFCVDYRKLNAVTVKDSYPLPNIEQILMYLGNRKFFSVLDLISGFWQVKVNAEDEPKTAFT

SEQ ID NO: 145311 - protein, 53 aa, Heterodera glycines
PDVPPWHTSATALAMCEQLSTHIGPDAGAFVLHRKRRISRKPDTGEQEYCYLP

SEQ ID NO: 145312 - protein, 875 aa, Heterodera glycines
MELINTTLTTMCYSTVKEARKKIKHLRKEEVQRYLEGHRTYTLMRPRRVRFPRAKTIAAGFMTDVQVDLADFQALSRHNGGHRYLLVAVDVLSKRLFVVPLKNKRAEEMLEAFKELIEQMPMFPHRIFSDKGTEFKNKLVKEFFEEHEIAKHEPVHSSVKASVAERAIRNVKQRLYRYFAEKQTLNWVDTVQQIVDGINSAPSRVHGMRPIDVNFRNAQKVWKRMYGQQLLKISQRRAPRFRKNEFVRMSREKGQFEKGYLPNYGDEILEVDQVLKAVRPIRYKLRDDRGEKFRGTFYEQELARVRKDDETSYRIEKVFRKRRKPDGGSWVCGLHSISYPYSWHSTIGTLDDQWIDIHFTNLHSVDDDRQRVIRVPVPQASHKKVEQLRDFLQATLKSQEKVRLKPLAHEEGYFDKPVVLGSPPHAKRLKRSTIDDLSSLPSPPRYDETDEQQSQQQQPQSPPRFDETEKEDKKVKETTPPSAAKQPIPPAPILAPPSHPPTEAPKAVTATKQAAPKSATAPPPKPSVTSTITAAKTTPPPAPIPPIKQAPSAPKPSPSKTAAVPKPTPTPTPASKSTIPTPASSTKAQNIPKIPPPLAAKPKEPNVAKKSTVPTTVSTTSISSLTSQIGPTPTTPKPPPPPIKPIPTSIPAPSPPPPPPPPPPPPQSIAKDAKRSVEAPNESNKESKRLDVDDRFFGGLAAGDEFPDDDDKESEWPYDPFKNIVDDVEIQYLDDFERFKVVFKNPVISHLSFSPQLGYVLGFENPQHVGPQEISKYGCDLRGGFSSFAVYSKGLTENMIVGNSLSSLLRVVSVSGATPGDYNEKIYDSPIYARVLPREISEIEIELRTMDKGRLVPFAYGTTMVVLIFKKVINF

SEQ ID NO: 145313 - protein, 196 aa, Heterodera glycines
MVLVSEFCAQFLSCPTKSLRDRLNHPEDRVRVLQQLIGKKVQTTYKDRNGMCKCFFVGGMTERGAAFEPAYGRLRKPFNINVAAHFYARHRVKLHYPYVPCIIEGFTRGEDRYYPMELLEIVDDKKGGRLFGRLFTEIEEQEEEDTKSDCSHSSNTSYLQFNGKGFKWYESTDEIANTGRGECSQPSSSSPSHTYW

SEQ ID NO: 145314 - protein, 445 aa, Heterodera glycines
MLLTNGKSAGETRYPTGHPKVHVLNQQVDWRCATDNPYDLSLLKVWVVPPRRCDVPVLPVKVGDRLCFPLCIKCAVDYPNGGVDNEYSCTHNDQQRGWVSTCTSLELNAALDEGYHVTKLFRVLQYESSDDQLFKSYIREFMAQKIQATGFDANIKGNADLEDQFVRECYEKYGITIDKAKMQPNKGKRSIAKLCLNNLWGRFSLRNFGLSQTLITGDPAVFAEYLDNRSLDVTAIDQLDDEHMLISYEKKKEWVEEHACSNIVISLWTTSAARLLLLRAMQKVVRTQGCVLLYTDTDSLIFAHPIGLCPLQTGPHLGQFTDEYPKHEILEFCSGGAKQYGLKLRRKDAPADADNEYVLKVRGMTLSYDVIQNQGLRYETFKDKVLRFAETGEPQPINVMYPNFLRPSIKDGRVISCPLQKIYKPFVGKGIVGADFQIFDFGHTL

SEQ ID NO: 145315 - protein, 249 aa, Heterodera glycines
PEENVPPLPPRSPAPNENEPPRPPRSPAPNENEPPRPPHSPPPKENEPPRPPRSPPEENEPPRPPSSPPEENEPPRPPRSPPEENEPPRPPRSPPEENEPPRPPRSPPEENEPPRPPRSPLEENEPSRPPRSPPPEENELPRPPPEPPRSPPVPPRPPPAEPNEPVRSPSEPPKSSPPEKLPEKLPKLLPVPPPLPPKDDTPVTPLTPRPNEAPRFPPAVSPPPIPPPPFPPRRFPPESFPPLFFSNSC

SEQ ID NO: 145316 - protein, 221 aa, Heterodera glycines
HMLKEELILMEQMKVLVLDEADQLLEDESARDLRQIAKIDGWPKVKYATFPDEVQKWADEWVKPTALFVSNKKPVSANVKVVQKFIRVSRSSKNHELLKQERAELKAEKRVFPPLNFYSMFHHLADEPEPKIRPTMVFVKMKRTADVISTYLNLNKVPSTTINGDRPQKLRHAALDDFRAGRYQVVVTTDVCARGIDLKELDHVINMDLPIDYTTYVHRIG

SEQ ID NO: 145317 - protein, 67 aa, Heterodera glycines
MHAFCARAIYHRACQSKAKQQRWCFERIKGIESVNRLLEKYICNLSTILRSELEMINFTIQDQFSVL

SEQ ID NO: 145318 - protein, 136 aa, Heterodera glycines
MQQIITYWFYEILSIIKELMDPSRGFYDKDGDKVTLAIDVIVKEENADKLDYSNPNKTNGKIVMEIGKLAEFSREICLSERSSEIKQIKGLSWKILALLINQNNKSSEKCLAFYLLCAGSKNGTKWEFIPLNQIGN

SEQ ID NO: 145319 - protein, 203 aa, Heterodera glycines
MDMEESSELEVAAVDYVFQTTLDQLPITAEEVAPRTQEDDELQQVLHQCRTHWPKTAHSSTLAAYFTHRNRLSEIKGCLLMGDRVVIPAKLRQRILTTLHFTHPGIVRMKNLAKQFVYWPKIDLDVDGWVRNCEECALASKAPPKVPLQPWPASTQVYERLHMDFAGPCADGNKYLVVVDSFSKWPEIIKMKSTTAHLLIDKI

SEQ ID NO: 145320 - protein, 49 aa, Heterodera glycines; identical to SEQ ID NO: 131679

SEQ ID NO: 145321 - protein, 58 aa, Heterodera glycines
YKVIRAIPTNDSQVLALRHFANLMESSNSRKGTVQFWQHAYTLHSNADIFADSDSAKK

SEQ ID NO: 145322 - protein, 315 aa, Heterodera glycines
QQDRRDFRREMYQVSIYGSTMLRYKLYTFANNEDSTAAYSWQKLFNFMADSTSISASSRADYLKRYMTDEKKKKKGAKEQKSGKSAGMRLLDDEDTFIRTPHAKPSKIDEERIEEDEDDELMGRHRPQFDGIETEGQRNGWAQFQNGLIRHRRRRWGTLSDDDIKKEPLSPAHLEADEERGKSRSKEKKRRTKDTTEAKHEIKEEETNEMPTIAKKRRMDNGGRAGLLSKEAMEREERELRERDLQRLNELEASTAESGRDAETRKRETGFERRRRGEKRETAEDAARKEREAAKQKEMEAKYSLWNRGVAQAEE

SEQ ID NO: 145323 - protein, 92 aa, Heterodera glycines; identical to SEQ ID NO: 125147

SEQ ID NO: 145324 - protein, 78 aa, Heterodera glycines
MIGRAVRNRPFIFEGIFKFILYPRKMAISFFEKFYTSQKRLRMRRRAVHNRHFISQRIFIFRGYPRKMAISFFDKFYT

SEQ ID NO: 145325 - protein, 38 aa, Heterodera glycines
PVFIAINDPSITADQIDALVADIANGLFAVCVTLGVVP

SEQ ID NO: 145326 - protein, 69 aa, Heterodera glycines
AISAGKQKKSDEESLKMATGFWCQYRQTTHQQTLHVKLHNFQMDNQLPASTFPSLLAMVPQPKSVVKNG

SEQ ID NO: 145327 - protein, 27 aa, Heterodera glycines
MHRIIAAVKKLVVGSVLAVRCTLCVLL

SEQ ID NO: 145328 - protein, 87 aa, Heterodera glycines; identical to SEQ ID NO: 144693

SEQ ID NO: 145329 - protein, 71 aa, Heterodera glycines
MLMIHPMTEPSVDGKSQQKSTASAPAEFQRAKCLAESEVIKEKPSIRTRLIVCVVCGAIIAFCLIKLFIWK

SEQ ID NO: 145330 - protein, 15 aa, Heterodera glycines
LKAIHCLPVLGTAKH

SEQ ID NO: 145331 - protein, 167 aa, Heterodera glycines
NFGFILKLSEFTLTHFDIYKLLETILNESPSSNKKDTKSAKNKNKTASAPSPPKIYTFLMDNFIASSHYKKHLETSKKIDKFVKCAFVNFGQLLLLRGKFNFPEFKKFADEREKECGKLPFKDDIDIDNTPLSGCKQFALQLFNDEPLWNYARAIKIEQNECKSKMN

SEQ ID NO: 145332 - protein, 54 aa, Heterodera glycines
MHWRFDFFALGFNAIVFFLFLFALNSEGPEKWSWENVLLDFYVLLYVFVSLCEK

SEQ ID NO: 145333 - protein, 48 aa, Heterodera glycines
VNIDHRPQTQKCLKTVRIDVKRFEMGWKNRIRGALALFQDEKCRKWSA

SEQ ID NO: 145334 - protein, 16 aa, Heterodera glycines
EAIPEGFGLPINLGAS

SEQ ID NO: 145335 - protein, 99 aa, Heterodera glycines
MSDNSQIAIQLQRMAFLLDEKEAGLETIQKLLVAKNEFLEKNAADILERQKIQHAIESQQNARAQLLIEITNNLLTAASDFQFHLDLHIIGENPLSESP

SEQ ID NO: 145336 - protein, 32 aa, Heterodera glycines
MNRRWVCIDVWMDIFPLFDHAQLGLKRSLISL

SEQ ID NO: 145337 - protein, 176 aa, Heterodera glycines
MPSLFSLIFFLMLFVSSPSRHRLVTAVSSNSSSSPIGTSTDAFGIPSPTSPISTALTSYTNGTATFGIPPPPISPIINASSSLPPIDPLEASVQLKIGFLFANGTQRLRTLFGFGQSAPAVTLALERARQEHLIDSINFTYTWRMCDCFQPWAVGYATQLILTENVDALIGPPCVT

SEQ ID NO: 145338 - protein, 16 aa, Heterodera glycines
EAIPEGFGLPINLGAS

SEQ ID NO: 145339 - protein, 101 aa, Heterodera glycines
MHRHALKQLRKLKDLKFPTSQPFYRALVDCHNQIFAFYKTVGPGESGCLSYSLCVLPRIPKALCTVTKSKFDTVVANGAVFHVRTKSEFVEERCTENGGGI

SEQ ID NO: 145340 - protein, 121 aa, Heterodera glycines
TKRRFLCPSVKTKEQMIFEIDFRISATIGEKIMFGKKHDGSTDDLRKATRVAPPGPALKNKLDKFVDRKLNECVARVEKLVNNKKDEVKDLAEHLEASDGWHLNEEQIHQFFKSRNANASP

SEQ ID NO: 145341 - protein, 44 aa, Heterodera glycines; identical to SEQ ID NO: 126591

SEQ ID NO: 145342 - protein, 148 aa, Heterodera glycines
GAWPFLVRGAICLVYSDNERDSSLLNSWLIASGHNFLEGFSVFSRTKLSNNRSVMPLDVRGCTRATLAKSACLPSPKGVGKPVKICRDWDRTLQLLSENEEFLVGASHQLALNTSLPFVHTARGWPRLAGSLRQCGMHARGATRLCWR

SEQ ID NO: 145343 - protein, 42 aa, Heterodera glycines
CCLYHPTPLMGSNERALWHLNCSFGSSHIASSAYQKWPTCSS

SEQ ID NO: 145344 - protein, 15 aa, Heterodera glycines
LKAIHCIPVLGTAKH

SEQ ID NO: 145345 - protein, 75 aa, Heterodera glycines
MVRRRIHREQDLAENELDMSCKAICSRDRFWHGAKDEQQGEQDEKEHDNCPMAQIRTVYKAGYGRNERRRNEGVP

SEQ ID NO: 145346 - protein, 64 aa, Heterodera glycines
TNLDIPLHLVDNSFEDNLALGHGHQYMERFGYHDGNERDEFLTKRPKRQAVIIIKTTNYSFYYF

SEQ ID NO: 145347 - protein, 138 aa, Heterodera glycines
MGIWSSIWPQIILPGIFALVSVLFNFSLILVTFTKIKDHKVCNWLLAFDSFCQLFFVAPFLVNFLAQILQYTTVDYRICTGSLMASTVASYASFLALFLISAERLLIVLFPIKMNWIKEQTIRRFSLFFLYFLSFLAL

SEQ ID NO: 145348 - protein, 144 aa, Heterodera glycines
YGRGENGEFHKPAYIAGRYRLFYVNSKNTKVKSAAWYANRGVHYKIEDCPDKPEDEDGYVPPPEQEQPGVIAGQPPVTLANALHDDLHGPADREAIIGLQPTDEIASAFDAFAEKAEDFVDLLRTRIMELEQQTRTLQRNLRQK

SEQ ID NO: 145349 - protein, 72 aa, Heterodera glycines
MIKSMDLNASESDEFVGQRISRDWQWISIDQNMLNNITEIEESLAKEKELGRNLKRQNENILMNRQKHLNPS

SEQ ID NO: 145350 - protein, 31 aa, Heterodera glycines
MVQIQVQKYSKQDKLLEMLKTDAIWRPRPNG

SEQ ID NO: 145351 - protein, 93 aa, Heterodera glycines
MVRRRIHREQDPAENELDMSCKAIRSRNRFWHGAKDDQQGEQDEKEHANYPMAQIRTVYKARNGEIWSHISMPILCLLGQTILSFVSDYEGNS

SEQ ID NO: 145352 - protein, 19 aa, Heterodera glycines
TFAFSSLALPNTHTIFEML

SEQ ID NO: 145353 - protein, 19 aa, Heterodera glycines
TFAFSSLALPNTHTIFEML

SEQ ID NO: 145354 - protein, 19 aa, Heterodera glycines
TFAFSSLALPNTHTIFEML

SEQ ID NO: 145355 - protein, 19 aa, Heterodera glycines
TFAFSSLALPNTHTIFEML

SEQ ID NO: 145356 - protein, 19 aa, Heterodera glycines
TFAFSSLALPNTHTIFEML

SEQ ID NO: 145357 - protein, 19 aa, Heterodera glycines
TFAFSSLALPNTHTIFEML

SEQ ID NO: 145358 - protein, 19 aa, Heterodera glycines
TFSFSSLALPNTHTIFEML

SEQ ID NO: 145359 - protein, 30 aa, Heterodera glycines
MEKACKIRRDYIDFSALDFLFISLFDIESI

SEQ ID NO: 145360 - protein, 24 aa, Heterodera glycines
ITGVSIIAVLFLVFLMLSQNLVRF

SEQ ID NO: 145361 - protein, 89 aa, Heterodera glycines; identical to SEQ ID NO: 144620

SEQ ID NO: 145362 - protein, 132 aa, Heterodera glycines
MPPLPKEPISSKPVSEIKVPKFQQQPPHAPAGDSTAITGQRSETRVKMNRMRLRIAERLKEAQNTSAMLTTFNEVNTNGGEAGDMSECRSVQRGTDAQAVPRGVHEEAWCQVGSDVSVRPRVRNWVAGTARG

SEQ ID NO: 145363 - protein, 21 aa, Heterodera glycines
LNNTIHFFLLIALDKKRENTN

SEQ ID NO: 145364 - protein, 42 aa, Heterodera glycines
NFFIWTSLFVTRNHYFGDFVTKIVKNHYFGVLSLFFHYFDIF

SEQ ID NO: 145365 - protein, 216 aa, Heterodera glycines
MGRMELDLDQMVKGKPNLVEEEAAYGQRKREITASIANMFEQYVDSLNRLRPLSVKCVLADDELKRLKRRRRVMGMDDDDIGEQLNTVKKRYQAQCKIREDHKINVEEAKDAFKTLAKYSPAENEQSHEETRAFTKMKSDVHEYQRLLEEHDKLGTEVRRVGERNERWKREMDDRLSEWLDPLGELVANISNNFTNFFAQLGCAGEVRLDTPPENK

SEQ ID NO: 145366 - protein, 79 aa, Heterodera glycines
KFLFLINPPVDQTRTRKWPFKCQFYFDGGIAILASTKTQFRPTIFAMLDKVKEEIEFVTTRMITFLTLEKRIISRPIIF

SEQ ID NO: 145367 - protein, 37 aa, Heterodera glycines
MTFSKRAQDLAEEGGLAEMMDIFRTTTTAERTEAAER

SEQ ID NO: 145368 - protein, 31 aa, Heterodera glycines
MGSKNPTQNYSTGYREAIPEGFGLPINLCAS

SEQ ID NO: 145369 - protein, 321 aa, Heterodera glycines
RAELDSMDLPPVSLDAALGHLQSRFENENTKSIARQNLAICRQYPGEKVFDFATRLSEAVRTALAGETEGNIRKRLLEEFLDRLIPELQYEVKSERPTDYSRAYELAQHYELLQASRKSTSNVAMNELIEKVEALAMQNVRHAPNFSDQRDHRVCFYCKKAGHVIRDCAARRREANNGPNWRRDENSRRTERNGNYSRPFGQGYERNRETWRSGNSQQNSRPNQNYRRYRDQSGTRRECDQENRFPRTPTPRVNPRGGRIAGARVASPYFLAIIAIFGSVLSNLNPCKCSKTAADDLFTGRSVEFIGNSPEEPISPHVATD

SEQ ID NO: 145370 - protein, 59 aa, Heterodera glycines
MVRRKEEFLGWDAPHLIFPFFCFTTGQRRLCSLTRSCPIKVLGLSTVKCGANFGTVPPH

SEQ ID NO: 145371 - protein, 49 aa, Heterodera glycines
GTWTFHSKMWCKFWNCPASRRGLKALYIIIKSENNFRIFFHNLFQKTTK

SEQ ID NO: 145372 - protein, 92 aa, Heterodera glycines
MIGRAVRNRPFIFEGIFKFILYPRKMAISFFEKFYTSQKRLRMRRRAVHNRHFISQRIFIFRGYPKKMAISFFDKFYTHTNALEHDREGGAQ

SEQ ID NO: 145373 - protein, 35 aa, Heterodera glycines
SMLAFHARMGRKLCRFRPPQIAAVSTVPASAGGDN

SEQ ID NO: 145374 - protein, 53 aa, Heterodera glycines
NFRRFVSHCSVIASATCEVGKQIIVHNGGEAALVELSGGRVAEQFAEKQLSQF

SEQ ID NO: 145375 - protein, 106 aa, Heterodera glycines; identical to SEQ ID NO: 134274

SEQ ID NO: 145376 - protein, 173 aa, Heterodera glycines
MHLDYKPDNLVYVELENGGKILKVIDFDGTYLLPDAKDRKGKLAIVSDRLKILTGTERYNAPEFYAELFAKKLSTKTDIWAVGIMLYEILFLQKKYTIYEEMGSDTQSFKNLLYHLNEIHRGFTVSKDLIKYNHHPITYSAEWLSKFNVKILFWMFQAWTDFPRVGLLITVII

SEQ ID NO: 145377 - protein, 79 aa, Heterodera glycines
MSAKGIMDFLDGNCCPVELYEEKLEIENIFNDLSVKELNKNIDQRVEMDTTEFEEKQKLLAMKRMMKKARLLRALNSEA

SEQ ID NO: 145378 - protein, 85 aa, Heterodera glycines
PSLDIVEPEISQKLSKKVDPSAALFAVFDGHNGAECATFASAHLTECFLDAFEQSDDIEKILNDAFERLDKRITEKCTSEVGIAK

SEQ ID NO: 145379 - protein, 122 aa, Heterodera glycines
MSINGSALSAFQRIWHGFLSKKKVSRAEVMSLAEQIDPEVNDNELFDEITALNEILESISDQKFGEMNAEQDHLLCRVYFSNKIFFGSIALYESNQLIIVGFYTISLLMFEAFGYHSKAQSL

SEQ ID NO: 145380 - protein, 111 aa, Heterodera glycines
MDTALPSSCWSLSVPSSTAAAAGGICTGGSMPATTNPAQIGLMAMRRSETVPPLGHPDTSLFYMSNFPSMEMSSRRPPLPPLVPLPTFTEEEEEEGERDDDGTGIFREIEK

SEQ ID NO: 145381 - protein, 22 aa, Heterodera glycines
SNIVRLFDRARQEKATVGTNFA

SEQ ID NO: 145382 - protein, 59 aa, Heterodera glycines
PQTWYQQLPFFVWPYQTILRYWKRKQKKFLTKKWLSLFSHFFTANLVPTVAFSCLALSN

SEQ ID NO: 145383 - protein, 95 aa, Heterodera glycines; identical to SEQ ID NO: 124528

SEQ ID NO: 145384 - protein, 48 aa, Heterodera glycines
MFTSSAQKYLGRKASEIRMMEQDGDGEGLARLLDSFIGKKIVAKITIK

SEQ ID NO: 145385 - protein, 102 aa, Heterodera glycines
MSPQLLAYNNRDGLYEDAKFPVESIQLYFTAGPVAIRWLRPGEIVAHPQFINQEPIAGDVRQGSIGNCWALSAASVLAQYGPLFYRVVPPDQGFGHNYAVRI

SEQ ID NO: 145386 - protein, 362 aa, Heterodera glycines
MKAKFYLLAYILLVCCCSKLFHGISFEELTSNNHAKPLIDQYLRKEIKTKGELLEKLAEIGVDLSLRSLERYISKIKNRKSTEGNKVDMENAEVSQCFSKFDNKFLFIIGHESEYRKFNKTNEREGVIYLYCMCCKKLKKPNSDSLIASAILRDGLLDRTHQIIHDKQCKGVPLEQLAAEQIDRSQRRDLVQCSINPKSLWREVFLFIKTRTFFVKGSDRAREHDVAEDIEIEDISGISFNYPNWQSVRSSYYRRRRNHLGDCSDPFNVPERLQLNKRGSIKLLLKKKISEEDMWLRFRDKELGVMLFISHSQIKAVSHCKVLVSDGTFELAPLKFQQIWTIHGLVRAFPLAGVFAQFRNFG

SEQ ID NO: 145387 - protein, 232 aa, Heterodera glycines
MALGPALFRLRQHITSAENLLDEDDPDAQTVISLRQERDHIIRILSRMEAEMDAWGTIMNALQGPAREAEEALFANFVRDDRHLTDWLEDARELLAHIAAELANPPNQVMPAGGQQPVAAVNQAMPQMPAIPVAINAAAGANLQQPAAANHAYLPPPVPVANVHNMPILPPAAAPQATARLPQSVFLFFRANQWNGPRFGRVSRVPSTVPPLSPSTNSTISTVAYAERLLVP

SEQ ID NO: 145388 - protein, 180 aa, Heterodera glycines
ILVRVLIVPIPMTGLIRDRSRISRHYLLAWRVGICAPAAILRRSGHFSGPFSGVEPLSSVTRHHHGSQIHYHRKLIRQTLERHVAGTRPCDQLSCSESTLDARRALGFVANKCAPLWGDWSFGACISSRITTVIQVRSQGQVNYSWCNEPYAVSLSGRLNLHMHGLIFEMNTSVQAGSTR

SEQ ID NO: 145389 - protein, 67 aa, Heterodera glycines; identical to SEQ ID NO: 128477

SEQ ID NO: 145390 - protein, 72 aa, Heterodera glycines
PKGIPLIINDHVDVCLASGADGVHLGANDLPVESARELLGPDAILGYSVNNEKALEHAIRLGHKIDYLGVGP

SEQ ID NO: 145391 - protein, 144 aa, Heterodera glycines
QHIALNTSDIVHAIQSLRARGLEFLSIPDSYYASLKQRLSDAGVELKEDLEKLRELKILVDFDEQGYLLQIFSKPCQDRPTLFPCQDRPTLFLEIIQRHNHQGFGAGNFGFGAGNFKALFESIEAEQNERGNLFYKDVAVGGEK

SEQ ID NO: 145392 - protein, 29 aa, Heterodera glycines
NVKSINFFCCCCCRIDGAAIAFERSFFSF

SEQ ID NO: 145393 - protein, 67 aa, Heterodera glycines
MAAPSIRQQQQQKKTNLINQDIFILSDLDPPNQDKFDKSGQIASLQYYHMLLFGEREMALALAKCHQ

SEQ ID NO: 145394 - protein, 63 aa, Heterodera glycines
LTLKNNSLPKSFLQPLIANLISCRFKAIHCLPVSAQQSTNRVFDSLQKIIHYPKVFYNHILPI

SEQ ID NO: 145395 - protein, 45 aa, Heterodera glycines; identical to SEQ ID NO: 143169

SEQ ID NO: 145396 - protein, 82 aa, Heterodera glycines
DSRVTEALEQLTSDQIEQFRKYFNMFDFRKYFNMFDKEGKGFIKATQVGQILRTMGQAFEERDLKQLIREFDSDGSGEIEFE

SEQ ID NO: 145397 - protein, 91 aa, Heterodera glycines
MMREAHFCVLAKSCDEASFEKLVRSLCKEHTIPILEVEDKAELGQMVGQCKYDKDGKARKIVGCSVAVVKDYGRDEEAKNDLQEVLKKISD

SEQ ID NO: 145398 - protein, 136 aa, Heterodera glycines
MPTFPWSKKRKASDDEVVESGMTVRQILEEREEYVKNIGIEYRFGCYEEKRADSCQYLGEYFEAVQTDFKSAFDTFRQNCEQRKFPRSCFKYGQYLAAGRACEASFKKVGWMKRGSCVNVSLMYRNGEGIPKDEKK

SEQ ID NO: 145399 - protein, 96 aa, Heterodera glycines
MHEIIPREQMPPLLTPEEETMPKLLHGSYKNLVAFLDTNSFRFEDKVWLFDIIHKTVFRMVKVRLYLAFKSPHNLRGLAFITDPDGYWIEIFNPNN

SEQ ID NO: 145400 - protein, 246 aa, Heterodera glycines
SLAQRSRREDLSDLLQRYIRRAYSRWAHFVVAHTWKIVVLCFIASAICGFKMLNTKVKNQITGYTPYGSRSLNEFAVQDEFFGQTGLGVKILLLILPKKGNNLMNLESLRETVDVDNLVRHNLTFYNQKHDRDESFSMICNFYCNVSEPVQLFYTGFQDQYDRVMKHEPLNDRIKLDYPFSLIMGRKVNLQPNFYGVHVSKTSKPKFGNMDKIESIVIRYRAEKTRGWTDDDISAYEDTITDYFEK

SEQ ID NO: 145401 - protein, 44 aa, Heterodera glycines
IKFLKIFNSFLNRPKSLGLTFFSETYQKRTKLCRDTERKRNNLF

SEQ ID NO: 145402 - protein, 146 aa, Heterodera glycines
NGVSKNRNYAQKASQTILAHPIPSTIAFIHPIMSAKIIRVPKIACDLSLAKNGVSKNRNYAQKASQTILAHPIPSTIAFIHPIMSAKIIRVPKIACDLSLAKNGVSKNRNYAQKASQTILALPIPSTIAFIHPIMSAKIIRVPKIA

SEQ ID NO: 145403 - protein, 55 aa, Heterodera glycines
MQTLRHALFDAITANGKKSGESPTPFRLSAKQQKKRRTNEGGKINSDNILFIAFC

SEQ ID NO: 145404 - protein, 24 aa, Heterodera glycines
MSRSSIDALFANSIKKQSSSQNVF

SEQ ID NO: 145405 - protein, 101 aa, Heterodera glycines
QIGLEIIPLVQTFGHLEWVLKLEQFAHLREHPKFPQVICIGNDEAFELLKTMVVQVAEVHARFGMRHFHMGADEVFQLGVCNESVREMRAQGGRERVRAKN

SEQ ID NO: 145406 - protein, 67 aa, Heterodera glycines
MANSPSTTVTFSGISTIRAAPSMTPRAVQGDRPPSGASPPNPSPSRSQCEWNRCRCPIVRISDSTAG

SEQ ID NO: 145407 - protein, 155 aa, Heterodera glycines
TLIQLCYPKCEQSDTGTYSIRIVNDLGSDSVDLRLKVVDRPAPPEGSLKDLETSGTPARIVEIPENVTVVEGELAIIKCVVEGNPAPTIVWKKGARKMPLTDDRVRCQTDGDTGHVSLIISKCRPQDGGEYTLMVKNAHGKHNVGAKLLVTPAAE

SEQ ID NO: 145408 - protein, 22 aa, Heterodera glycines
MDARDEETLNDPLQPQDAEGDH

SEQ ID NO: 145409 - protein, 19 aa, Heterodera glycines
TFAFSSLALPNTHTIFEML

SEQ ID NO: 145410 - protein, 19 aa, Heterodera glycines
TFAFSSLALPNTHTIFEML

SEQ ID NO: 145411 - protein, 19 aa, Heterodera glycines
TFSFSSLALPNTHTIFEML

SEQ ID NO: 145412 - protein, 19 aa, Heterodera glycines
TFAFSSLALPNTHTIFEML

SEQ ID NO: 145413 - protein, 19 aa, Heterodera glycines
TFAFSSLALPNTHTIFEML

SEQ ID NO: 145414 - protein, 19 aa, Heterodera glycines
TFSFSSLALPNTHTIFEML

SEQ ID NO: 145415 - protein, 19 aa, Heterodera glycines
TFSFSSLALPNTHTIFEML

SEQ ID NO: 145416 - protein, 160 aa, Heterodera glycines
MLDQIYNFSLSHRQLFNYFGICTDIPSTIVYILEMITIIRHKQFSKSSFYKLFFIRTVADLLNLVPNNFGNLLPAFFGQQLLPIYSTVPNWAIVFLTFFVKTFEFKVSNIVTVFILLNRFTAIAFPFRHKMLWKKYFWHLIVFMLILPMIITVPSTTIIF

SEQ ID NO: 145417 - protein, 550 aa, Heterodera glycines
MKRFSLSQNSSSSFPKKSQPNKCIRKIDNLTSKSKKYQLVRSKSKFVIEEIDKCADPAAELRSCVHHSIEEAILDGQNTLGAANKVGVIISSELLDQGDIILPITPITANVVDAVFNQFCKVEQSKSKHVNLYGAPFIITVTVLNTNGLPRQRTTKGKGRPPVSSQSHIFKVNNNDNYCLFYALELMRYYSLYKRGIITRDNWRWINNNQTTVLRQKALQLLREAGIPTTETEYDAEVYIHQVQGLWNVKYPGEYKIFIFNDYQMRPITKSDITDYQFPILLYHNNNHFDGIKTLSKFFNKRYYCISCESAYSHKFEHSSKCSSLCHGCREVGVDYPCDPQQGYSKKCEHCNTPFTTTAVMGATSTRICAPNFNAAKIVGIIAYDFEATQDKKVENRFEHEVNFAAATIICTDCIINGYWNKSLQGKKCQICGPHRSITFSPFDYTETTVDQKVVTQQPLCEFVQWLLFDHNKKFPTVAFAHFGGRYDMTMIIKEVLSQGIHNPDIIKQGNRLYELKIRENEHGPLTIFHDSYNLMPIKLSGLIKIVGFI

SEQ ID NO: 145418 - protein, 86 aa, Heterodera glycines
MPKVAQPMVKNVVKKGNSNAFIVVTKERPFLWKTETELKKKMEKRVPIGFMPLKKPMSTNFAKKTFYSNTIAAEPNWHMYIKKFHW

SEQ ID NO: 145419 - protein, 110 aa, Heterodera glycines
MAQHSAMRFVMASEQSDVIYLGASEFWAIIVFSMLSQRSNNRRRRHPMTCPPMVMPAPPASMISAITPLITLKIQFVTADHELLWSYLDNQITHLGEEFFGDRKGGIADI

SEQ ID NO: 145420 - protein, 40 aa, Heterodera glycines
NSKYQLFLPFYLQKILRQDALFDCPNNSKEARDLRSQTGS

SEQ ID NO: 145421 - protein, 21 aa, Heterodera glycines
MRTRPIWQVKQRLLTSQKKGF

SEQ ID NO: 145422 - protein, 153 aa, Heterodera glycines
PGVAGPDGVQGKIGLRGSDGIPGASLAEQEWCFDCPQAPPGPKGPKGPKGPNGVPGLPGRAGKRSQINLSLNYMGISLAGEKGPPGVPGSPGLPGLVGPNGPPGPKGEPGKLNDLPAAKGPTGLHGLDGPLGPPGPDGPSGKPGPSGPPGQLV

SEQ ID NO: 145423 - protein, 59 aa, Heterodera glycines
MSSGWKFVLYFLLLLLLLWEPKMMKSRQKSKLIMSNKSVKNVALRRCLFCLTKIVNSTI

SEQ ID NO: 145424 - protein, 97 aa, Heterodera glycines; identical to SEQ ID NO: 143380

SEQ ID NO: 145425 - protein, 36 aa, Heterodera glycines
MTRAIDANGRPNGKKSPKGENLIKSIPSGDRAGCRG

SEQ ID NO: 145426 - protein, 24 aa, Heterodera glycines
MAKTFGPMGQMPQQKQQQGKCRPI

SEQ ID NO: 145427 - protein, 519 aa, Heterodera glycines
RWALILLNYDFSIEFVRTDCTGQADALSRLISDQRSCSKDEDVVIAKLLADTEADVAHVFNTQTEQLPLTAKEIAEAQLSDPLIREVLECTMGRWPNKGLNPEIKPYFTVRNNLSIISDCLVFNGRTIIPQALRDRILKALHLAHPGIVRMKSLARELVYWPSMDADIESLVKSCVPCQEAAKQPTKHPLQPWPSTTSVFERVHIDLAGPCSNGRTYLVVIDTYSKWPEIFQLNNTSSHSVISQLQWLFDRYGVPKTLVSDNGPQFSSSVFKEFCKNNGIKHIFSPPYHPQSNGAAERYVDYFKRQLKKCSGDRNWLSKSLLSYRSTPIAVLGQRSPAELFLGRKLRTKLSLMRPETIPKQQHHEHTSKMKLQFDKKHNVKPVQFKIGEQVQFLNYRNGKTLWLFGRIVSNKGLIYEIRSPQLGNRIVTRHANQIRTTMAQRGDETCPVADDIIFAREEHGTGNETTDDQQTNTQPQQRAAQQEEQGQNQQPLPLRRSEQTRKRVRFLSPTHTGQSYDH

SEQ ID NO: 145428 - protein, 382 aa, Heterodera glycines
QLSYDLINVIEKCNRERIEVEISEDLVYDEFAEIGGKEGSESDDEFEIEGESQFESEEESPTKSSSSSNYVPSPKKVMSPHITLEDKKKALIFYRSAQKGYRSLTAMSKNFRWIKKESDLKKLRNFEINMKDKISAYKNLDHLLFEFFIEKRKMNLPIKNSDLRRWALQLNNQSGNKVSGFKAGIYWLKGFKRRKHIVTRKITKFVGKKWAKDQEKIYTDSAEFVSDTKTLIGKEHPDLVLNTDQSGFELELHSTHTLEISGTKKVEGYVQSVGSTTHSYTICPIFSADGLLYSPMLIVIGEKSGAENILSVAGRSHIMTKEIAKKFVSDVLLPIISGKKTVLILDSWPTWKSVIGEKESTSERMVVDDIRIQTIPPGCTGL

SEQ ID NO: 145429 - protein, 59 aa, Heterodera glycines
MLAGLTNLYTDYWISAAMRNNKQKRGRKGRWLWKIADKKERRADDEYLACPAHNICGME

SEQ ID NO: 145430 - protein, 25 aa, Heterodera glycines
RTLSTAVRQRSSKIYSMPQILWAGY

SEQ ID NO: 145431 - protein, 97 aa, Heterodera glycines
MAGNLQRSDHQIIKVCGLTTPLDGTEDEKIACFKPEGAIGPIGIKFLRKFRTNETAKDGRNNHEEDGLSDDDDAGWMESEMTTNCSFFEPLLLLNLF

SEQ ID NO: 145432 - protein, 92 aa, Heterodera glycines; identical to SEQ ID NO: 129648

SEQ ID NO: 145433 - protein, 92 aa, Heterodera glycines
MIGRAERNLPFIFEGISKFILYPRKMAISFFEKFYTSLKRLRMRRRAVHNRHFISQRIFIFTGYPRKMAISFFDKFYTHTNALEHDREGGEQ

SEQ ID NO: 145434 - protein, 129 aa, Heterodera glycines
MNSQQRQAERAQLRARLNLLVDEVDFVVQGLISNYQADGLINEAPHEGQLMGMDHGQGLQHEQQQQQPWELDPPMPAQQFEIGPQLPDAWELVPYQPTPQWAQVAHVEQHPQQQQHYHPPAQQQQQQQG

SEQ ID NO: 145435 - protein, 143 aa, Heterodera glycines
MLDVSGLTEADQKKNPGAIVRALKFYAAAVKQRENDKFMYPQKSVYPVSEDDIETDEFEFASGSTTASNGGAIPRRSSSTPHQCNSESCGNINSGHALEQFNATWYYDTDESATVADHEFFFENWHAAKRVSNLQTCQIEPQN

SEQ ID NO: 145436 - protein, 336 aa, Heterodera glycines
SLNTQTYPNKLWHEGRVPYMLEEGMSALQRAAIASAFDEYKGKSQFAREGLAKRMKERANALRQNVHSLRPETKYRIRLHLCETELRVGMHALGFFHEHSRTDRDEYVDLLEDNVRPGMLRNFEKYPKKIIDPLGMPYDYGSVMHYHKLAFSRNGRATIVPVWEKGGGILTIAFVRSRKAWKLDKGLKGNLAKKSEDEFRHKLSEIDAMKVNKLYRCDSEGPATETTTTAPKRTSETTAETKTTPEGQTEEQTTTEESEPTTGEEETAEQTEETTTDDGAGAETETTTEETERGTTEETAATTETETEPEKTTTHLAFRNKTKPKERRTKWPNVAK

SEQ ID NO: 145437 - protein, 59 aa, Heterodera glycines
MDPRNGFYDKNEDKVTLAIDVIVGQAEMDRAISADQSKSKGTLFMDIEKVSQFAREIIW

SEQ ID NO: 145438 - protein, 68 aa, Heterodera glycines
AVLVRFITAPNLLASQQSLLNLPDRTGAHDSTVPSTPPKAKRYNQNIRKNFLKNFFSIFVFDTKASEC

SEQ ID NO: 145439 - protein, 223 aa, Heterodera glycines
MSLSVVDRMKRMLSTGEDADVHFLVGEGEEKEASLKIKRVAAHKVILKHASEVFEAMFRFDSQNQNVENACANCVVEVPDVEAAAFKVMLSFIYADDLSQLDGDNAMAVLYAVPSGVLTVEEVIGIYQFHCHPNLHMVSELYPLKFPRQGRISDRTEGTLQLEIEKMSEFAGKVMGSCRYSKTVHIRGLPFEILAKINATTENDENFVGKWLGIFLWCTAPTE

SEQ ID NO: 145440 - protein, 175 aa, Heterodera glycines
VRQAYLKWPSAIIPYTVSQQYLLYGRDQIVQAIDEYSTKTCIKFRPKTPSDMDYIHIFPDDGCYSLVGKVGGKQPVSLGDGCMSKGIIIHELMHAVGFFHEQSRSDRDNYVNIKWDNIDQNLRDQFDKYSQNMIDFLGTQYDYGSVMHYGPYAFTKNGKPTIQPKQPGKTIGQAI

SEQ ID NO: 145441 - protein, 92 aa, Heterodera glycines; identical to SEQ ID NO: 129555

SEQ ID NO: 145442 - protein, 127 aa, Heterodera glycines
MTAIAAVSPPFESASRNGAAGTGAGGCVAGTARHRQFAESRSLSTATNWCKMRNAIAEAGNGNDGGGVEALLLTKRTKAAAQMPNCAAPSTKAATADKCHPITTTVAPEAVPYYQLNSAENVNGEAN

SEQ ID NO: 145443 - protein, 16 aa, Heterodera glycines
EAIPEGFGLPINLDAS

SEQ ID NO: 145444 - protein, 34 aa, Heterodera glycines
GDPFVLQSFFKIKNHNFLSGVLKVANHESDMYFD

SEQ ID NO: 145445 - protein, 172 aa, Heterodera glycines
MSNIAFIRIQKECKEIILCKELQENGVTIEPVNETLFEIIGKIRGPPDSPYENGIFILDVKIPQEYPFQPPKLLDWLFSLVLLSVQSLLLSPEPKDPQDAIVAKQCLSDPALFRSTAKYWAQHYANAPGEIDRNKAKCVSTLQEMGASKDASISALSCYNWNLAKATEFLFT

SEQ ID NO: 145446 - protein, 69 aa, Heterodera glycines
MYTGDAAISGSSAQQAKTGTESSTSKPKACCVCKETKGKRDECIILNGEENCGQLIEAHKKCMREYGFE

SEQ ID NO: 145447 - protein, 38 aa, Heterodera glycines
GVKCAICVKISLNTSLVNPFKECSQMLPLCCVFLVDEL

SEQ ID NO: 145448 - protein, 132 aa, Heterodera glycines
MRINSVHFQEVKKNSIELSLFEYDRRFEQKFPQFFINYDYRKPLDVPSNLHHNFDFLIADPPFLSDECFIKIAQTIRLLSKKETKLIINTGAVMEGLLQRILDVRRTEFRPVHKNNLANEFLSFSNYPLSIL

SEQ ID NO: 145449 - protein, 192 aa, Heterodera glycines
MYEMKVRKQKKRNPNVVFRDSFNLMPCSLAALIPSYGLDVEDKPFFPHLANRPENYGREIQPTPDDYLANGMMPGKRRQFDEWYAEHHHEPFWLDEALASYCTNDVEILMAALVAFRREFFEISRRQEYIDGIDDRENHDGIDVLRECMTIAGACMRHFRTNHLPSEHLAIVPERGYDNAQNQSLLALRFFH

SEQ ID NO: 145450 - protein, 121 aa, Heterodera glycines
MQTRYASSVRFHLIGFTSSLTLSSKCFATFPHGTCSLSDSWPYLVLDEVYHLIWAAIPNNPTPRHVKMGRHRQLDRSCTFSGAPVKGNLNKRANPSSRSIRYTSQPQRSCDSALDSSQFTR

SEQ ID NO: 145451 - protein, 173 aa, Heterodera glycines
FPSLGLNPPAFQSLGLNSPAFQSLGLNPPAFQSLALNPPAFQSLGLNPPAFQSLGLNPPTFQSLVLNPTAFQSLGLNPPAFQSLGLNPPAFQSLGLNSFQSLALNPPAFQSLGLNPPAFQSLGLNPPAFQSLGLNPTAFQSLGLNPPAFQSLGLNPPAFQSLVLNPTAFQSLG

SEQ ID NO: 145452 - protein, 204 aa, Heterodera glycines
MDVINESANSEIRQKLIQMPQGSADQAQPMSEGTIIIDLERTGSTTTIANEFASIPQHDQTGTNDNANPNDQTNFVNPNDQQLVKPRETGQLMPMTADNLNLASLHEADNVEQFVMIPTPNMRQINAENRVNSKRNSKSGEKTDFGAAESINEASPSTVQRKRGRSKTLKIQDKNAVGKSKMGVEKPSMKSAKGKSKMVFIIKY

SEQ ID NO: 145453 - protein, 103 aa, Heterodera glycines
MPFFFFFLEFAKACGGGTELIPFFGYALRIVVEAPIELGTDTKTEEDDGQQQKQWGECATFGSGKTEKEAEIIFEKNSQEAPAETFRDEPFFEFVKAIVSGSH

SEQ ID NO: 145454 - protein, 304 aa, Heterodera glycines
MRRSQMLARNESFLETLCNAKKANDLIRDATDEQLLCLVEICLNILKGRVPLRTRHLNKLKAHAQHTKRYLFVPEEIYQSLASPPPSDGTPIGLVRNRIKQIKNDDGINEAERAIKYEQELKRLNKLTRDEDERPVGVKLENLSDVVDAMPKPVNVKRPIVVATRRHLKVGRARKANVEQLEDVDDDDDDDETPKPSSSNKRQPTQTEILKLIYKNAQSLGVSEEGQVLRAGGRPFITSSVYDIVSHLMNKDKRGQNKETTAFKEFVERARQIPLLSRHLFPEGQSGKGIYKNTTLKFNPSLWI

SEQ ID NO: 145455 - protein, 82 aa, Heterodera glycines
MCSYIINRTRTGPGSRRDFAGPGPRPIFFRQTTKTGSPFKTGVPVPRSGVPVTRSGVPVPRSRPDNYHFYIVFVGYFVILII

SEQ ID NO: 145456 - protein, 89 aa, Heterodera glycines
MTQNERVQNFQSKSYKTFLIKEDRENNFNRECNGKKFSSQSSLIPLVIDGELSLCFYCLDVFESLPITLSIKMFVLCLSSSKMLMSDQY

SEQ ID NO: 145457 - protein, 104 aa, Heterodera glycines
MYFEKYRALATGLFKSSLRFSISSLGVTVCGAGVVVVLLCVPCGALYRPIEFVPIYEGEGEEEEEEHGMTDNAKEMTKEENDGETDGQHQYKGRTRKAQKTKPF

SEQ ID NO: 145458 - protein, 81 aa, Heterodera glycines
MPIANPTDGSSVGFVTSGCPSPTLGKNIGMGYVDKAYAKVGNILTVEAGRDRMIEVEVVKMPFVKSAYYLKPTSVDEDKKK

SEQ ID NO: 145459 - protein, 190 aa, Heterodera glycines
MPELEAERKGMLNLTNGTVSAPGTDKQLSLEEAVLRKDRIHRKGFFLLVWACLLCYLLSYLPGASAEQGTVEALHTRWEPEAIGPITFSDINYDYEDYGQTTEEPPTTTPPPPSTTSPPPTEPEPPSATTPNPTVPTPTWCPVAITGLAALVVLLCLCLCCCPSVPQSVANWCRRFVHRFCTCAGEGEKF

SEQ ID NO: 145460 - protein, 116 aa, Heterodera glycines
FFLLVWACLLCYLLSYLPGASAEQGTVEALHTRWEPEAIGPITFSDINYDYEDYGQTTEEPPTTPHIFEKIQKILKINKNKSYGVSEVPGSGFEIGRNGCYIRDQRPPKPHKTCFY

SEQ ID NO: 145461 - protein, 28 aa, Heterodera glycines
PTNLLTNSLLIHSVPKCRPLSCAQQPLG

SEQ ID NO: 145462 - protein, 100 aa, Heterodera glycines
NVDLLCKADFTRRATQTEIRRRLNGRRVDLLLSDMAPNPTGESYMDHLRIIKLCRDLFMFGTVPDPEPILAPNGILLCKVSIHYSIFKKKFLDFRRRSQK

SEQ ID NO: 145463 - protein, 94 aa, Heterodera glycines
LFDSGLFLEQSVSGSGSWWNPTPADQVPTNRPGTVRCRHFPKPSHKNAKTNRNAKALTLPLFVKCQSDSRQLSDEELHFAKSHLLMAESVPPFG

SEQ ID NO: 145464 - protein, 16 aa, Heterodera glycines
MAIVHSPPSSYASAFV

SEQ ID NO: 145465 - protein, 192 aa, Heterodera glycines
MRENKIGIYNNHLNAFVTTDFTKVFASKKSKKELYKIASGEMAPHFLLNVGDNFYDEGVTKEDVAERFEQNFTEVYNYDSLNVPWYTIAGNNDWESKDGIEPQIEHPSGKWTFPAQHYVVNYEFGESPDNRKTARFIMIDTTVLCGNGATVFGKMQKKDTQKYAKMIENAKKHFKWLRKELREAKRRLKYEQ

SEQ ID NO: 145466 - protein, 271 aa, Heterodera glycines
MYGGQTNANGSGVQICVEPLNEWEIQEVGYDGVEKYIKPLAFKDHLRKNAQNIEWSKIIGEKTNADTLTEESDSDDSQLEGSPIGLAQTTKGFIEPIAGPWAMVAKHLHNSLQEVDILMDCMRIARTDYLSPMVTALVQDERTEAEQVAVSKAFQLHTRRRVLNETAREIERMANARRGASSETDKNDFFNELRELRENWRIRKVGPNIFGDLGYKTYDEKTAESFFKVTNRPSTSEEDVKHVHWRKALPWAQNSLICREILARVLRIPFD

SEQ ID NO: 145467 - protein, 40 aa, Heterodera glycines
MKGCRKMEKFSTNFVHFSPRRITRQEKNSELGSVKVLLKF

SEQ ID NO: 145468 - protein, 134 aa, Heterodera glycines
MPAPHDKTSLRSFLGALNYYGRFIKEIREIRTPLDQLLRKDENWNGSEERQKAFEKAKIMTSDLLLTHYNPTLPIIVAADASKNGIGATTGHVFPDKSGKVIEHASCVLSNSQQNYSQIEKEAMALVFAVQKFH

SEQ ID NO: 145469 - protein, 158 aa, Heterodera glycines
MNARIIRVPKIACDLSLAKNGVSKNRNYAQKAPQTILALPIPSTIAFIHPIMSAKIIRVPKIACDLSLAKNGVSINRNYAQKAPQTILALPIPSTIAFIHPIMSAKIIRVPKIACDLSLAKKWSLPIPSTIAFIHPIMNAKIIRVPKIACDLSLAKNG

SEQ ID NO: 145470 - protein, 28 aa, Heterodera glycines
IFFVCVSNIVRLFDRARQEKATVGTKFA

SEQ ID NO: 145471 - protein, 36 aa, Heterodera glycines
NATKKILDQKIAISFFSFFYRKLGTNSCLLLSGPIK

SEQ ID NO: 145472 - protein, 139 aa, Heterodera glycines
MNITAAPISEYSTMLVYITSLKLAVIKNYPFSFFRLYPSFSNSNSAIITQNALGPVAFSHRSFDGQSGTKQKAGATDGNVQICPVQMFGIFNRRLAFCPPNFVSHQRFFNENVTDPSPKNTKCICTKTNAMAIMSKTMT

SEQ ID NO: 145473 - protein, 409 aa, Heterodera glycines
NDQSERAKNSVMCGLSLFYSMLVTIFALVLELSHLMVTLVLELSHLMVTNNSRRNLGFNDMMFGIYMYGCSILMFGIYMYGCSILFLLYCYCALLLNPRWKRKIDYEKSISIKCINLIYKIYFFAVFSAESSANIVSHDGPSAGSLFLRLGCVVFGVIGTVYYAFNVFLCFNVFLCASDGTCPHYVIVLDIMAIAFVFVQMHFVFCNWKLLAISDYQVICRFGTAHLIATNLWTWIRYILIEESLMGDEIRWAKCHAPSVENAEHLNGANLDISIGGTGLLLGAGLTVKRSVRKCHGAECVLASFNEVMYTSIVSFNEVMYTSIVEYSLIGAAVMFIVWKNIGQRQKKSDYVYVSRKHRIRMDCSKNNQGLFFGLAFLTTTFTSISIFSYTINTFTIIHLHFKPFHNPS

SEQ ID NO: 145474 - protein, 92 aa, Heterodera glycines
MIGRAVRNIPFIFEGIFKFILYPRKMAISFFEKFYTSQKRLRMRRRAVHNRHFISQRIFIFRGYPRKMAISFFDKFYTHTNALEHDREGGAQ

SEQ ID NO: 145475 - protein, 60 aa, Heterodera glycines
MNETQIKEKEEMVIMQMCSDQNPCWPMIGYGIFLLILTIGGILSNFSVIFITIRTKFKNF

SEQ ID NO: 145476 - protein, 39 aa, Heterodera glycines
MAVQSCELQYPSVQHGKKHNKQSFNANEKHYKEGSADAC

SEQ ID NO: 145477 - protein, 17 aa, Heterodera glycines
LKPSIACRFSAQQSTNR

SEQ ID NO: 145478 - protein, 49 aa, Heterodera glycines
DLHIKFGPFLDEKAAEFDSDTLNRYKEQQRSKNFPAMFWDAPEMFNCFP

SEQ ID NO: 145479 - protein, 34 aa, Heterodera glycines
MEAVHNETPSGMPTHKRTIKVNKILFDYCLTNKS

SEQ ID NO: 145480 - protein, 81 aa, Heterodera glycines
MPLSANSTKLAVVSIGILALLSILSAEAQAMQTADVEGIDEQKLLFLACIQGKLESALFLLTRGFWKRVYSSQKAKVKRKD

SEQ ID NO: 145481 - protein, 470 aa, Heterodera glycines
NKLENSNNTSIDSIPNIFLKNCKENLVYPLFHIFCFSMMTGQVPNIWKKSIICPVPKIPNPINPIDFRPISLLCSISKILEENITQKITNFVETNDVLPNCQHGFRRKHSVTTQLLEVIDDFSLALENKKSIDVIYFDLAKAFDTVPHERLVSKLKNIGINGTLLKWLQNYLQNRTFFVRVGSAFSDEFPCLSGVPQGSNLGPLLFLIYISDLPNFCKTENVEIKLFADDLKAYSILSKNTISPLHSFINKFRNYCELNGLKIAPNKCLVSHIGPKNPNECYFINNIPILKSEKGEPVRDLGIYFSNDLKWEKHIEFITKKAIRTSFALLKSLKTKNPKILINIFNIYCRSILEFGSPVFNPYMKKDIDALENVQKTFLRIVFRRNNNKDDIPGYNELLQLFKQESLLKRRTKIDLKLFHDIILGKIHIQHNDSFSIYSGLKNDYIIKTGSTNVRFHSFFIRTSRLYRSL

SEQ ID NO: 145482 - protein, 174 aa, Heterodera glycines
MAEQFNAIAERLNEIERKINSNNNDNSSAEEKERKRSLVLIGLPEAVAAKPSERAKEHAETVAEVLDALDVEVCPQMVYRMGRRIDEKRKGPRLVKVVLPATTFQRFALAQWGRNRTELKQHVGWQRLLVRPSLTKEELAAEREIREQRRMNYEESKKNEMVTTRRGGNMGKNF

SEQ ID NO: 145483 - protein, 60 aa, Heterodera glycines
MGRLRFFDWIRRGVFFPKLRVKYPKPKHKVRRSKLGVVFEAEGEAHFFEARVLGVGVKKC

SEQ ID NO: 145484 - protein, 21 aa, Heterodera glycines
GLGEARLSTRSRSRRRSPIFI

SEQ ID NO: 145485 - protein, 35 aa, Heterodera glycines
MRKCQKLEIKKHREGVNGVDQAKLDNERDAKLNQL

SEQ ID NO: 145486 - protein, 35 aa, Heterodera glycines
MMGIPSRNPDQSRRFWKNNREGSRVRNSVVLSEFA

SEQ ID NO: 145487 - protein, 103 aa, Heterodera glycines
MFDFVPKLLAAGLGILLLFISSTSAGGPFDGGSFGISPFGTSAFGAAPPLFPPPPAPFFRNYGPFALHKLFVYIYPYPIYSASGYGGYGGSFGGFGGSGYGKK

SEQ ID NO: 145488 - protein, 27 aa, Heterodera glycines
MRHHRWTSTTARCCCTIHGRRHKSKCI

SEQ ID NO: 145489 - protein, 219 aa, Heterodera glycines
MEDLSDLLPESSVWSVIYTPRNQIERIKRVKIPLIQLKKFDGSVESWIPFWETFRVHVHEDNSVTKIEKHNLLESNLEGEAKDLIEGIPISEDGYQFAIDLLLLSSLNQNIDLSPHYLFLEGKLSPLVLDKYFVIKDAEDNQNWDTTKFRNALSRAIEQIKNRQEVKQKCGKERDLNYNRNDSEVTMNFAVKFREEWEKLLNEQKTKKLEKTKEITEGV

SEQ ID NO: 145490 - protein, 45 aa, Heterodera glycines
  unsure (1)..(45): unsure at all Xaa locations
FAPHNCLSTPTGHLKKSIFLXSGQSPRTDAPRFMGRPNSSGIASL

SEQ ID NO: 145491 - protein, 36 aa, Heterodera glycines
NFLKYKPKLFGLFKKELNIFKIFIHLPFDRKSIREP

SEQ ID NO: 145492 - protein, 49 aa, Heterodera glycines; identical to SEQ ID NO: 137875

SEQ ID NO: 145493 - protein, 81 aa, Heterodera glycines
MGNQHRFQPRGNGPYGGGGGGGGDRGDRGGGGGGGGRGGGGGRYGRSPPRDRPRGRFPYRLAVSGLPISGSWQDLKDHMRD

SEQ ID NO: 145494 - protein, 39 aa, Heterodera glycines
CDHIVKSPMKSLFLRVEIADPVLPESSVVTTMFSYVGEN

SEQ ID NO: 145495 - protein, 72 aa, Heterodera glycines
LFFFNYFFHFITQRSRLIRSSPNFAGKLLRTLQMLINFLRIFCLEEHSSSHLPHQHYFFLIIFFILSPNVLD

SEQ ID NO: 145496 - protein, 87 aa, Heterodera glycines; identical to SEQ ID NO: 142763

SEQ ID NO: 145497 - protein, 224 aa, Heterodera glycines
MPKIKSKFEWMGEWVNKNGLKRVNKKFKKNEKIVLIEKFEKMKKEQLIKKRNINKKANQIEKEIAKKLDVSLTSIYTWKRQFEEENKNEWTKMKKLIKVFEEVKHRFILEKGKMTRKVMKIVEQKIANKIGTDRQQIFKWKRKFKVKNEARKDDKSAIIAEFEAMKKEYLRKHGNLNKKAKEIEEEIVKELGTSRTTIRRWKAQMASQKKNHNKGRQGEIIEKY

SEQ ID NO: 145498 - protein, 91 aa, Heterodera glycines
MPSRSTTSISVGIGIFFALFCSIFFAIVTVAGVIVGISAAVVTVAGVIVGIFFAVVTVAGVIVGTFFADVTVVVVIVDNKKHLRLSRSTKV

SEQ ID NO: 145499 - protein, 66 aa, Heterodera glycines
MEASFWHKILKKHSITLKNLPKFAFAVEMFVHKCIETGRKQCQIRGRAEDGQIRGECPSKHPCKRN

SEQ ID NO: 145500 - protein, 127 aa, Heterodera glycines
MADINIPRWGELEQWKNNVHRIHGGVKEQHLRHTPQPPSPRTTTGIAMEQQSTTTTKRSPNGGAGANGDDGDGGNDCHAAENGSEEKKPTMTTTTVAAKTPIGTVLNAFRRKIKDEKLARRCKALIR

SEQ ID NO: 145501 - protein, 74 aa, Heterodera glycines
MANSSRIVWSVNLFTFKDAFCSGNFGVITVITLWPINGGQRDTIALIVIGVNNSKQNRSIDPIHEIFIPSRFWI

SEQ ID NO: 145502 - protein, 276 aa, Heterodera glycines
ESGIAVGIDHSVSNVIHSVSNVINFDFPLSTDMYVHRVGRTARGFNKGTYVHRVGRTARGFNKGTAISFASQEELNLFEVVRTEINERMGQAVIQPYEVRMKDFEGQAVIQPYEVRMKDFESFQLRARDVIAACTKTVIRETRMAEDVIAACTKTVIRETRMAEIRAELLKSKRLDAYFEKNPREKRALEQDRKQFKLNVHSAGIADVPDYIVPKALRGQDFNSEQKRTKPKALRGQDFNSEQKRTKSERNNRKRKRPLKRKHAKMLSDPLQSFKF

SEQ ID NO: 145503 - protein, 34 aa, Heterodera glycines; identical to SEQ ID NO: 140281

SEQ ID NO: 145504 - protein, 29 aa, Heterodera glycines
WLTITSSNLALSILIQIAPNFFYSLTRPY

SEQ ID NO: 145505 - protein, 155 aa, Heterodera glycines
MWLELQVTQLEMEAQKIRGIYDATRLEAHRAIEAANAFTQIAHGLLQARNNTRTAQQLMKETQGHLRGVAEAATNAKSASKSMGATIDTAAMEVSAARAQGDTLDVRLANIQPRLSQAKADLAKVSRTNGELNAREDTVAEIDKIMDKAENAYQK

SEQ ID NO: 145506 - protein, 74 aa, Heterodera glycines
MRISTACKIAGQIMMKIKNFSGFASEKGGGEQFSKAELMDTRNGLYNKKNTVTLGIQFTVEGEDGGEQQAMEAD

SEQ ID NO: 145507 - protein, 43 aa, Heterodera glycines
LFENFLKRGDPFVLQNFFVIKNHDNLLSGVLKVANHESDMYFD

SEQ ID NO: 145508 - protein, 89 aa, Heterodera glycines
MQGNCNDMFVLNDCAEADGKCGNGTMDKFCEKPLKWNCKECNGTKCNNISKLSTASTAKPMIKPITVKNDENRIFVLNALSESKIRDEN

SEQ ID NO: 145509 - protein, 91 aa, Heterodera glycines
MTDILKQWDIGEAQEAHRCVGSCQTYRCSDTTKCYGTLLPSNDYKVPKEFKELFTNYKKRSTINCKGEKCQTFTCQDGENWANKKRANNWE

SEQ ID NO: 145510 - protein, 72 aa, Heterodera glycines
LSLFSHFFTANLVPTVAFSCLALSNNLTIFETQTKKILDQKIAISFLSFFYRKLGTNSCLLLSGPIKQSYDI

SEQ ID NO: 145511 - protein, 77 aa, Heterodera glycines
PKNGYLFFLIFLPQTWYQQLPSLVWPYQTILRYLKRKQKKILDQKNSYLFFSHFFTANLVPTVAFSCLALSNNLTNI

SEQ ID NO: 145512 - protein, 170 aa, Heterodera glycines
MRRSTPNLFSVPDYQQPSAFRPPPPAAAAVANLLQSQQPPQQSPSSVAANASATVAAVALSNALSSVQQLLQHQQQQHQQQQQQQRLAAMAVAAAGAATANGLFRQHSFGGIGFTEQQQQQQQQQQQQQQQQQQQQQLVQLQQIAAVPQQQQQQQQQQQVAHNQQQNSPK

SEQ ID NO: 145513 - protein, 30 aa, Heterodera glycines
MRFNGNFKTSQMVFTNSDQHIDIREMKLTD

SEQ ID NO: 145514 - protein, 140 aa, Heterodera glycines
MQTFPGCPRRFAQESAAGCGGKHNSEQYNKTNYPASAQQPATGGAEPVEDVPLPTPAVVPTDRRRQHVHGPGGWANLTARPFGTCHWQPQQLFGAIARRQPDGGCAVGERRVQLPAASPGPDGPGKFGAIPSDCQGAQLT

SEQ ID NO: 145515 - protein, 91 aa, Heterodera glycines
MNAQVGNSQTHLNFCFMFIKTDLAHVELAAHGLEKVVPYPLRAGMHHPITGGIDLTIITNFATQCRIGPFQHCLMTTIVQQFLNLKHFAKT

SEQ ID NO: 145516 - protein, 73 aa, Heterodera glycines
GFRRTSPTEAALLWPGQHTDGGPSAQKKPEGQPIESDRSPHNTGFLPPRGNSPLGHGPMQTFCCCCCCCWAGT

SEQ ID NO: 145517 - protein, 102 aa, Heterodera glycines
MTEKYKQKREYSKNEWKQNYAEICKKIGVSKTTIIKWKKQFGISKKRITEEEKKEKMKIYSQIKRENTKMSDNEIAKTLKIHQNTIIRWKKQFVEENFGGLN

SEQ ID NO: 145518 - protein, 137 aa, Heterodera glycines
  unsure (1)..(137): unsure at all Xaa locations
QYNVQQQTGECRPDTPXSVRFHLIGFTSSLLSLQVLCTFPHGTCSLSDSWPYLVLDEVYHLIWAAIPNNPTPRHVKMGRHRQLDRSCTFSGAPVKGNLNKRANPSSRSIRYTSQPQRSCDSALDSSQFTRRYYGNPR

SEQ ID NO: 145519 - protein, 116 aa, Heterodera glycines
MTCAYAKLLGPCFKTGRTDDRLLHRERTSESPSWTELVAGTCRTRPPPTPSSSQHGPETIAQFTQSKQHSPDPGTRPQKAGLKTELTQLLRASQRTPPANAPFATEQKDSKPQSGG

SEQ ID NO: 145520 - protein, 209 aa, Heterodera glycines
MQRDNLLTCLADLFSNISSQKRRVGTIAPKRFVTKLKRENELFDNFMQQDAHEFFNYLLNAISEVLMEEKKKEQLGGSLRKANSAMAPNKRSFSANAKGQPNDLSAKQLTSTSDITGQQELTWIQEVFQGTLTNETKCLNCETISSKDEDFLDLSVDIEQVLAIRCAIVKPNWLFFRMFPLAIVFAIFPTWKHCRVTRNICAKHAAVSM

SEQ ID NO: 145521 - protein, 219 aa, Heterodera glycines
MSLGLVFFSLADSKVLNFDRIMISLALVADAIIGNVQEKAMREYNASNDENVLFSYSIGFAYILVGLCLSGQIGEAFLFFAQRPLQTYGYSVLIGIVGYFGVRPLQTYGYSVLIGIVGYFGVNVVLTMVRTSGALVTVTVTTMRKAVTTMRKAVTIVFSFYFFAKPFTLGYLWGGLVVLLAIYLNVYTKNKKQLKLAEWWSNLAESYNGQKFAAERKLL

SEQ ID NO: 145522 - protein, 117 aa, Heterodera glycines
MRDCAKAKAETIAILRIIAHFKNGKNETWRFVCPLIDYLKYLTDRTFNAKEKWPANWQCYGAEMAKTVREQRKMLKNKHFELIDTLLNDGTEENAEFLIIVREQRVTNLHGQKSLIR

SEQ ID NO: 145523 - protein, 127 aa, Heterodera glycines
EFSRRCLDYIDQNAETLFESEEFLQIDQNLLCEIFGRDQLKIADELIIWNAALRWADEKCRQNAVECSAENGRSALGPALFKIRFPLISTEFFTKSIVPSGVLTTDEFLSVYQFHCSPNLRDVPGLK

SEQ ID NO: 145524 - protein, 102 aa, Heterodera glycines
MASSKSGILADRMKHLLGTAKLADAYFLLLSAHKLILVSASDVFEAMFRFDSKNGKPEKASVDNPVEVPDVEPTAFKVMLSFIYADDLSELNGDNAMAVLCA

SEQ ID NO: 145525 - protein, 21 aa, Heterodera glycines
LYICYIGFEFRFKKQNLPAEG

SEQ ID NO: 145526 - protein, 95 aa, Heterodera glycines
MFEYPKRTLEKIDFFVFGAVPPNRCAHIYGETESFGSSFPIACTLILRWIFAPHNCLSTPNGHLKKSIFLFSGQSPRTDAPRFMGRPNPSGVASL

SEQ ID NO: 145527 - protein, 103 aa, Heterodera glycines
MDSLCGSSDDTPLPQTKKSKIIRKKLSATFKADSNRDSVQEVLDALDVVQTRDSHFSGIEYKVINSLKNNRTIAHRPPYHAREHLYVYKIYQKKRYPFFWDTL

SEQ ID NO: 145528 - protein, 161 aa, Heterodera glycines
MEQEENSEKSTTPTTESDITLSDRMQRKSDTSSSTNICCDETAEAFFDAILPHDKLQQPQQQPLQRTYTTTSTTTTAKRQLTEDERQLLADVIVSSMFGTSSNQTNGEDAATNSAAADHAGGSNSTIRQAEIDEQQHYAASTTSSSYACTVSSTSKQADGP

SEQ ID NO: 145529 - protein, 160 aa, Heterodera glycines
YLRRISEGADPTLVDIESLDEESGDGEERDEDGPMVGQTVAASCEAFANSRMNCEKEQLMRAICEHRGAVEACWAHNPEVDGSKPSGRRAKPKRQFITPKVRQAAPKGVILNGQSFPVTPPFNICRAIRHIKLKHPEVMPEHRGGQSARDGFQCQEKQQN

SEQ ID NO: 145530 - protein, 77 aa, Heterodera glycines
MEWTSPGSTSVKRTKNITVLPSNMYVKQLSNATEDVNKRIAYGIGVGKERGFIHNGDFVVIVTGWQAESRITEGRVQ

SEQ ID NO: 145531 - protein, 98 aa, Heterodera glycines
IGMSILFFASLPTLIAMVMTMVIFVKIFIKEIFDPSFVDSIFSHTIFHFYIYKPIFFFAFFFVCLSETINFCFEIPSSYIKIYQILSTLDPYKLWPTC

SEQ ID NO: 145532 - protein, 185 aa, Heterodera glycines
MLSQEETEDRLERTSVCGIEGSDGLSGRFAEMSVTLRTSEGSAQLGRRRAGLARRRRRRRHNRRSLVKELCLFNKCRPEYLAMMLRRRKKENIKFIGDRKIETVHLRQNLQIYPESFTLFGANRMYAYRGMLGVTVEQHLYAKHRVRLKFPNLPCVVQDGGNGHQSYFPLELLKISSLAMQDETA

SEQ ID NO: 145533 - protein, 30 aa, Heterodera glycines
TQILKIIDFYLGFFINYLIFFQNFKKISRA

SEQ ID NO: 145534 - protein, 117 aa, Heterodera glycines
MTDAQRFQTIVQVHAFDPFRNTEAALENANNIAEGIIHVDLLNFLEANLPKKKKKVLLGVGDQRLSASLVEALPELIKIVPELYKYVCCATAIMNREKMDEAGKRKSKVLPRKFDKV

SEQ ID NO: 145535 - protein, 91 aa, Heterodera glycines
NTPKYGLLFHSTFIGRAQAKHKGRISRFLANKCSLASRIDCFSDVPVPSFGEALRQQVEERLVYYEKGVIPKKNLDVMHGAVEEATVEVEK

SEQ ID NO: 145536 - protein, 63 aa, Heterodera glycines
MPKSDERILGPSGKFEQFILVMHRMRKAKESGKKGQRKRKQTEKRKTNNNQRMDKPIALLLNN

SEQ ID NO: 145537 - protein, 100 aa, Heterodera glycines
GYRKNRQIGLYRRVNWDKCRLSILSAFCCAILHLNFRLKREVIEFRFGESRKCETRTIFIFCSKTISSFYGVILFGSRGKRLAKRTLGNPRKSIVTRSKP

SEQ ID NO: 145538 - protein, 24 aa, Heterodera glycines
RTLSTAVSQRSSKIIPCHRYYGQD

SEQ ID NO: 145539 - protein, 185 aa, Heterodera glycines
CNVSFHIGVLSPPSHFIGLDLEMAFNFHYHEVLQTIAEMFIDLVLQTIAEMFIDLFKYLQGNYIAEIEAVRRQYPAEPFLFTQSPLVLQYPEAVAMLKKAGVEQGDEEDLSTPNEKLLGRLVREKYQTDFYVLDKYPLAVRPFYTMDFYVLDKYPLAVRPFYTMPDPNDTKYSNSYDMFMRGIAL

SEQ ID NO: 145540 - protein, 206 aa, Heterodera glycines
MTSQKPAEDDPIGAEETVTTAADCVNELLETTEIQAEVDELVKSVVEFVSEAASAAADDVDHQQQRNAADESAKSRFGISSHEIAIPCKEFDRLLRKIGLKSGAKRQCPGKRMCPPRKVKASASDGVSAKIPKLSENGTAGGKQKKKKMQNIVEFDQVMASLLGNFEDDPIFLKCKEVQGMTKDLAQLTFQINQFLCHFITFIPVE

SEQ ID NO: 145541 - protein, 43 aa, Heterodera glycines
CFAVPRTGRQWIALNLQEIRLAISGCKKLLGKELFFEVSQTPY

SEQ ID NO: 145542 - protein, 158 aa, Heterodera glycines
MARLSHNLSIALLQSGRTQLSKRNNNDGPSQRTIKHTKALIKEVPEAIFCRSFLLSNGSLKIASSILNAKKAVSASSDDDPSFISEFVLCGEAPRLWAKVKQLEGQKRFLEAAQLLDGVEVENLRLIHQFLANQMTDSLRLLLDQARLYRIAGNTKRR

SEQ ID NO: 145543 - protein, 30 aa, Heterodera glycines; identical to SEQ ID NO: 126607

SEQ ID NO: 145544 - protein, 21 aa, Heterodera glycines
MVVSAKNLAPGLKNLGKLKML

SEQ ID NO: 145545 - protein, 39 aa, Heterodera glycines
MAPPPPPPKSKSSIEEDQTQQHELAASPEWAQNDVPTIK

SEQ ID NO: 145546 - protein, 90 aa, Heterodera glycines
GGRCAIDLLFLREFLNLYSIPEKWLSLFLINFIHIQMRLSMIRRAVHNRHFISQRIFIFRGYPRKMAISFFDKFYTHTNALEHDREGGAQ

SEQ ID NO: 145547 - protein, 69 aa, Heterodera glycines
MSSDVKPIFVHIFTLNKQKPGFCGVLAFHRNCGINPAGSPPTKIMSYNPSTGSELLDRGRTCYDLSEIF

SEQ ID NO: 145548 - protein, 139 aa, Heterodera glycines
MRDVEGLPDIWTVMSFDSKVFTENQLKYFMLIISLLTVLMKKTLKIISSVKNAKFFNFHIVPLAKTHYTKEKKMEIIRTFNKEKEKQPNLTNAQLAKRLKVNYNYIYKWKQQFKKESKHALSLTDSPFDDNFLGLESHN

SEQ ID NO: 145549 - protein, 128 aa, Heterodera glycines
MKIYKWIKEFGLQKQTQKSYKSKTDEEKIEIVQKFIEMSNEFKRKRKYSRKEWKQNYAEICKKIGVSHGTINKWKKQFGIRCKRITENGKMEKIKIYWQIKKANQKMSDETIAKTMEINRNIFLKWKK

SEQ ID NO: 145550 - protein, 70 aa, Heterodera glycines
MKKKQIDQFLEEIYDKCGEEKSSWVLNTRKKEEELNLKMESEINISPNNVSDFDPVHFTPEENTWSNASI

SEQ ID NO: 145551 - protein, 384 aa, Heterodera glycines
MDTFETKEKFIEVEEEIGKVSNHMERYETFTKVRFGKIVGKLKEEVRKITENLDVLKGRVHLLEFEQDNPERLAPFLGGITPLEGYDGNPSVSFSRWVARFEDMLTLYPQYSEVQKLSRLRILLSGQARADFDSSEPSPVSLSDVLNHLKRKFENENTRSIARQAMASCRKAPGERVYEFANRLNEVVRTALSGENEETIRKRLLEEFLEKLTPELQFERQEKGRRKERTWWSKGPTVYGERKWNYERNEREHRHRHFSPHDRPTMEEMRGNTDNGTSHPHNRPSHGRNNHRSPIAYEGMEYENERTQSPGRRVQFGGHRIGAARIASPIFLALMVILSLLGANFATNSVESPMICHPDSPATLWSIPIDPVCPSWTQRNCLWQ

SEQ ID NO: 145552 - protein, 279 aa, Heterodera glycines
ILKIHRHPVEINCVPLTERWLSKTKPYPAPEKYERKLKSQIGKMLEAGVITESFTPCAHNVVLVKKSNGQLRPCVDFQPLNKITIPDPYPIPRMDKTILRVAGQPFYSTLDLASGFWQIPLDSESSYKCGIVTPWRLYQMVKLPFGLRNAPSIFQRTMDKALEGIRNVTVYIDDIMVHTNTEEEHLETLEKVFCRLNEFGLKLKREKCELLKNECTYLGHILNGKGYRPSLNNQEVIEGFPEPKNAREVKRFLALFNHDLQKIRRCAHRRTPPFPTICA

SEQ ID NO: 145553 - protein, 52 aa, Heterodera glycines
MPISFCEKFSMQHTLSNMKRSAKNGYLFFGEMFYAPIALVQEAKCGATCPFY

SEQ ID NO: 145554 - protein, 78 aa, Heterodera glycines; identical to SEQ ID NO: 128403

SEQ ID NO: 145555 - protein, 146 aa, Heterodera glycines
MPLLRCNSRPVGVTFLVRSVPMLNKMPMAINSNSAEARLLTAATTATAVNSRQTPQMPTSPGAKAVPARAPTPRVEQILTELLGEVHNFTGQFAHFAGQFSRFFAHVKKNTIPPPLLNGDDEEEEEEAESDQEEGEVEKENGQKDD

SEQ ID NO: 145556 - protein, 17 aa, Heterodera glycines
TFYEMYKNNFIILNIIL

SEQ ID NO: 145557 - protein, 205 aa, Heterodera glycines
MTRFSHFRKDGGASTTTDDDDGVHVLIAKIRASRKHLVLSNNIKKIKNFGLKDELINPLRRMNAQNIDFACLKAILLLQPDVAEMSEQAKNWILQNRDGLLRAILVAGNSTTEASVCLARMLLLLPALFTIGQAIAQNKWMAEMLGIEPKGVANLDVSNSNSSPEARPAQNVVKENKIAEKIDETAQNDTDVVVVEANKMPINNF

SEQ ID NO: 145558 - protein, 165 aa, Heterodera glycines
RFTNVCRVDKERRNACRSCRFRKCVANGMRPDAIQNERDRIGSTRRIMKQVLDDAQTSPTTISDGITDELIGDSNSENNHNSKSPLNVVQHQKHYSFVGQMGTNSKLILEQLLEIESGVQFAPVLHSSTAIRDRTFQYLNKWSNSLHGFSELKFNDKITFKLIFF

SEQ ID NO: 145559 - protein, 164 aa, Heterodera glycines
NENPNPPKSFSPHVKVVVASAVRELSFIVAGLFSGHEYDFRVSACNTNGQGPPLMSEKPIVARLPFGVPSPPVLPGVVDVGWDYAVLSWQRPERDGGGRLRGYMVEKKEEGTEYWQKCTQAPSPSTSLSVTNLIDGRKYSFRIIAVNDAGDSEPAHLINVLYKM

SEQ ID NO: 145560 - protein, 490 aa, Heterodera glycines
MHMQLHRCSYSWCGPSDPIYGRCKKGFPAPYSKCTILRPDRPAMYFRPSPTDGGAQLEVNGLIYDNSHVVPYNPYILLRYRVHHNVLFAYGNKANIKYALKYPFKGPGHCYVECKEESGNKIKIDEPAQYAKMNFRGATEAYAIVHSMPFARLSHHVVKLAIHLPNQQPIVYRAFQLVSKAQQIQQGELPETQCSAYWKQWQNEWKNDPKFKDILFEKVPERFRWAKDKWVLYKRQQIKRPPIGRIVPVPPSDPERFALYSLMRHFPGDPDHLKMVNGLLCTSFTEAAIMHGLLEDDKIWDKTLAEAALSRWPDQMRWLYVSILLYGQPSNAIELWNKYKDQMYNPQGIITPAQHKVAEDRALADIDWRLHNFGYSCVHFGLPDPPTSIAKNTGAAIEEFFFGDDDLNLPPGQPNPRPQPNTPPPLNSDQQKVFDAVLLAIQSNPRDSTVPRRFFIYGDGGTGKTFLFGQIIRRLRKAPYTYKVLATAST

SEQ ID NO: 145561 - protein, 79 aa, Heterodera glycines
MLITNSIPALVNLEDQSLQFLNQSLHDAEMVIAVYGGHDEDDHDDAEQQQQQHQQMAKEYLLVFQKLGIYVDGQGQPEQ

SEQ ID NO: 145562 - protein, 159 aa, Heterodera glycines
SGFPADCAVDDIDEEERERRKQQYIDNPWKGCTVRLDANNIKPNPGMRYLSKLCLNSLWGRFALRNRLTKTEIIDCHADLAKFLNDVKIDISSIDQLTEKFWMVCYKAKDEHVVEHDTSNVAIALWTTAAARVHLLNSLQLVYRQQDLVQRYDTRILYM

SEQ ID NO: 145563 - protein, 35 aa, Heterodera glycines
MHWQCFRASRFAVGTNCSMAMGWEWATSDQNRLIE

SEQ ID NO: 145564 - protein, 15 aa, Heterodera glycines
IESHPLPAGLGTAKH

SEQ ID NO: 145565 - protein, 84 aa, Heterodera glycines
MSFNDFECKIVTKNNSQLNILNETAQILNARHKSVVEMLASKSVRIFPSKSAAPAQCCKCRVGQNGRRFFVPKALQNVARIFGG

SEQ ID NO: 145566 - protein, 43 aa, Heterodera glycines
ICQKLLCSTSPACVKLPKMWFIRSSKTENNVVKAFINGNFLLL

SEQ ID NO: 145567 - protein, 61 aa, Heterodera glycines
MTTAKMSSSQAQNSSGGSSDAFKLNDLVGRLKSVSRIQSLSAKSRLESEQNLNNSERPPGP

SEQ ID NO: 145568 - protein, 52 aa, Heterodera glycines
MSSSQAQNSSDAFKLNDLVGRLKSVSRIQSLSAKSRLESEQFREAPRAMKWI

SEQ ID NO: 145569 - protein, 59 aa, Heterodera glycines
GGGSYDRCDPKLVQLAKSFRWDKLICRNCYARLPLRASNCRKCGSSDLRKRKTMLSKPL

SEQ ID NO: 145570 - protein, 229 aa, Heterodera glycines
MKGCLLISSLFAFLITILISNNNVGSEKKKMEQKTFDEIFGEKWEEKRNEEQKKREIIGKFYQIKEKIKQKGRKYSAKEWSQIERKIAKKLGTNRQYIYEWIKELGLNQKNCYKSKTEEEKIEIINKFIEMQNEFKQKRKYSRKEWNKNYEEICKKIGVSLFIIKKWMKQFGISRKITEKEKMEKMKIYWHIKKEKPKMSDKEIGKMLKIHINTIGNWKKQFVNGLMED

SEQ ID NO: 145571 - protein, 27 aa, Heterodera glycines
MDQRKSSKERMFKCCHLHEEQTDVDFA

SEQ ID NO: 145572 - protein, 37 aa, Heterodera glycines
MCRFQCDQQCCPSKQTYTAKDKLKTEEQQFSRNKNVK

SEQ ID NO: 145573 - protein, 47 aa, Heterodera glycines; identical to SEQ ID NO: 139606

SEQ ID NO: 145574 - protein, 117 aa, Heterodera glycines
RGFIGPKIIYIFLPIIASQLDVSIKLETLRNSESVCQSQLANLQQRKLGGCTIKLGMEFHEIFHFFYSQSGFVISSFDVPCPKRCPAETKRHSEKPRECSGWLNIGILRCDRTAIRC

SEQ ID NO: 145575 - protein, 21 aa, Heterodera glycines
MRTRPIWQVKQRLLTSQKKGF

SEQ ID NO: 145576 - protein, 107 aa, Heterodera glycines
MCVICEYLRGTDGLAGFISSQQSLPTLNTLKKMPPREGQSNNAGNDAPGHRQPPFAEQLVNDAQLRDIMNVLQQHGVLVGLNGTPQQIVEALRQLAQGQLDDRRRQN

SEQ ID NO: 145577 - protein, 19 aa, Heterodera glycines
MCFAARILEMYKNKENNKR

SEQ ID NO: 145578 - protein, 58 aa, Heterodera glycines
MEYVLKLRGLTLNYDVINNQGFRYKNSKSNVMLKQERLNQLIVWCQSLERYWLLAGQA

SEQ ID NO: 145579 - protein, 68 aa, Heterodera glycines
MAEQSAFQSKLMLLRLKKVTHLPIDTDIKGNGEKEAEFPLTDFTSIMMYLILENIWDNRSIDVMAIED

SEQ ID NO: 145580 - protein, 63 aa, Heterodera glycines; identical to SEQ ID NO: 130392

SEQ ID NO: 145581 - protein, 152 aa, Heterodera glycines
PTIKNCVSVVDLKIPLDIEKIYLISPSTKYNPRKIHAVIMKVYNPNATAIIFSTGKFVCTGAANEKECKQAAEQVTERIRQFGYYEARIHEFVVKNLIATADVGFHIRLGPLSDFLGEYCSFTPELFPGLVYRNKNPTVSIICFSRGKLNIT

SEQ ID NO: 145582 - protein, 107 aa, Heterodera glycines
MVNGAQLAFGTTDSTFPKGIFMTLSEALVRNALKRMINDPPILADKFMKHKESAERLDNFELVNPNEFRGEGCCNLVISAKGRHDGTRLGPTFSNLVAQFIRNSLVF

SEQ ID NO: 145583 - protein, 82 aa, Heterodera glycines
MGLPGLPSDYSYTQQASFLNDARLLMDFFGAEQSKQWTPIQLVLQQIRKLNSDQRAAFDRIITALNGRGEHRCFFIEGAGGC

SEQ ID NO: 145584 - protein, 88 aa, Heterodera glycines
MGLVLSGKQCFSHGQVYVAMSRVTSMEGVRICSPQTCRGENNYIHNVVFHELLDQSFNAPSQQFFHLDTHTATLQEKLCSDEESDLPC

SEQ ID NO: 145585 - protein, 196 aa, Heterodera glycines
MSTQICVKFFWKNAKNFHEEREADRQNLLLELGKVTFDAIQNMDYAGAKSQLKIEAIQGRLIPLRENYENEKKKLDFYYTLQTPTKHHLKAAAIQSAAVTTAGANLSLEQKKVEIEVNAELQRNSNETTRFWAIQRMPIQQLCKDFFDRWTEEILPETQAGASSEKRVRSESPNSAKSVSSDKEVGKDNDTPLTEI

SEQ ID NO: 145586 - protein, 113 aa, Heterodera glycines
MDDYGLWDVQLQAGAEEDAEAFPFILSYIIFIFSLNTIIRFRLLLCCELSRSCTTLDPQGVVTIAVPLGIVLESVPEVDLGDKTGKGDCAHRALVIRTKMIIDTVSLTPTISR

SEQ ID NO: 145587 - protein, 24 aa, Heterodera glycines
MQRRGFFGVLNMDIIKSRACAITS

SEQ ID NO: 145588 - protein, 281 aa, Heterodera glycines
QHFNRTQPNSILITGTQPNRISITGTQPNSILITGTQPTNISIGLNPPTFQSLGLNPTGFQSLGLNPPTFQSLGLNPTGFQSLGLNPPEFQSLALNPPAFQSLGLNPPTFQSLGLNPTGFQSLGLNPPTFQSLGLNSPAFQSLALNPPTFQSLGLNPPAFQSLALNPPAFQSLGLNPPAFQSLGLNPPTFQSDSTQQHFNHWDSTQQDFNHWDSTHQNSNHWHSTHQHFNHWDSTHQHFNHWDSTQQDFNHCDSTHQHFNHCDSILLHLNHWHSTHQHLNH

SEQ ID NO: 145589 - protein, 106 aa, Heterodera glycines
MEEVIAVFQFHCHPNLRGWHGQYPMEFPCHGRFSDQKEGIVSLQIEKFSEFAQEKAWSSRLSEGIYIKGLPWKICAEIRTKNNSTEKWLGFHLLCTAPKGGNKSPI

SEQ ID NO: 145590 - protein, 64 aa, Heterodera glycines
YVPWRQITFTGRLFDVGEGRATTLLFLLKCLIYMALDIVIWVALTFLSYKLLVWTFFTPFERGL

SEQ ID NO: 145591 - protein, 211 aa, Heterodera glycines
MTNMKTSPWTTTTWAPMTTTRQRWTPTTSASTWTTRRTRIQYVTKSRSQQTDATTPPNTIKSAKSAKRDLGTNRDGADVFWCSDRGSTIWELKGPENSPFCRPPPSLTAEWHSLAIELYAKSIRPEQIDSAWHCSVKRTTENYYTNLLGDKFVTIVKEFPPVNKRICKQMALHQECPYAKSEMINHEGQLWSTNDELNVNFPGPISGLFKG

SEQ ID NO: 145592 - protein, 476 aa, Heterodera glycines
MLSPVHQVQNCQYSAEFCQLPNNTTLIWKSTCSGDECKMCDYDRAEIISGKFTAAYGETVATWISDDHQKALTFAKKAPELIACDGVRIVLSEQNFGIAKDQYDDIVSTMRRWKRGIRPEQLASQLSASQVATSVALNQLYIRECQRNTRAANPTLQARKLLRQANIQARWIGETTMEVFPCVNISLQDISYRPMNDCRLYIPVTAHFPDRAIAAFLDPEVRIISLTAQQASCNSYRINHLQLRSNPNIWLRIDSRTGTARRLPKDYVHELYETTINQTNSNLELHPLIFHAWQLDNESDATRFPHINEFINSEQFKDKLEQHITARTEALGALKGGIEGFTMRWLKGLIDEAITWWIRVACVYSTFLMLRDIVLPCTLAYLLNPIRVTLLSLVGVRPHPTFRPTVSKPLGIEEGMPLRELPRTPKPPARRAEHRSMSPIKLDMIARTARYQQPRTQSHLDPTEDSPFGRPRRKEF

SEQ ID NO: 145593 - protein, 292 aa, Heterodera glycines
MLLTALRSSEDASLRQRILIKLAADKNGITYDSMVEDLINFQTTIAEAKLIEQPSAFKNVSALKRGKEREQQQMPSNSRFANNSQNASTAQRKCWRCAGDHRADDCRHKLEKCPKCKFPGHIASRCESVQQWRRKFAKKPIQRKQIGSLSVGMATKQINATSLLKVGVFVNKKKTKFVADSGTEVNIIDEDAYDKIGRPKIQECEEKGKLFDGTKVAFIGKGVATFQFGDIAIDQEFYVAKRGSLNLLSISTMDAFGLLDDLKRKISNSAINLCVNINSSATFKSKTTNTIY

SEQ ID NO: 145594 - protein, 92 aa, Heterodera glycines
MIQSILQLCEAPIDYEFMDKLPAVQYGFPCGYRRDFHAERAKIPEALFDLKHATDISETERATLMSVSQVALTSCNTCDIDIRPVSTYRMHI

SEQ ID NO: 145595 - protein, 53 aa, Heterodera glycines
MKLLCAGFIHWMFFICEPSKIGIMATGVSNLTNSLKVEGWKYVKYFRLSIYFV

SEQ ID NO: 145596 - protein, 91 aa, Heterodera glycines
MRKETGYSYVKCRKALVACGGEQNYEQALRWIKEAAVKEGWDKAAKLSGRKASQGLIGFASLSDNVSVLVELNCETDFVARSAEFKNLVFI

SEQ ID NO: 145597 - protein, 320 aa, Heterodera glycines
IQSLGLNTPAFQSLGLNSPAFNHWDSTHQHSNRWDSTHQHSNHWHSILLHFNHWGSTLQHSITGTQPTNIPIKGTQPSSIQSLGLNPPTFQSKGLNPPAFNHWDSTLQHSITGTQPTNIPIKGTQPTSISISGTQPTNIPINRTQPSSIQSLGLNPPAFQSLGLNPPAFQSLALNSPAFQSLGLNPPAFNHWDSTHQHSITGTQPSSIPITGTQPTFSILITGTQPTSIPITGTQFSCISITGAQPSSIQSLGLNPPAFQSLGLNSPAFNHWDSTHQHSNQRDSTLQHSITGTQLSSIQSLGLNPPTFQSKGLNPPAFQS

SEQ ID NO: 145598 - protein, 45 aa, Heterodera glycines
MAIYFFEKFSMQQTLSNMKRSAKNGYLFFFEIFYATNAVAILFFK

SEQ ID NO: 145599 - protein, 52 aa, Heterodera glycines
MAIYFFEKFSMQQTLSNMKRSAKNGISFFEKFSMQQTLSNMKRSAKNGYLFF

SEQ ID NO: 145600 - protein, 502 aa, Heterodera glycines
MAMHYFEGRIKANGLKNKDMKSLLIGFFEFFNCFPFRTHVISERGEWEERRHHKEFPEDRQSIFIENPYNKRNVASSVREDGFKKICEEFEMTANEFGLPLVREVNVLEELGIDLEKEWVEKTSVSSDEKSEMLERANQSRETEELSDEMVKLKVILNEPVSQHEQVFILSMISTTIPNPMLCHHRAQKNYVRIDRDTTQCKLIANLFDEPQRELEVDIYQPNSEPFTFKAHRCLKVKQSQKFWTNLLNDKFSDPWSFKLAISYKPRIANSLFLVEIRKRQIRRNNCYHAVITLIGKPGSESLGSPTEEVSKCKFSKGSCRLGDNAILIWNLDSTEHQSACLYNKVTTENGKFTKRMWISKNSQFAISFQENAKSVESCGHTLKLSDQGFAVPSWQFRIITGKTTHRIKREQWWPKEKPLDQNEKSSTAAAQLTARAIYQNKETKELFQKMVNLICGILQNANPKQDLSHLNPTQLMREKTGTELVKAKWISPNVLEWWPCS

SEQ ID NO: 145601 - protein, 190 aa, Heterodera glycines
CKFSKGSCRLGDNAILIWNLDSTEHQSACLYNKVTTENGKFTKRMWISKNSQFAISFQENAKSVESCGHTLKLSDQGFAVPSWQFRIITGKTTHRIKREQWWPKEKPLDQNEKSSTAAAQLTARAIYQNKETKELFQKMVNLICGILQNANPKQDLSHLNPTQLMREKTGTELVKAKWISPNVLEWWPCS

SEQ ID NO: 145602 - protein, 57 aa, Heterodera glycines
MATVGKRLAQQEKASYRSIGVKKKSYSDKAIFRINQSCLSNAIFIEFSQWPYVPNFP

SEQ ID NO: 145603 - protein, 166 aa, Heterodera glycines
MQIFYIQLIEHREIDPYRIVVFDLETMQHHALDPLQPEKREHQPNFIAARIACPGCIENGNWRRGTAGCQICGPHRMVAFCQRRFADTIVDKQIVGENPLEAFVDWLVYKLPKKYETYAYSHFGGRFDMVLVFRELFRIGFNPEMLRRGNKMYEMKIRKQKQRNPN

SEQ ID NO: 145604 - protein, 47 aa, Heterodera glycines; identical to SEQ ID NO: 133631

SEQ ID NO: 145605 - protein, 24 aa, Heterodera glycines
KFLDFLFISLFDSESIREPYLTFN

SEQ ID NO: 145606 - protein, 80 aa, Heterodera glycines
MNNRLSLNPNDFPNTMEFVLFNAVQQGNVDNPDIERLLERLRNRQPPPSPFKNDRLLWDVFDDPEIANAPQMTIKVISAF

SEQ ID NO: 145607 - protein, 95 aa, Heterodera glycines; identical to SEQ ID NO: 133575

SEQ ID NO: 145608 - protein, 262 aa, Heterodera glycines
MYRPSQTPRLTLSSARVGVARLNTKMDTLSGALPFYRLSKESMKVVVFHWRLAAPTYATPLMILHKVRLESSSTGSSFPAKFAKPVPLAVVSLDSRRDSGNLVDPFVRVGKPTRHLATLRESCYSPVYPRLIKFPWLNIQSTGQKSDTVNVHKDHPSPLFLDSRIPRVRASSKLVVQRQPKCIPRAYTQLKRSTSSSHHSTHHPRKNSTQPRAKAACFTQQPGPDLSQFFSRSYESNLPTSLTYIILSTRGCSPWRPAADIG

SEQ ID NO: 145609 - protein, 349 aa, Heterodera glycines
MALQLDFWKAPTNVGSFVDVMVAPEFVSSLSELLDKQRIQYNTIIEDVQSMIVQREKATGGRHHHHKGNLSESLLLSQFKLFGKRMRDDASPSFVSRNKAVYGFGMHAREWASIHTALWFIDQLISLYGVDPQVTAYMDTLNFYVLPLANPDGFEYSRSDVNPQTRFWRKNRGQQVCKKDRWRRERCCGGVDLNRNFDFHWGETGSSSDMCSDIYQGAYAFSEPESRAIRDKMMSSELYGKVDAFLTLHTYSQMCSDDWAKSKAGVKYVYLLELRPGEEEWVVIDAVMQRAKGLQPWRSTTTTTTTTTTVTTTPIPQRPPAPVVTPPAAPPRAVLPDLPPQTVPTNARL

SEQ ID NO: 145610 - protein, 30 aa, Heterodera glycines; identical to SEQ ID NO: 130616

SEQ ID NO: 145611 - protein, 36 aa, Heterodera glycines; identical to SEQ ID NO: 134159

SEQ ID NO: 145612 - protein, 36 aa, Heterodera glycines
KPKLFGLFKKQLKFLKILFISLFDSESIREPYLTFN

SEQ ID NO: 145613 - protein, 328 aa, Heterodera glycines
MSFENIRYLNSSVSMASMNPMRYQFKHNRGPYCFRIFGQILDKIKIALNPDSDELPSNGQLFIIDTGEAMNFLRKSNPKIDDDLLNSIYSLIKSENPFAQAFIMMKDEEEYEKEKAKEEGREPAELKLLFGLSPDMDKNRYKLPRANEVAVVFVPGADGEVPESKIVVREKGKELRVLNSLDKNVTPMCYPLFFPRGTTGWHPEMKQKNGIKNLTRLQYASYCIAVRNEFNPLLYGAKLFQQWCVDEYVKIEGDRIRWIRNNQKKILADSYKNVDSFLLKKSQETGLPIDAKLFYQLLLLDHHVILKNTFKMQCQLFEDLANPIYLLR

SEQ ID NO: 145614 - protein, 148 aa, Heterodera glycines
AWPFLVRGAICLVYSDNERDSSLLNSWLIASGHNFLEGFSVFSRTKLSNNRSVMPLDVRGCTRATLAKSACLPSPKGVGKPVKICRDWDRTLQLLSVNEEFLVGASHQLALNTSLPFVHTARRCPGLSHFEKFGGRLVFPASVGMQTG

SEQ ID NO: 145615 - protein, 83 aa, Heterodera glycines
MIQQQVHLQLPCYDFCPVQATAIKSVPVCIPTEAGNTNRPPNFSKWLSPGQRRALCNHTSPGTGRLSFPGSSPPGRINPPADR

SEQ ID NO: 145616 - protein, 56 aa, Heterodera glycines
MFSSSKSAAVLRMRGATGAMARRWKGGDEQKNVPVPSPKEMAQRPAEFDELTHTGQ

SEQ ID NO: 145617 - protein, 38 aa, Heterodera glycines
MKVLQNMGDGHMMRTKPSDSDEGGAGKGNGVIDSPFLF

SEQ ID NO: 145618 - protein, 123 aa, Heterodera glycines
MTVTSNTEFRLIECVPILEEVAREFGCITPLPNLGSHRDYRVSGCMMIRTLTSLNRLYIFDAEDCIEVKGFLRQEDGTSQKVVNEYYEKYDGLNGFTEFLRNWAFNFFCLHAFDDDDDTSDEH

SEQ ID NO: 145619 - protein, 57 aa, Heterodera glycines
MATSAGSAWLLQLLLLIRCGGYVLADLLAAQHNALGMLKNTFSASARNLLFVHSVKK

SEQ ID NO: 145620 - protein, 30 aa, Heterodera glycines; identical to SEQ ID NO: 145359

SEQ ID NO: 145621 - protein, 183 aa, Heterodera glycines
MASQDTPPGDENVADAQPFDDTLTVYGGDENVAQAQPVDNTLTVYGGNENVAQAQPVDNTLTVYGGDENVAQAQPVDNTLTVYGGDENVVQAQPVDNTLTVYGGNENVAQVQLGTTGFSLFKGVAVAETTKEKANEKKDKKADEKKDKKADKTKDKKVDEKKDKKADEKKEKPEKVSKKNVEK

SEQ ID NO: 145622 - protein, 176 aa, Heterodera glycines
MAEKMSKGSYNACDAETVFGRENVCDRTRLKPTRTAFISSIFNADRDGMRLNFEDLKPYNQEKTVEEVLDRLDVEVCPQMVYRMGRSSDEKRKGPRLVKVVLPASTFQRFALMQWGRRRTELKKRAGWERLLVRSSLTKEELEIEREQRQKKWMEFGQKKTDENITTRRGGNEKNF

SEQ ID NO: 145623 - protein, 21 aa, Heterodera glycines
MRTRPIWQVKQRLLTSQKKGF

SEQ ID NO: 145624 - protein, 75 aa, Heterodera glycines
MVESGTDTPLLQLCNSIEKCLQHLRALKNHVIVAHNLLSEKMALATRTEEPSQIDFESVKNVLEKAGVQIADEYK

SEQ ID NO: 145625 - protein, 15 aa, Heterodera glycines
MAIGTALRLYASAFV

SEQ ID NO: 145626 - protein, 92 aa, Heterodera glycines; identical to SEQ ID NO: 125147

SEQ ID NO: 145627 - protein, 75 aa, Heterodera glycines
MIGRAVRNRPFIFEGIFKFILNPRKMSISFFEKFYTSQKRLRRDGGLCTIAILFHRGFLYLEVIPEKWLSLFLIN

SEQ ID NO: 145628 - protein, 104 aa, Heterodera glycines
MPNSPSSSSASMPQHQQNGVSANVGTELRLDGTNAVQQQSSAGSNSARLSPDGSLRNAAAAGYAAAAATMNGLGGAVPSASTMNSAALMHSLGAAQQMHYGIDP

SEQ ID NO: 145629 - protein, 41 aa, Heterodera glycines
RSVRIEVGNELKQRCEKEIKTIWLEIVDQQRIDELSMESQL

SEQ ID NO: 145630 - protein, 70 aa, Heterodera glycines
MRLFPFNYLDTYRTVTEIMHELEQFQQHNQPPTKIHGQQIVYTVNISCGELNEQSSEVISAAIENALSFQ

SEQ ID NO: 145631 - protein, 21 aa, Heterodera glycines
MRTRPIWQVKQRLLTSQKKGF

SEQ ID NO: 145632 - protein, 188 aa, Heterodera glycines
LQEMTALFIVPEYLNTLYTTSLPRHELRLKNAVIVMLVRNLNIKEGLCNGTRFRILKMLDKVLHCEILTGNKAGTKVLLPRITLTDDETFPFSISRHQFPLKLSFSLTMNKSQGQTFNKIGIDLRNNVFQHGQLYVGFSRTRSWDGLKVRLHPKNRDHKDLIQLFFKILNMTLTKIKIKIFLLFFCMF

SEQ ID NO: 145633 - protein, 88 aa, Heterodera glycines
MSGRGRNGGGGGGCGGAQRTGAGENGSGGQLLDQLAHEVRVVGRGAGGQHVHGHHEKRVGVEQSEQRRREDGSGRIGSGKENGGGSED

SEQ ID NO: 145634 - protein, 111 aa, Heterodera glycines
MSYYSDQQQNQRMSSGGNAENGDKSADDGGAAERQRRTFREVRKSIVQATQRHGSKKVTDLEMQLLRHLTCPQTAVLRPLRPFHHKKRHFLSRPPSPQLFDISEENDEQQQ

SEQ ID NO: 145635 - protein, 49 aa, Heterodera glycines
QESPKNDQNEAMSKKLEDINSLMTRLTLHNRSLAQLFALNQLGLFFSIF

SEQ ID NO: 145636 - protein, 126 aa, Heterodera glycines
MDDGKDMFHWKAAIKGPPESPYEGGTFHLDIVFHRDYPFTPPVVKFETPVYHPNVNKQGGICLDVLKTTHWAPSLTISKVLLSISSLLCDPNPNSALEMDIAIIYRNDREQYNRNAREWTQKHAMK

SEQ ID NO: 145637 - protein, 33 aa, Heterodera glycines
AISFFDKFYTHTNALEHDRGGRCAIDLLFLREF

SEQ ID NO: 145638 - protein, 92 aa, Heterodera glycines
MIGRAVRNRPFIFEGIFIFIVYPRKMAISFFEKFYTSQKRLRMRRRAVHNRHFISQRIFIFIGYPRKMAISFFDKFYTLTNALAYDREGCAQ

SEQ ID NO: 145639 - protein, 62 aa, Heterodera glycines
YVDQHVVQFLHRIRRLFDSVPTNLYIATAALAETVYRLKHFVRSCEAIRQHILPLLRANVRA

SEQ ID NO: 145640 - protein, 105 aa, Heterodera glycines; identical to SEQ ID NO: 143140

SEQ ID NO: 145641 - protein, 85 aa, Heterodera glycines
VQQQQQVQAVQQPRLRTVRDDRRYEIAAIVCSRRAADGQTRELRIHCRSFSYHYDTYEAEASIQRGTPAAEEAALIFDPMQPQAA

SEQ ID NO: 145642 - protein, 97 aa, Heterodera glycines
MFAVLLMPIELTNGFTGERLSLMKLNGKYLVIRCPISRDETKWKKWEQEAIECDLDNQLNTIHIGICDDDIGDGLLDDGTPGPSDQQNRIVENDRST

SEQ ID NO: 145643 - protein, 124 aa, Heterodera glycines
MPRSDSSVQPAVDSSALTAANGAPAAISDRNVNNANCIDQRSDCPFLASIGNCESVFSTSFMLVHCARTCRKCGGINDNASSSSAQQCDDQLPMCRRWAANGLCELFIFQQYLLNNCALSCGGC

SEQ ID NO: 145644 - protein, 106 aa, Heterodera glycines
MTVGGVGGGFPQLFLNRDWCPIDGLKGIVGSTEDVFDSVLVEGHELSGRVGFDWNSGGGGGGGGGGGGDATELAAVSTDCLCCGDATELAAVGTGGNCWGGAGGLC

SEQ ID NO: 145645 - protein, 85 aa, Heterodera glycines
MADLNFSINQQSPPAPPQQFPTVPTAVNSANESKYPNENIGGFSQNTPFFAQNPTLATRHQPPPRPPPVTNNVMHSMNDFGSHQQ

SEQ ID NO: 145646 - protein, 101 aa, Heterodera glycines
SINWAPIPSQEKSRETPPPPTPPTVIQQQKEQFPPVPTAASSVASPQQRQSVLTAASSVASPPPPPPPPPPPPLFQSKPTLPDNSWPSTSTESKTSSVDPT

SEQ ID NO: 145647 - protein, 109 aa, Heterodera glycines
AFTNASSPANFIVVIWFPSYFDQSSVEPFDLTNELTREQLALKRTNNNRRFLLIRSPIARDVNKWAEWEEEAIGWKFIDQCDQIDIQINDEHEIGDGLLATTPGPSDQQ

SEQ ID NO: 145648 - protein, 37 aa, Heterodera glycines
KRGDPFVLQNFFKIKNHDNFLSGVIKVANHESEMYFD

SEQ ID NO: 145649 - protein, 92 aa, Heterodera glycines
MTDNRKEAAEEEMAKVEAKMEKAIFISGDCWLAVFDLLPAYQLGLRISMISHRFNIYVDEHFKTRKWGLDFLRIGSKIDENGTKEMEIVNYD

SEQ ID NO: 145650 - protein, 146 aa, Heterodera glycines
MEKPVKVSKENKKGEGKSKEVNKEENEYNEFCKSTTKNIDESIVHVQFFAEFESSFKSIFYVPETLTADEFQNQNLAFSSGTMENSREEKKIGSSETDKKNGLMRIWRFENCSVKADGRILADRAKWLKTWIFIKIPDKILLDKTH

SEQ ID NO: 145651 - protein, 47 aa, Heterodera glycines; identical to SEQ ID NO: 133631

SEQ ID NO: 145652 - protein, 36 aa, Heterodera glycines
FINIFSERALKHTKLYLQVSLGTLMLFLSKREMNKI

SEQ ID NO: 145653 - protein, 60 aa, Heterodera glycines
VTVPPTFDSFDIGGEQFLCQSRKVEDAGFTEVLSWLAVPESNTKAMDALSKLSIGDKLRI

SEQ ID NO: 145654 - protein, 52 aa, Heterodera glycines
LVFGSFTMSALYADSTKYLHLGGILSSALFCMLIVLLFAPYTPFERSFMLWA

SEQ ID NO: 145655 - protein, 64 aa, Heterodera glycines
MTIHFSSFYTFFDHSVLSVGVSNFAFFRSVYAQFVTFERILHLIMQQGWAKSENKMREMRNLRK

SEQ ID NO: 145656 - protein, 82 aa, Heterodera glycines
MVILLFLAVFFGFLPFLHSLDKAYVTEPFLLTGGKIGKFSVPYFAFDQCKPYHSITHDLKVESRNFGLYFMMKHRGGHCDEG

SEQ ID NO: 145657 - protein, 153 aa, Heterodera glycines
MAWHQSVHETDKLIKSAFGTRNDPGDFIDKSEVEILGQPFHDEEFDLAEQYAKQMGYGPFLEQHVGLWLLGMDMLPWMAEEFFTRPTDENDPIEPIVPSAGSSQCPMKQMDETFELGQLDAQHLQADLVFTVLTDEKWQNFTVELLQGEKGVS

SEQ ID NO: 145658 - protein, 137 aa, Heterodera glycines
MGKAYSGWNKTYKVERTNTTIQTTNSNVFEFFLNFTDVIMFNGEHILQNYTDDIPFCHIKYVKVTGDAILLDSPKLNVPPPIVKKGEQIILAVKEFLNFGDLIVISNYKQKANETIVVKLLHGPPECSKNCKVLSYI

SEQ ID NO: 145659 - protein, 54 aa, Heterodera glycines
AKYFNDEKLRKMNQYFETIEKNPKISDKIIAKKLEIGSANLKRWKKEICFNLEK

SEQ ID NO: 145660 - protein, 43 aa, Heterodera glycines
MIAKNIQIWDVASQKQLEALPYKVRVDDLGYAQQSAELPEDIP

SEQ ID NO: 145661 - protein, 68 aa, Heterodera glycines
MHTFCARAIHHRACQSKAKQQRCCFERIKGIESVNRLLEKYICNLSKILRSEIEMINFTIQTNFRCSN

SEQ ID NO: 145662 - protein, 239 aa, Heterodera glycines
MNRRWICNDVWMDIFPSFDRPQLGLKLALLSPRFNASIGISKDKGPEPKLDSVTNPKLSVRIDDKFVEFPLPDDRPLPSKIRFKSLEIYYIDHSVIAFLRLNHQIFDKRGTNLQLFWISSPHTTDGQRIWDILTREIWPIFSTNIRCLGFSRGDHLDNLLRQISPTILIDLNQLVSIHSFGRLPAAIGDDFDGPNSTISAGQALSKWLHSPRKDGQPKRLRCEDYNAQANTDWINNFKE

SEQ ID NO: 145663 - protein, 796 aa, Heterodera glycines
MRHYSLYKRGTITQDRWRWINKNQTTVLQQKALQLLREAGIPTTETEYDAEVYIHQVQGLWNVKYPGEYKIFIFNDYQIRPITKSDVTDYQFPILLYHNNNHFDGIKTISKFFNKKNYCLSCESPYYKKIAHSSNCSSLCHGCREVGVDYPCEPQQGYIKKCDHCNNTFYNNSCYERHLHKDLCTKFQRCEDCGVIYNIMVHGSVGHKCGEQFCKLCKQFHIKEDDDDGMNPCTKCFIQPLKQQRIKPYRIIVYDFEATQDKKVENRFEHEVNFAAATIICTDCIINGDWNKSLQGKKCQICGPHRSITFSPFDYMETTVDQKVVTQQPLCEFVQWLLFDHNKKFPTVAFAHFGGRYDMTMIIKEVLAQGIHNPDIIKQGNRLYELKIRENEHGPLTIFHDSYNLMPIKLSGLIKSFGLHIKDKQHFPHMFNKSANYFNVLPHLPPRDDYCPNQKKKADLQKFDDWYNNNLCQKFNLKEKLPEYCCNDVKILTHALVELRREFKQLTQRNGKHGGIDILWQAMTIASACVKNFALNHLKPNSLAIVPEKGYTPQQNQSALAIKYLDWYSHVNNVNIQTAHSRYGEYVFKREGQVYQVDGYIKGTDGRRDKIIEVNGCLWHGCEECFDDLGDETRMPNGKTLREIREREEKKHEILSRYVDLEVVWEHEINEKLKKDKQMREFFANWKDHSPIKIRDAFHGGRTGPMKLLHTAKPGQKISYKDFTSLYPWTNFTTNYPLGHPKIVSVPPNEQTVNWRTPSDNPYKGLLKVLLLPPNNNVSVTVMPVKFDQRLLFPPL

SEQ ID NO: 145664 - protein, 303 aa, Heterodera glycines
MALKIHATGFPSTCGSERQKDEYIEECWRNFGIHLEKEKMKPEPGKRYIAKLCLNSLWGRFSMRNLLSKAVINNDPCVLRQYTDDKKIDLMDIELMDEDNDVFMLTYKPKEEFVDENKYSNVVISLYTTSMARLYLYEVLKKVANTPGCEILYYDTDSIIYVHTEGNDPLPTGKGHLGELTDEKPDHNILEFISAGCKNYGLKLERKDNGEIEYDLKIRGITLDEQTVQTIHYDSVKDQIMRYGSDDPADPIIVTYPHFIRPNLIQGKVYTQSLTKHYQPVFTKGIINNAFQVLEFGYRNSRL

SEQ ID NO: 145665 - protein, 188 aa, Heterodera glycines
MGVHVHRGPPTDELLSSLKKPLLLILDDLLTIIDEKSLSELFIKKAHHLNIGVIFITQNLFERKELRRFLKLRKEIEDKPVKVELTDGSLMVFNPKQRERNMKIIPTQIVNDEGLDETGSMPTLEDPYTTAEESDAELTTTTTPKARPLARANIETVTRECSIAGWYKSVRATTEKRPEDQRNIKTKL

SEQ ID NO: 145666 - protein, 323 aa, Heterodera glycines
MDKKKLLNKLYNDPNSPACYAGQERLYEEALKYDSSITRKDVEHFLEGDRTYTLHKPRRVRFKRSRTVPAGFMTDVQVDLADFQKLSRENSGFNYILLGIDVLNRGTEFENREIHKYFKDMNIQKHKAHTSTVKAALAERCIRTLKQRLYRYFSQKHTIKWVDVLPKLVNALNNSKSRITGMKPVDINPDNAQKIWERVYGDEHAQTTYRKPRFKEGDHVRLAKYKSSFEKSYLPNYSDEIFQVYDVKRGNPHRYGIKDDNEEPFDTRFYAEDLTKTRKDAETTYRIEKVLKTRTKKSGQKEHLVKFYGYKEPEWIKDRDIER

SEQ ID NO: 145667 - protein, 78 aa, Heterodera glycines
MSIKNDQNRIICPIYYISKRKTTHISIKNGNAAVVEADDVFRLGLNMKNDTFELPLFFVRIDPGSGIDRMDGCRIPDR

SEQ ID NO: 145668 - protein, 53 aa, Heterodera glycines
MKLPLPVCLVPVPPHLFICISGQVAKPSDFIISRLGSIPHLDRIFLTFSLPLF

SEQ ID NO: 145669 - protein, 225 aa, Heterodera glycines
MEEKVEEEQKVEEKVEEEQKVEEEQKMEEKVEEEQKVEEKVEEEQKVEEKVEEEQKVEEKVEEEQKVEEEQKMEEKVEEEQKVEEKVEEEQKVEEKVEEEQKVEEKVEEEQKVEEKVEEEQKVEEKVEEEQKMEEKVEEEQKVEEKVEEEEFYDQCSLSVKQQIWIRNESLFSEAIEPVLDAYIYEKERLLLSAANGTDKQTNFFTSEKLVSMVGQRDILYGRIT

SEQ ID NO: 145670 - protein, 52 aa, Heterodera glycines
MVTDSKEDIVFFARVCEKARRYDDMTEAMKKMIQADANLNREERELLGTAYK

SEQ ID NO: 145671 - protein, 26 aa, Heterodera glycines
ALYLSRPTTVFTPSLHTLFCVVQNLK

SEQ ID NO: 145672 - protein, 22 aa, Heterodera glycines
PLYGTGANTLCVVNFMLILALF

SEQ ID NO: 145673 - protein, 56 aa, Heterodera glycines
MTVLLTEFRSKRTILIESFKASCPYFWISKMQISQATSRRNAKAFNSGDANFTESQ

SEQ ID NO: 145674 - protein, 197 aa, Heterodera glycines
MFYLPWYLFKTKVVRTKDILVAQVNGHLLPYRTIEQMVGNWHYQFKALMEEEWHNANAEENANANNDEEDAQLEQQLPNPCEEAKLREQRTNTGNKLTMRMTNLEMRNGREGEEEEKCDDEAQGQDEEEEEEAEDEAEEEEEAEDEAEEEEEEEEEAEDEAEEEEEAEDEAEEEEEAEDEAEEEAEDEDGGEKGIAA

SEQ ID NO: 145675 - protein, 38 aa, Heterodera glycines
MEIDGIFPGIILTAPSPLRCAKRRLHFLSLSAIAPPHP

SEQ ID NO: 145676 - protein, 122 aa, Heterodera glycines
MQLIGLKEAECGREWDKGLRGSLKSPVAQSSLLPLNSNIINNSILRLPPLHPLHHLRCSTNNNNLCWSSNSKTKWVVSRERHFWWFAEFWHFWWLSDFNGISSPHLFITTFFLFYFVVPRGA

SEQ ID NO: 145677 - protein, 67 aa, Heterodera glycines
MITLTFCIHSRHGRLANRPEGADHPICSATPRPMALRFAVPKLKGEEIVPNFKRTVKEKRIFNYLEL

SEQ ID NO: 145678 - protein, 47 aa, Heterodera glycines
FLKLHYFIFLAKLIHKYFFRNCSETHQILITSYFRHSDAFNIKKGDE

SEQ ID NO: 145679 - protein, 92 aa, Heterodera glycines
MIGRAVRNRPFIFEGIFKFILYPRKMAISFFEKFYTSQMLLSMRRRAVRNRHFISQRIFIFRGYPRKMAISFFDKFYTHTNALEHDREGGAQ

SEQ ID NO: 145680 - protein, 38 aa, Heterodera glycines
KIPSKIKGLLRTALPIMLKSICMCIKFIKKRDSHFSGI

SEQ ID NO: 145681 - protein, 74 aa, Heterodera glycines
MPTRLSTFWTKDAFSVRDCSASHPGPHLVRRPQRQGTARTFTVAGGIGTSGRHLQGEHGKGKFEKTKMSTIHFG

SEQ ID NO: 145682 - protein, 42 aa, Heterodera glycines
MKSPSPGFSLAYLFVFLAFLIEIAEGICLNEKGLTFLQIKDD

SEQ ID NO: 145683 - protein, 82 aa, Heterodera glycines
MKNVKGLARLNYRTVSMLKFKFDAIDVDISFVSIPDKKKLPNILSEEFVQKYLDKFNSEENGKFEKQNRSLSSNFITKSKGN

SEQ ID NO: 145684 - protein, 152 aa, Heterodera glycines
MERMKDWSKAEGHEPISAFVEWILKAWDNKYQTFIWAHNASRFDGHFVLKYLGETKRRPEVIMNGLKIFEFRLQHSRRHSKLTWRDSCLLMPIRLEEMPKTFSLSCADKPFFPYAFNRRENYNVHLQNLPDKEDYCPGSMKRDKYEKFIKWC

SEQ ID NO: 145685 - protein, 57 aa, Heterodera glycines
VSLFAFRLSHYSHFLAFRISLFTFRFLARNATFTPLRIGLNSHKIFQNFTYKLANFQ

SEQ ID NO: 145686 - protein, 119 aa, Heterodera glycines
VSILQQITLQIAEIVLIPYPFKKHTVSLTYTFCFPNFALRNSVFSSHSLHFSSHSLVVRWECHFLLLRRLCHRQRRRLFLAIRRSLLSHHFYSSQPLSTVLFVPEFSLNSMHNYYFLFI

SEQ ID NO: 145687 - protein, 71 aa, Heterodera glycines
MCLNVNGKKKDKGKKHHGTEQAEDDVEEEEEENGEGKGRAIQQITYYTKHYDYFWESINIIMNSMNNCVII

SEQ ID NO: 145688 - protein, 58 aa, Heterodera glycines
MPFVQKTTQKTEADKSELPPRVIAELYACLNLTCLLHYFGGRIVGTRSVSHQPEYELK

SEQ ID NO: 145689 - protein, 184 aa, Heterodera glycines
MISPHLSHIPPHYSHVNKISNPTPPPPPLRQLRQQRLVAAVQRKTEATAAKGRWLYELDAKKYAKNALRQQRINLKNGPLYCAGCHALGNHVISDCPMDKGRYAAASEDAAHQAEDCVLFCRCQCCKLRGHKPKDCETLMAWREHLAMASAGKKHTFLLGHKRFSSRTYMEEHAVSAASAWEGH

SEQ ID NO: 145690 - protein, 94 aa, Heterodera glycines
MVPKNIGSETHLGNETTPAIKRLAMKRRAMKRLTMKGRQRNGGNESSPTGKWEEKRNDQNQNKEETREIIIRKFNKIKEKIKKKGKKYSTKRME

SEQ ID NO: 145691 - protein, 112 aa, Heterodera glycines
MRSHFGGTRNQQIGRWSSFRHAQKCRHNSTDANGAEWQAEFTCETKRHKTPTASSPYEKQPENTEECIPAPLACNSYADCADNEADLHPRRQLAHGCQRKLIHIPINSIMAK

SEQ ID NO: 145692 - protein, 71 aa, Heterodera glycines
RRILAPHTLFESPQTTSVKNKIYFRFRGSPPDPMPPRFMGSLESFGNSFPIVCTLILRWIFAPHKCLSTPN

SEQ ID NO: 145693 - protein, 41 aa, Heterodera glycines
MPNTFNLYVNIQMFNGLDKKTSGEHEKAGEVENNQINDESP

SEQ ID NO: 145694 - protein, 177 aa, Heterodera glycines
MPDLVHSGAEVISIQSTSEDCERQSNGSVCRVSGTTELTILPAGQKVSLALKDDKGKIMGSLELILQFLRLHCNQQTLKWLRSYKINVISKRRCPTMGSCTKKMEDYENFPGTNFCKKGDAIWGHKCALPSSECFFYRTYAEPTSNTIWELIRCTGWDYELKMRLTLTIGNDTKSKI

SEQ ID NO: 145695 - protein, 183 aa, Heterodera glycines
MEMQHFLLNALVYEHDSTVRQQSAQMAFKIATDCVDFKSKLITLFNEMAPKVKYGIVHLYRLFLCLKIDQRELDLQFIGNDDGLKILFTRTKLEQGELSILYKSELVDFLSYCVEVNEKLLQFGGSDCEAQCVTVSELHLLFENFSSSTEDGENDDEFLFWSDTQKKQLSIYSNGIIVNTWHF

SEQ ID NO: 145696 - protein, 150 aa, Heterodera glycines
MWPNIDPTEWQTMLWHFDQNLANAAMDAEEGQKEANEGGIEDGKGEGEEEEEQNEDQEIKLLRELGEKEGQGRAQFGDRERHAELGKKFSLLKKSTTNDGAAHGMVNFCVIYRPFLVFGSQSVDILLFIRGLLEGHFNAKTMDDYLENGK

SEQ ID NO: 145697 - protein, 26 aa, Heterodera glycines
MEEQSLILDWIEHKKTEIEANKVKNK

SEQ ID NO: 145698 - protein, 67 aa, Heterodera glycines
MKRTKFYLHVSLGTLMLFLSIMESNLLKTVQNSIKITFTVRKMGFDKFIGEKKTLQNNTPGRREWET

SEQ ID NO: 145699 - protein, 24 aa, Heterodera glycines
MEKACKIWRDYIDFSALELLELAS

SEQ ID NO: 145700 - protein, 78 aa, Heterodera glycines
MAFCQNCFVACAKAANAMQTTIVMSAFSHWIYSGRPPLNGAIEIVHFWIELFSKRTATNDIRRMCRWPEIDKNLFRRI

SEQ ID NO: 145701 - protein, 26 aa, Heterodera glycines
MNVFCLFIWFLCSLREIIMPMLRLNV

SEQ ID NO: 145702 - protein, 197 aa, Heterodera glycines
MWSGQEHGTTLTNCPLLKVWVIPPRKCDVPVLPVKVNERLCFPLCMQCCLDYPKGGVDFDYHCEHDDQQRGWVTTCTSIELDAALNEGYRVTKVFRVLRYKHGDDKLFRPYIAEFMSQEIEASGHLTLDNIKVTPSAVESDAEVWTQTPGNGQDEFVLKLRGITLNYDVMQNQSLCYDTFKEEVLRIFWGVQIVMKD

SEQ ID NO: 145703 - protein, 29 aa, Heterodera glycines
VPIPVPVFGKTEIPVPVLPVPVPAGLNKH

SEQ ID NO: 145704 - protein, 95 aa, Heterodera glycines; identical to SEQ ID NO: 129573

SEQ ID NO: 145705 - protein, 55 aa, Heterodera glycines
LLIIQYNAFKPRREAGQFQNFVPHFTVESPSTLLDNYVSMSTVAFGQLCTISFQN

SEQ ID NO: 145706 - protein, 107 aa, Heterodera glycines
METENDATASPNRPLSAASVATSTALRDGGEADNSDAQQHQQATRELDEAVTLAAGRGARITDLDRQIETLMRCECLTEQEVKVLCAKAREILLQEGNVQRIDAPVT

SEQ ID NO: 145707 - protein, 330 aa, Heterodera glycines
KTGQRPTHCFCGTARLQKASASLTQILWVVLIILIGVFFTVATTIGNALVMLSICVDKKLQTISNYFLFSLAAADLTVGIVSIPLMTLYTGIVSIPLMTLYTAQSWGFGYALCQFWLCIDYLMCNASALNLLLISFDRYFSVTRPLTYRPKRTTRKALSMIAGSYLLSLLLWPPWIKRTTRKALSMIAGSYLLSLLLWPPWIVLWPYLEGRFIVEESAICVVQVVIINQLVTVATAAAAFYIPVTMMIIMMIILYYKVYLETKLRRKELRKLQDGQATRRSLHRPRQSLKIGQSVKKRPKLSRVGQHLSPTQSTFGRYFQFIRNTYNKSY

SEQ ID NO: 145708 - protein, 354 aa, Heterodera glycines
QCSVNRLLRWSLILLAYDFKIEYVKTTDFGQADALSRLIAKGGEEENERVIALVTAEPILEESLHSASKNLPIKFEDLVIASKNDANIQNVIKFIRQGWPTEKQIEKESDIKLFHRRKSDLTILKGCLMYGERVVIPRIFQAKILRLFHKGHPGMKRMKQLARQYIFWPKLDKEIEDYVQNCEPCQLAAKAPIKTDLHSWPKPTGPWQRIHIDFAGPFFGKTFLIVVDSFSKYPEVFEMANSSATSTIEKLRYLFTRHGIPETIVSDNGTQFSSSEFAKFVAANGITHLFSAPYNPMSNGQVERFVDTFKRAFRKLKGEGKPNKEIIDIFLISYRTTPTNLKGPAELLLGRRPR

SEQ ID NO: 145709 - protein, 330 aa, Heterodera glycines
ISPGPAKSAASNAPLPLNSDQQTVFDAVVKAIQSDPRDATVPRRFFIFGDGGTGKTFLFGQIIRRLRKDTYKVLATASTGCAAILLPYGKTAHSTFRLGREVSLDKLPSIPLESFFARRIREAQLIIIDEITMLHNTVIEVIDRVCKEMASPAQGLLFGGKTVIFSGDFKQSLPVVPHEGLTAQVTACFQTNPLFGQFTTMKLTINQRLGQGQQAYLQMCRQIGLGETGEHFWIPPQFLVKSRELIDFVYPNFQQLLGNDKELLNRLILAPHIDTCDEINEIMMANVPGQVREYLSSDKRLTSVHWTSTESEVAALNRRTDSGMLPHVCD

SEQ ID NO: 145710 - protein, 59 aa, Heterodera glycines
MRKFRSPHSLLVGIAVGVFLGLCISLLDNKSKIYIAFTEEDTQKVKRMLSRPTNYCATR

SEQ ID NO: 145711 - protein, 92 aa, Heterodera glycines
MIGRAVRNRPFIFEGIFKFILYPRKMAISFFEKFYTSQKRLRMRRRAVHNRHIISQRIFIFRGYPRKMDISFFDKFYTHTNALEHDREGGAQ

SEQ ID NO: 145712 - protein, 18 aa, Heterodera glycines
YREAIPEGFGLPINLGAS

SEQ ID NO: 145713 - protein, 81 aa, Heterodera glycines
MCANISYLWDQERIIVEIEKLVALHGTNHRESREENVWPFEMERQAKAALGIVEITDPYAYNKTANTINSAVSERGPEKYL

SEQ ID NO: 145714 - protein, 32 aa, Heterodera glycines; identical to SEQ ID NO: 127531

SEQ ID NO: 145715 - protein, 144 aa, Heterodera glycines
MANDLLNANQAFDQLRSQLATAPANDLNPKINHAKNGLNDDEEDERFSLIEDQEFPPRDGFDLDQLSAVDRGLINIASKLFKFLPRIAGKIGQLFSKNVHYIVNSASNLVIFKLNEEQQKKYNLPERLEVPLTPGNTAVAKIAE

SEQ ID NO: 145716 - protein, 226 aa, Heterodera glycines
MIKTFSKVFRVIKRMKLISKREKEKVIKIELNERNENSQSAVDQMGEEMENDPNDQQKTEIIQKFDAIKEKLREKGKFEWKNQSKIERKIAKLLGTNRQLIQKWKNELNLNKNKIKKEFYEMKKSEFIERFDEFKELYGQGKQKEFAKELGICERTFRIWKKELAQKYHKSQKHHTNNDKLKKMKHYLQIKEANPKISDELIANKLGIGWTTLKRWKKECSHPFDQ

SEQ ID NO: 145717 - protein, 147 aa, Heterodera glycines
MTTWTRERLEEERRLHSVVVVNLPESEETVPSARVNSDFVNAQSMLDTCEIECRPCQINGAKRLRIALLYRPPNTSASLTKKILNLIGNYLEENFIIMGDFNLNAKDITWTSGTPFAKSEKGNIFCEFFNVWLIPYDERTNSRQCLA

SEQ ID NO: 145718 - protein, 104 aa, Heterodera glycines
NGVSKNRNYAQKAPQTILALPIPSTIAFIHPIMSAKIIRVPKIACHLSLAKNGVSKNRNYAQKAPQTILALPIPSTIAFIHPIMSAKIIRVPKIACDLSLEKMV

SEQ ID NO: 145719 - protein, 21 aa, Heterodera glycines
MRTRPIWQVKQRLLTSQKKGF

SEQ ID NO: 145720 - protein, 77 aa, Heterodera glycines
MKNFQSVDLSLFARPNKAKAREPSLCAPPHSNSSRGQTEVWTKLLDGPSVGYCSYSDEQYEGGGIAVFEVVGAIVQR

SEQ ID NO: 145721 - protein, 86 aa, Heterodera glycines
RDSRLLIPGNTPPVVIKILYIFNTANATQRNDSEANDRRRRNGGGARDDEWHKRSNRRHSEQKEGNQRHTVVIDDDGRMNQLFAQF

SEQ ID NO: 145722 - protein, 182 aa, Heterodera glycines
AFQSLGLNSAFQSLALNPPAFQSLGLNPPAFQSLGLNPPAFQSLALNPPAFQSLGLNSAFQSLALNPPAFQSLALNPPAFQSLGLDSAFQSLALNPPAFQSLGLNPPAFQSLGLNSPAFQSLVLNSPVFQSLGLNPPTFQSTGLNPLAFQSLGLNPPEFQSLGLNPPAFQSLGLNPPTFQSL

SEQ ID NO: 145723 - protein, 47 aa, Heterodera glycines
MPSSPKHSSLPSSPKHHSSEDETEVKQSPPHHHSSSDSEKEEQKLHA

SEQ ID NO: 145724 - protein, 46 aa, Heterodera glycines
MFLSSSEEDEEECLGDDGFTAGDDEEGCCGDCARPWTSNFFIKYKK

SEQ ID NO: 145725 - protein, 180 aa, Heterodera glycines
MRTFLFIAVVGLVLAVIMESVNATGNNSPTKGDDDKLLFTIINDKLRLAVRKVGTAATNRQRRRTVPVRHTARSMVTNRTMLPDKRRLAVRKVGTATTNRQRRRTVPVRHTARSMVTNRKMLPSATGPGIFAKTGTGTCRNLRSRDRDLDFFSGPGPGPQEKPGTGTNREILKIQKNFKN

SEQ ID NO: 145726 - protein, 19 aa, Heterodera glycines
KNSNFNLYQVKIIQNYLVF

SEQ ID NO: 145727 - protein, 54 aa, Heterodera glycines
FLFSSFFSMQICTTLGNFIEVVKVSKGTIAVYRITYLPANVGTSHKCFSTSTSV

SEQ ID NO: 145728 - protein, 87 aa, Heterodera glycines
MHTFCARAIYHRACQSKAKQQRCCFERIKGIESVHRLLEKYICNLSTILRKSVHRLLEKYICNLSTILRSELEMINFTIQTNFRCSN

SEQ ID NO: 145729 - protein, 177 aa, Heterodera glycines
MRNKNDGSAPFRNTQNRTPIIARAIIRDDKLFFTKAEHHNDCMAHSLEFLESEQIELSQRRKILECTEIWQNVDPKSLWAEGRGIAMKKDVELGKDIENDTSYSLNYPTWQNIRRTYLRRKDRAIAHGQTVKEDPFDIPEKLQLTRFGSLKLMLGKSIASNDLYDYFNQGFPCKIIP

SEQ ID NO: 145730 - protein, 87 aa, Heterodera glycines; identical to SEQ ID NO: 129152

SEQ ID NO: 145731 - protein, 92 aa, Heterodera glycines; identical to SEQ ID NO: 127421

SEQ ID NO: 145732 - protein, 198 aa, Heterodera glycines
EEDEEDDEMENGGGAGSQAASSLYHHRARENSSTSMDRLQRERTASGGGSGRRGGVGSSAAERSTQAASAVAAASAAGDDDDEEEEAMGTNNEEEQEQQHDIGAVEDEHDEEDEDARQGGGGRGDWGGREEEEQAVHLFCKSEHEMEEDEEDEPYFDVHDDEDDDDDDDDDEDDDDDDASSVKIFQPSEKNFHIYVFF

SEQ ID NO: 145733 - protein, 150 aa, Heterodera glycines
MVSPWAGTERDEIGGAQPSATGTGGALGSTSTSTTTNAIDAQQQFPGGGQHRPISRHPGTGPGAGVAGGTGATNSSIAAAAIAAATGADTAAAQQRRFRKKGDAGGGGGGGRKPPGASGSADSDVAEHGAARADFFAYFMSLMRSYSAES

SEQ ID NO: 145734 - protein, 79 aa, Heterodera glycines
MTQRTPVKPKTVNPLFQSKFNFFVKQPEGQELKIRAVDEGTKRDIGELSIPLAAVMREPMMEMSQQSFYLTHGVHSSPN

SEQ ID NO: 145735 - protein, 300 aa, Heterodera glycines
VEQHEDDANATTVSSSTEETAGTAKLLEQEDDANATTASSSTDETAVTAKVELQEDDANATTASSSTEETAVTAKVEQQEDDANETTGSSSTEETAVTAKIEQQEDDVNATTASSSTEETAVTVKVEQQEDDANTTTASSSTEETAVAVKVEQQEDDANTTTASSSTEETAVTVKLEQQEDDANATTASSSTEETAVTAKMEEQEDDANATTASSSTEETAVTVKLEQQEDDANATTASSSTDETAVTAKVEEQKDDANATKASSSTQETAVTAKMEEQEDDANATTASSSTEETAVTAK

SEQ ID NO: 145736 - protein, 25 aa, Heterodera glycines
MHGTFIQSEQNEECKWGRSRRIMTH

SEQ ID NO: 145737 - protein, 981 aa, Heterodera glycines
MPVKSGRSESFDQAEIDTNCTIECSGGKSKFRVKGHLIYVPIQQQIEMGVRISDTLKSPKGIGWPDLNFDWIDIIRFMAGFPNIIVIILAGILAGAVIILIIRCNPAFIVWRRIARWIMLILMIQMMEESREYGENEFLKVPPGGMGVAHRTFSNIKYVAESDWLEVPLKGHGKTDPHSFYSILIFSPKMNSNISSDSNLLYILSRHVKMQPHLLARAIRGIPGTRTQIEEKLESIQESGAKLVTTHLKPENANMILFGTTITAHGADELGAFNGRGPTVIQYFRTRHNRNLMFPEAPCLCEKGGRNHVSYYPLELIEVRETFDRDPPFDFGTRMPWDDNPETVNTGPQEGEKSPKRLSISSKGSSITVEYHGTPQSGAGNPMEGISPDNHSVIIQEIDSNSPTGNPVEMRGDPPRSEERSIVMNVPANSKIELIGPLKCKIILLVLSAFIMIHSVGAKELPSALIHLPSRGPSSLKMREAPMNQIFLHGFGGDVHPGSEEEAVNHGPMSAVDGDASFRMKGTNMSHPFLCAYGMNQGHKIVSSALWRQLYKEEGNGQKVTYISLFLPLISTELLPNMDIEKLLDESEEFVQQQQQHHQQQQQQQQQQQQKQQVVRFVKIDEESDNEALRIDISESESEEEDDDDEEEAAAALEAAVASAAPSPVVQEAKKPRIQGPMEAPKTKRVAAAEGPFVKRARIEGPLNAQKSRCNKCGLLGHLSGDEARCPKTNALVKAEMDRKKAAAFAKRAEATMECSAPPIIQLPVKGGGQARAARAGGVAASMVAGGRASAEGAFRASKERARQELMAAMEKPKAAAISLAEKKAAARPGLQVPMETNAVLNGLSEIGARIDRERDNHLSMAEELQQRGKRAVAALDEVIAQGAQIGQMYVEWTRKLGEVLKANEQERADRDALEHRQAAAFMQSLRLKISVLRRELSSPPGVSPLATERVEIGGQPGGSLGGQPGGPLGGPFGGPPGGKK

SEQ ID NO: 145738 - protein, 63 aa, Heterodera glycines; identical to SEQ ID NO: 134588

SEQ ID NO: 145739 - protein, 927 aa, Heterodera glycines
MTSCKDAGEVLKKYREGKALFAEAQMNLRELICNSMKAMEQIPEEDRLNKPGTKVLGIPWDIQKDELSIGFPPTNEAGKISKRIVLKTLASIFDPLGMVAPCLLQAKLFLQRLWDRTLGWDEILPADETAEWFAVIREWKTEPFKFPRRSVLQDEMVQLHAFVDASKDAYAAALFIRSQKGEETNVQLLYAKSRLKPRKAEVTIPRMELLAMLIGARMLKFAENQLRIPINEKFIWGDSKPVLSWIESKDSQPRFVENRLREIRRISENARFLHIRTHENPADVASRGCTPEELRSHHLWWNGPTWLREPMKSWPIDFEVTPKGAMKDGQESSELDNVVAVSATTSEDNPWIDPCRFSSWTKLRRTVVWFLRAINKMRKTRIFEISEGVPMSSEDYQYAEILLVKMAQKCWPMWKKQPQELVKTSRKNGLVRLSTRLAMSNASEDMVNPIILPENCPITRLIAQSVHESLAHSGVESTLTEFMGKYWTPRARLTIKKVIRACGRCRRIQCPAYKLPTMPPLPEDRVRRTAPFESIGIDYLGPTNTKINGELQKAWIALFTCLSTRAIYLEPVLDLSAEAFLQVFRRFTSRRGTPKRIITDNGTQFVLAAKVAAALEAGKTPTCPLEEHLANEGIKWRFNPSLRPWSNGFLERQVAGVKAAFKRVLGRRILPYDQLRTFVAEVEATINQRPITYVDEGPNAVQPLRPVDFIMPKAILSLDVRRNQQSSDTEFENEPKNLQKQLQMRWEGTLATLDEFWTRWKKEYLLMLRNRLQWEHKGPRSCLADQPKIGEVVIIEEEKTPRNCWPLGRIVELQGSDNIVRSAKLKIPKANGERISWREISRPINRLYRLEVPKVDESEDQEEEEVPNGKIGLQEPIPKKDGKQAERARNVQQGQIRNHGMMTRSMTKAASILGLMFMLVIWTTFVL

SEQ ID NO: 145740 - protein, 354 aa, Heterodera glycines
MEMSLIPGITFKWKEVKLTPVAVSQAPVPILGHKFLSDGTSFSMVDQVNTNLLCQDREIASNFSGCTLSKEACPKCWVDEEAQRVDCQCRDSILEKEFNNPEKRLPLSLRNLNIRYKDGEIFSETHYTPIQVMVQFEGLRLGIEEDFTKCWAQTKTLKGCYKCQSGAQLKLRCWTEYGSALADVYCVDGTRFTVPCRSKAEDQNVILSFDQAEIDTNCTIECSGGKSKFRMKGHLIYVPIQQQIEMGVRISDTLKSPKGIGWPDLNFDWIDIIRFMAGFPNIIVIILAGILAVAVIILIIRCNPAFIVWRKIARWIMLILMIQMMEESREYGENEFLKVPPGWDGRGPSNILEH

SEQ ID NO: 145741 - protein, 124 aa, Heterodera glycines
MAKILGEMQNAKIFVRPSDPKILLSVLLLLTNRNEQFTEETQISVKENYCSLANFVKNLLEKANVVEYLQKNDENIEHFFIRYSTELCTVERIMHEFSNNTIDANFFEHIEFNLNLTNGIVCCR

SEQ ID NO: 145742 - protein, 56 aa, Heterodera glycines
MAGKLIVTVLPSSGERYLTSALYSDIRAEMEAMSHVETLEDNLKRLLKVEDANSKQ

SEQ ID NO: 145743 - protein, 232 aa, Heterodera glycines
LRQSVSQNRTLLRAFNAELVLTDPALGVKGSVERAEQLAAAIPNSFIPMQFANEANPEIHYRTTGPEIWRQTHGKVDACVFGIGTGGTITGSGRFLREKNPAITGSGRFLREKNPAIKFYAVEPVFYAVEPVESPVLSGGKPNPHKIQGIGAGIVPPILDTKMYEEVVLVHSDEAIAMAKRLAREEGLLSGNTNFLKINYFCKIHIYKNEFILFKTFEYVIKYVTNFSYLHY

SEQ ID NO: 145744 - protein, 54 aa, Heterodera glycines
ARGNIKGIFVFSDPENPKNPKLDSFCFYKFEKFWTFRGFLLFWTFRGLDTLWGC

SEQ ID NO: 145745 - protein, 31 aa, Heterodera glycines
NSGTPSRQAAAPGKQNKNTPEARTNGQSPKK

SEQ ID NO: 145746 - protein, 21 aa, Heterodera glycines
MRTRPIWQVKQRLLTSQKKGF

SEQ ID NO: 145747 - protein, 76 aa, Heterodera glycines
EKNIYETKKSIFSSVRLGYSNIYGEQKSTQNKVQAIGKLFPKDRSPHKSGRIGSGGLPRKQKKSIFSSVRLGYSNI

SEQ ID NO: 145748 - protein, 158 aa, Heterodera glycines
SHDAYELSYSGDKILEGVVGKLATGHGVSILVSDFRGSDGTGFTLKKRPRLDAINDLVDRLTVADKGKDTGILALSLTGDDSVQIRKILNSIINNYLQQNVERKSEEAGKSLEFLKAQLPQVRQNLDLAENKLNQFRQQNDSVDLSLEAKSVLDTMVA

SEQ ID NO: 145749 - protein, 18 aa, Heterodera glycines
CVCGTLTIMGSKNPMQNY

SEQ ID NO: 145750 - protein, 254 aa, Heterodera glycines
MPLGVSSSSDSVVTSVSDETVAAASPSASFVDKLGKRWTFLAKLAVFGGAAGGGSSASPPPNFNTSGGSRSTRNTDQSAYDSDHSAAYRPRTKRTAFGNNFEVRIKRSAFVKARASISSGVQADQQPELKIVTKTDEGSPSVYKFASKNWHFLTDSIWNKKSLTDFCKENMLRVAGGIITNTYRNRLLCVRSGCPFRALWLNRQGLVYVPPVVKEELIDGEFKLADLEKEIQALAKRLSLLFRIEKSVKIWHLN

SEQ ID NO: 145751 - protein, 160 aa, Heterodera glycines
MARVRFSDLCHKSSEDEKFEMEENGGKEREEEEEEERTMLEEDMEEEEERMEEEEDNAKEQIRPNSTARQRTPKGAVRGKKRNGHFRYWLPLGKISGAIDEVCREVCQLHYVHKSGIAKNGKFYFRCSNVKCNYKWVLGRPQIERERESYLINFCCQNNR

SEQ ID NO: 145752 - protein, 92 aa, Heterodera glycines; identical to SEQ ID NO: 125147

SEQ ID NO: 145753 - protein, 92 aa, Heterodera glycines
MIGRAVRNRPFIFEGIFKFILYPRKMAISFFEKFYTSQKRLRMRRRAVHNRHFISQRIFIFRGYPRKMAISFFDRFYTHTNALEHDREGGAQ

SEQ ID NO: 145754 - protein, 43 aa, Heterodera glycines
MWSVGVLAFILLSGLSPFGGENGDEPLENVKKCAWNMIDRFFF

SEQ ID NO: 145755 - protein, 53 aa, Heterodera glycines
MAFPRRRIFVFQLGYFEFEQIADQKPDLVDYGPWMADMDIQTKKSSIFGLEFF

SEQ ID NO: 145756 - protein, 19 aa, Heterodera glycines
GPGSRSRVLKSSGPGPGRA

SEQ ID NO: 145757 - protein, 162 aa, Heterodera glycines
MSDIQKAIQALEREYAEQKELFEKWKEENASEADTEPYNAYVEQFRGWEKDVMDNLKELRASIARQPVAPEPELPMVDLDTQLNKCCTSCIDFTLFLFSNSLLDRVDTPQFIMAFMSMSQQDPTFLAKAFEVIHLRQINFYLGSVWIRPWDNVKDFVFTIFY

SEQ ID NO: 145758 - protein, 96 aa, Heterodera glycines
AAAMMAIRILLDHDVLEEDIVLLSLLMAERGVHSLAYAFPRVQLLTISVDKQINEHYRTPLSMPDENCVGPDCEVVQLVASDDDPDEDGDDDSSSS

SEQ ID NO: 145759 - protein, 204 aa, Heterodera glycines
MSNSSFVFLPSNESPPHHEEDDEGPIEESPPHYDEEQNDTVTAPVTPKVPVPAPVTSPAKPTTVKTPATPSVTTPAPPTTAKLPVTVPSPTTKPITPTPPPTTTTPTSTTKLTTGPPPTTTTPTPTTKSTTSPPPTTTVPPAITKPSTGPPPTTTVPPPITKPSTGPPSTEKPITTVPAPPKTTTTSTPAIRAVPSPSVKPTIP

SEQ ID NO: 145760 - protein, 57 aa, Heterodera glycines
  unsure (1)..(57): unsure at all Xaa locations
SLAKAETTTGTXDFFSASCVFRHTICARHFASSFLPSAKTNEQSRRGHRENWKFYKS

SEQ ID NO: 145761 - protein, 210 aa, Heterodera glycines
QTEELHERRDGTQRHHPVPNSLCCRIRTRAAARRPNSGMYYILFSASSSFYVPYVIVIFVYVRIYKAAMNATKSTYGGMVQVAENANKKKAEKTATNGLNDKNSPCSRLKLPRLFISRTAQLREKHHLEMHRFSMDPPRTVPISINCNSSPSVYAQINGSCGNLDVANIKLSADFARRRSEDQCLLEDRSEASQNLTSERPSEMIYESQD

SEQ ID NO: 145762 - protein, 50 aa, Heterodera glycines
MALLGGSLQHFRDHWTKECPSPSVKGQGEPEGPVFRGRRNVMPEGTEKGE

SEQ ID NO: 145763 - protein, 92 aa, Heterodera glycines; identical to SEQ ID NO: 125147

SEQ ID NO: 145764 - protein, 57 aa, Heterodera glycines
MHLSAVLQRSFSAPFIGHLIFRDLICTSNEVITNVQQQYCFGIFIFGTTVCISRYTD

SEQ ID NO: 145765 - protein, 401 aa, Heterodera glycines
ELSPVNDGGQWGDWQPCSVSCGIGFQFRERLCADDWQPCSVSCGIGFQFRERLCADGPCANSGKQARTCNVQDCSRVLGMPVWDCSRVLGMPVWSGWSLWSVCSRTCGQGIQQRFRRCLNGLCPPGEALREQKRCVLGPCPQAWSNWSQWTNCASCSVWSNWSQWTNCASCSVFETRKRHRQCVVKVATANGQQEETECSCSCPGSTNETSVRGRRNKWTNENREREKNDRPNTDHHQFTTGAPIEFDNCERFCAENEFAKVRGEMRSQSNGNESLAEKGTEWGEWSPCSVSCGEGIRRRERKCEMGETGECKTGGGDGTAEEKSTQDTSSSNSASTQDTSSSNSASSSSVRRFPTWSDWSEWSACSCFSLTRYRRRFCRVHDPVEGFCVGSIEGFCVGSI

SEQ ID NO: 145766 - protein, 88 aa, Heterodera glycines
MAQKGAKAEKEEEKQEDIKQEENTPTEEGEEREGEQFEGHPMTLARELRIRTRSGFSGSLIMNITSVKCSQKQLEHQKMVILYRYEYK

SEQ ID NO: 145767 - protein, 278 aa, Heterodera glycines
SVFDLDFFSIDNSEWMRNGDLPPTRFNCQQEAVRALVLLKLRNNPENAVGLLSLADRIDVLNSLTTEDRKLMVRLHSLEILGVSKVFDGIRTAYLALKHRKGVSKVFDGIRTAYLALKHRKNRNHRQRIVVFVGSPLDPLLEEFIKFAKKLKKEKVSVDFVLFIKFAKKLKKEKVSVDFVLFGEATAENNKIIADFVDLLNGAEEGNSHLLVVMVGDTKLYDVLLRSPIFAGSGAALGAGGEFGINEEDDPELAMALRISLEEQRLRQQQQQGGEGTV

SEQ ID NO: 145768 - protein, 80 aa, Heterodera glycines
MEEEEKKERAMEKEKEEQMEEEKEEEKEEQMEKEEEEKKEEERKSKWKRKRKSKWKRKRKSKWKRKRKRKERANGRGIGE

SEQ ID NO: 145769 - protein, 56 aa, Heterodera glycines
MVESLGLGVLALGFRILVSGLGGNIVGYVLDKMEEEMEDDEPHGHITSLAVKRTFR

SEQ ID NO: 145770 - protein, 46 aa, Heterodera glycines
MSIARRVLLVADLHSISTGRHEPAQLRLNCFRTLATLLACGVSIGR

SEQ ID NO: 145771 - protein, 187 aa, Heterodera glycines
EHGGVGGSGNGRLPYAKGAGGPSPERENGNEGKDRTTPAKKPKKEGDKGGGATSAQNAAAQEANRAKQGKKATEKHPRTQSEGKRQQKAGKNGRRGGDAKPRSASGTGDHRKHFHPVYSIFRDFPAKFALPKLPSAKCVAPSVCPAVTASVPIVCSLSPRKTCPTTLLRSNAPFVASNAPQIELCSL

SEQ ID NO: 145772 - protein, 82 aa, Heterodera glycines
MFRIELEQNKYYIRNLRLKKPIEIESHRPKCDRLSQPFWPACRQMSDYIFPSIRAVIACCTYDVQLLPQALEKYECHGSECQ

SEQ ID NO: 145773 - protein, 126 aa, Heterodera glycines
MMFSDLNQPSDEFTKSEAEFKLVACTKHRADFIAVCFSCDELLCKDCVDSGEHYAHKWSFLNSEVDILCRQTLQELGQQAEQKIHKLFAGEGHCDGAVPEQEQSASAVEAVDSFDAGRKRGSRLGL

SEQ ID NO: 145774 - protein, 202 aa, Heterodera glycines
SRFGADSFPGFRTPTGGGLTSPDAMVMGGQQFCDPTNPMFPDTNNYLSGSQSKLWAGQFNSPSMFSQFDSTPAHQRPRELMESRFTMGEFGAGGYGNSSCDLSAGMRSRSSLCNTPSMDQFVTASSIASQQMTLCKHFNADKNNGADTFNTPQGICLGLDSEIAIADTNNHRCIVVNFNDGTFVRSIGSSGTEEGSVYYPKK

SEQ ID NO: 145775 - protein, 101 aa, Heterodera glycines; identical to SEQ ID NO: 137698

SEQ ID NO: 145776 - protein, 29 aa, Heterodera glycines
MALIEQRNERKKAIRTEKVLEEAEKTKNS

SEQ ID NO: 145777 - protein, 24 aa, Heterodera glycines
MCSKNDSSVRIDLKRCPCIHSLAQ

SEQ ID NO: 145778 - protein, 287 aa, Heterodera glycines
MYRPSQTPRLTLSSARVAGHRVARLKHQNGHPSGALPFYRLSKESMKVVVFHWRLAAPTYATPLMILHKVRLESSSTGSSFPAKFAKPVPLAVVSLDSRRDSGNLVDPFVRVGKPTRHLATLRESCYSPVYPRLIKFPWLNIQSTGQKSDTVNVHKDHPSPLFLDSRIPRVRASSKLVVQRQPKCIPRAYTQLKRSTSSSHHSTHHPRKNSTQPRAKAACFTQQPGPDLSQFFSRSYESNLPTSLTYIILSTRGCSPWRPAADIGTIRQEIQIASVAFSRAVWSARD

SEQ ID NO: 145779 - protein, 53 aa, Heterodera glycines; identical to SEQ ID NO: 125524

SEQ ID NO: 145780 - protein, 44 aa, Heterodera glycines
MDIRREFDEKIFENKNGSWGYCNFIYFVVPVLPIIPASRTTVIA

SEQ ID NO: 145781 - protein, 68 aa, Heterodera glycines
KFAYSVSPSLTPLFAAILFGWCENWIFEKKAKARIFSDTHFLKSDSNISRETGLFLFPNFRSTQGIKI

SEQ ID NO: 145782 - protein, 88 aa, Heterodera glycines; identical to SEQ ID NO: 124691

SEQ ID NO: 145783 - protein, 199 aa, Heterodera glycines
MCLTYAAKGAEAMNIVANHFIFLLTARHLDYEIAVHFKNVKKIDGSMAETILTRFEIVDQSNKAKERPSICEESFVIDITAIESGKQRKKLAGKGRRPDFNIPYSICDGTTFELTNNDNFCLFRAFEFLRVKHELRDRHQRFTEYKRNSQWQLNDITTLCQTCEINMRLPFYSIEEYGERIQCEMPYSHQNQHNSKCKW

SEQ ID NO: 145784 - protein, 438 aa, Heterodera glycines
MSSDDEMPPVLDGPYTPVRDGDEPFEEAPPLVEILEDVKGKNEHGIKERLNLEEFNGEHFKCLDAAQAESGRFKAYRFLGRFMLDYIWNADYPEAVLKSLFLMCLSYALKGASAMNITANHLIFLLTSRHLDYEIAVHFKNFKKIDDKMAETVLTRFEIVDQSNKAKERPSLLEESFVIDITAIDSGGKRQKMAGKGGRRRDFNVPYDLLEGATYGLENNDAYCLFRAFEFLRMKHVMPHPRFSEYKRDEGQQLNNVTSLFRECDIQMGLQFYSIEEYGNQIQEYYNEMHPGMFRLFCFDTFGKMKPVWKSAMSDYRYELCVLYKEGDDGAVGHYDAIKSIGKIFGSKNYCFGTFQSKECYDHHKKITPCKVKKGKETKTIERCICNTSKRCNACGVGYMTFRLLDISPTKLKTFILPTNPKSVISPTVISPTIHFAY

SEQ ID NO: 145785 - protein, 20 aa, Heterodera glycines
MSRTPAIVNFLSKKAIILKN

SEQ ID NO: 145786 - protein, 283 aa, Heterodera glycines
LKEMHWDVKHLWSLESIGIRDPLDSNDDELASDLFRDSVKFKEGRYEVGWPWRPGGKIKLSNNFFLAYSRLSGLSQKLRSNSEFREKYQATIMEQFKKGIIEPAVRTGGNEHFIPHHAVVTKKLRIVYDASAHEKGKASLNEMIIPGPNLVPELAGVLLRFRSSAFPVLGDIQKAFLAVGLRDEDREVAKFLWLKDPSLPLTHENLVVYRFKRIAFGVNSSPFLLASVLQHHLTLNGDPLGERNFYVDNLLLCSETATEAAKAVHIARQVMTRAGMHLHEFVA

SEQ ID NO: 145787 - protein, 80 aa, Heterodera glycines
QALIPLLQMWYERLPMIIAAVSIPAFCTSDYYPLHWYGTNGCKHHRVLKGHEQSALLIRDRELTGYEYNLMGIDSIPEED

SEQ ID NO: 145788 - protein, 72 aa, Heterodera glycines
MIIPFNRFYQRTAGQAKNCPLRTHYFSIKFTARTPANNYPTNAKTADIKTPKDVQDAFAPDGYRGTYCPFFL

SEQ ID NO: 145789 - protein, 15 aa, Heterodera glycines
MGHLQAECAEMLGVA

SEQ ID NO: 145790 - protein, 16 aa, Heterodera glycines
EAIPEGFGLPINLGAS

SEQ ID NO: 145791 - protein, 59 aa, Heterodera glycines
MGPARSGTAIHIDPLGTSAWNALIVGQKRWCLIHPSTPKQLVKTLKEERNFHSDEAITW

SEQ ID NO: 145792 - protein, 230 aa, Heterodera glycines
MLITFVRNDHKMQISEYSKQKYGAYLGIVYFIRKNWQCDKISEELEEYKRTEYQKNRRYLDILYEYLSREYAGFPTVKPIFVIKNRIEIEAPIIYAIYCLVRISQFCFKSKWGNFYEYKLNKFFNNDYEPKMLNEERLNYAFKLENEPKMPINEIILQLAIDTANECQTNERLDGIIRQNFDEFLRKMFKKAEGRVKNYDDRLRVAKINNDKHKIIVGSKFDDKWTWKFN

SEQ ID NO: 145793 - protein, 164 aa, Heterodera glycines
MASSFLNYQSDTVRAEFLHALALRHEQDRDDANKYIKRNPTPRNQKEPAKTENYGFPYDFHSILHYAAVKTSGSVILKKIAKTLKTNAKREDIPTQRIATNACARWDTVEKNAKWSKMMEIAKLTGQMELKQIGKSNVEAKSELHKKDESCGCHWQIRQHLYEI

SEQ ID NO: 145794 - protein, 158 aa, Heterodera glycines
MSLQQQRQRLPIAKCRNHLLYLCEHFQTVVVVGETGSGKSTQLPQYLTEFGWAENGRRICITQPRRVAAISLASRVADEMMCRLGDAVGYSVRFDECISARTHIKFVTDGILLRELMSDPLLQAYSVVIVDEAHERSVNTDLIIGFLRKIVAIRDDLR

SEQ ID NO: 145795 - protein, 273 aa, Heterodera glycines
PTDVLTEKELLAIYQFHALPNCICISNGFFPMQFPTNGRISDRKEGTLLLDIENVSEFAREAVGNSRHSEKVYINAFPWKILAQIKTKNGSTDNEKWFGFFFSFDTTKKATINHHLDSHWRCCVRSATFRIISHRKKAENSNGTFCDRVFDNKSTGWGFENFISFAELLDPRNGFYSEEDYKVTLAIDVILKDEKMEKFILNQSEAKGKLFMDIEKVSEFAREIKGSERKSKIVHIKGFPWKLWTKIEKKNESADNKELGIYLLYDGPNEGAN

SEQ ID NO: 145796 - protein, 79 aa, Heterodera glycines
MRILLQLIALAMRKFLSKIFANLLKLVFDFSWNLTLTTEGRQRIGTFIRHCSKKHAKSLKNWRKFQLKTAPISTIAKYG

SEQ ID NO: 145797 - protein, 217 aa, Heterodera glycines
METEKSENAIIWVDIMAIANEIEDKLKVIEQIGKLNFVNYDFMEGKLLENLKEKWQKIKENENYEKLKRKMFKFLNEILIHSEMRGHFIQNCEENSEENENQKLLGRIHQKNLANAIKKDEFKQKWHGMATGDKEEKLIHLFKNNIFIISKLEKHAINAQKMMAQIEIDQNLLNQIMANGLTNEFACCLSPSFPKISQQLIRDEFDEQNSQIVANWP

SEQ ID NO: 145798 - protein, 85 aa, Heterodera glycines
MRWIGRTVHSSADAFGGGVAKSAFGEAKRSFAFLGHVRALAYSLLGFPNTLTADDMNELSQMIKHLRLRRNSDGSEGEDRDEEEK

SEQ ID NO: 145799 - protein, 60 aa, Heterodera glycines
MDRHRQLDRSCTFSGAPVKGNLNKRANPSSRSIRYTSQPQRSCDSALDSSQFTRRYYGNP

SEQ ID NO: 145800 - protein, 145 aa, Heterodera glycines
KRIYKKWLNTLGIKTKPNQSYPVTYLEKSRQFGPFCTRPEPVVTDLLLVFEIGKTFPFFGQLDNNDKCIQLITLIIIHFEKIALCIQLHAIQMGDKMMRYSVQPFARLKLINEEFVFARAIIYSHMGQNDPPFFKCFIILSVAKA

SEQ ID NO: 145801 - protein, 48 aa, Heterodera glycines
MCRLRWWPNFLSIPALQLWPLKAAMWTREMHTLCSTNAQIQSLPNEMK

SEQ ID NO: 145802 - protein, 130 aa, Heterodera glycines
MDEKPALIDSKLFSYESFVVVAENPIVSEAVTHKRAVMARVQVAMMSLRKRKRGRMINDVIQIATDQNHSTHHNCNAGIERKLGHQRSRHIGRKVFAQAEVVQRERNGHVLFDVSALKWFIDEALEANDL

SEQ ID NO: 145803 - protein, 154 aa, Heterodera glycines
MFNDATTRNADSSENEEENDDEDEDDFDEDDDDEPSDEETLRDIPLDKIDIWCFMRLFKDKDEDGQGDRLICISLAQRFTDESHCIMGASDAGQLPMDVPLISINHCLADFIKPEDIEGSRCAQCSNATPPPSAPPTLVKQLMFTRLPDILVIN

SEQ ID NO: 145804 - protein, 130 aa, Heterodera glycines
MSTPSKADDKKKEVGGILNIGNTCCMGAALQALANVTALSNFLMKNENRLSNIKLVMEYVQMIKSILVLRQPAAPFELKHWRNEVLAPKKGSVIFDLFAGQSVSELRCPSSLEKETPSNVRPMKYAFHSP

SEQ ID NO: 145805 - protein, 73 aa, Heterodera glycines
MVKMQLVPDGTFRKVRNNIDRLFDKNLTDLIRGIRNNKENEARYIAACIDEIKVELRQDSIFVKANAIEKLAY

SEQ ID NO: 145806 - protein, 95 aa, Heterodera glycines; identical to SEQ ID NO: 130684

SEQ ID NO: 145807 - protein, 95 aa, Heterodera glycines; identical to SEQ ID NO: 130684

SEQ ID NO: 145808 - protein, 88 aa, Heterodera glycines; identical to SEQ ID NO: 143614

SEQ ID NO: 145809 - protein, 358 aa, Heterodera glycines
VEKILSKIYFNLKSPASFAGIQKILNEAKKIDPKITTDDVNKFLEKQKTYTIHKPIRKRFPRLKTIPSGFHTDWQCDLCIFDQLKKHNDGYKYLLVCIDVLSRMIFSAPAKSKKSEDMIEAFDRVFEKSKIIPMKIYSDSGLEFQAGKIKNILRKNFIKNVMYSPDLHAGVVERANRTIKERLYRYFTKKDTLRWVDVIDKIITNINNSVNRTLGAKPSSINLKMPVRSGKKKFKIGDIVRITKEKKFKIGDIVRITKEKGKFSKGYLPNFTEELFKIVVANSTTPDSYRIEDLEGNLIKGIFYNQELVKTWMIFTLYYLRTHQGRRTLRQNSQFTPRDFGIGHKLVSSSLINYLPLL

SEQ ID NO: 145810 - protein, 132 aa, Heterodera glycines
MDDFYIVLPSNTPGQENTTSKFTVRLPETLELGTNWSVALSSIIYPYSFTALGINGQEFIKVWENDISVPTQVYLPDMNFKTAGGLGNKINEAFTHHYKIKKQRGKREAKAEDTKIQKLMSQRGPQNAPGET

SEQ ID NO: 145811 - protein, 244 aa, Heterodera glycines
MVEMGTEIQTSRNELKSFQEEVDKAKNITLEHVEKNDMKEAKKSADVAKGIARQAKTKYTSTLEEYNDKSEKGFSGMVVRLNEALEAEKGPQKRERLANEDVQFNYDSIDQKFIVYLSSAVTHIDLSKHLAYVLGFKNTRLFHAEEATYMPDLTGGVRQLYIYAPNLIENTIIGNQMAPLLRIVNVVDDPGSISEVIYSTEYFHRLQSKRISEITIEIHTPFGEFVKFHWGSCILTLHFKKSIF

SEQ ID NO: 145812 - protein, 387 aa, Heterodera glycines
MNDSILGLIGEGVETFNGIPDMNKIKEQEKPILLILDDLMLNMQNTFLDLLFTRGSHNWNAKAFECGYRVDRFCRAWHYEATDDDLFKGYVRLFLKLKEESSGFPKGVESDEQKRQWAEEYKEKYGIAIELSRVQKNPGLRYISKLMLNSLWGKFSMRNSLSKNAVIDRESAFYELACDHKVELCDIVEYSGDAMRVIYRDKEEFVTEHKSSNIVVSLWTTSMARLKLLEFMMEAERNGGEILYTDTDSIFVFHDRGVEPITTGKYLGEMSEEYGGYEIEEFCCGGAKQYGLKIRSKETGEVDYVMKIRGVTFDVDNRKALHYDAFKEMVLNYGKGEVDPAFFVYKNDFGPTRESKVVTRERHKMYKPVCQKGIIDEELNVMPFGFC

SEQ ID NO: 145813 - protein, 594 aa, Heterodera glycines
MSFKRVNSVQPTAVPMAKKWDFRSIGNNFPMEPFKLIDHQTTKCEKFGFTKNITEFVINPDVERPDETLREAIDIMIKNSISKTEETMGRKVKMFGVALTGAGLGHPIWLPYRPFPQNNADVVMEEINKLGQSGGEEGEEDKRTILLSESIKMKVTCVALPAGEGPRNVHKFDFGFKEQQRIKQREAAFELLLNSGVQRNESGYGLEHLVMVQAHWDDLNPGKYRIVAFEKSADPRKSIRVLWKGPMAREKVVPIFLEGNHWDGLKNYDSETSQDTIYKEDQMEHVINYISVRVTCTECCDDKERTNCNICGEEREKDWSEAEGHEPTKDFVEWILTAFVKYDTYIFAHNAGRYNENMETSFYLPEELKNYCRNDTEILLGAVVEFRRILINEITKGFDPLPRSCTNAGIAMNIFKAMFLLEEQLSIVPERGYERNDRASVVAIKYLEWRSKRDAVEIRHAGNGGEMKMGKYKLDGFISQMDGRDKCIEVMGCYIHGCLSCYDPSADLVGGRTAQELNDETQERLAELRQILDVEEIWGCQIEKELKGDKEMQEFFDDRGNEKGPIDPRMAYAGGRTGPLRLFAQSDEKKKISV

SEQ ID NO: 145814 - protein, 82 aa, Heterodera glycines
MNAPPYEGDSDYGPTPKRHRPMPFFEEENFPIGGSDDLRQHTQRFDQSFDQSPYEQQEGAELTRKIYGGVNEGSSIHKLSLF

SEQ ID NO: 145815 - protein, 108 aa, Heterodera glycines
MTGSHEQSDKMGGNSANDVEEGELPEEGEIMDEEEQQHKGKVITMKTEAEESDRAMPTPQQQNTPSNSKTESGSKDSRGDAGGSSWRRCRDKPNSKEQMINQNIRFQR

SEQ ID NO: 145816 - protein, 247 aa, Heterodera glycines
MLREADKIACREFVTADDVAKGNYKLNLAFVANLFNKFPALPEPGADEIPQITEVTEETREEKTYRNWMNSLGVDPFVNHIYSDLQNGLVIFQVILTFNSKHYRSEYILRSVQNVSVVRMHSSWNCPVEAALVWQLMRAYTLTILAQCTQSGESLATEKEIIVWVNKKLEESGKTSRLKSFQDQTIADGRVLIDLIDAIKPGTINYDLVKNDVSAESNLENAKYAITSGRKIGAKIYALPEDIVEVD

SEQ ID NO: 145817 - protein, 24 aa, Heterodera glycines
MALRIVNVLLFAVTYFAWFCAFIA

SEQ ID NO: 145818 - protein, 246 aa, Heterodera glycines
MAKVNENVTDQFELLVPIIETIHNDWDGDWRADEVFFFFGYFHLKMLKPIKIEIRVAFRHKTNSNSSPSFSLNFTAFSYALFFDVKLEKRTLVELKGTPIFGKIQSKNPFNEIHVIGSMDFVQRNFLPAFGNLTFAQWSAQFSADGFPSKSSPEEIDWQMRKWSMEQNFSIVLGRKIERVRMTTHQRLGGGILCQFVFHIRISEQTLQYRFTWNLVLDYIIFIQNQCLGDGQMGVGTVLGSVCRCT

SEQ ID NO: 145819 - protein, 254 aa, Heterodera glycines
MLDRYEFVNDLCDLLPEFANFSMEQPQTFRALLILISQFLDVVTQNLFIARKVAHIFTTLKESANECFEDLVNCHHHRSTVLTIFGILHAIVIDCPSALVWTPFESNELAEGLQSKFKPDRNGNSKSMERESVQNSVAWNDCLDITIRVLINWAVTSEREGTHRGLIVAHLLKMHVNFAQNDNKKPPFGHGFSSLQELLVDCLNREWANPNGKAIANSAVRAAEFANLMLLFYELQRFGTNLHYFKFVATKFAF

SEQ ID NO: 145820 - protein, 72 aa, Heterodera glycines
MGKCQVKSGNPQVDFSSNFPQFLPCTITMFGNAVENNGALVAHVPIGFNLFNGQMDDKTFMKTEKTKKIIEW

SEQ ID NO: 145821 - protein, 22 aa, Heterodera glycines
VGVNSVWPTPSQQCSKSYNFFL

SEQ ID NO: 145822 - protein, 33 aa, Heterodera glycines
MRTLSTAVRQRSSKIYSMPQILWAGHAKYLKLG

SEQ ID NO: 145823 - protein, 24 aa, Heterodera glycines
RTLSTAVRQRSSKIYSMPQILWAG

SEQ ID NO: 145824 - protein, 24 aa, Heterodera glycines
RTLSTAVRQRSSKIYSMPQILWAG

SEQ ID NO: 145825 - protein, 68 aa, Heterodera glycines; identical to SEQ ID NO: 142082

SEQ ID NO: 145826 - protein, 53 aa, Heterodera glycines
LLGNELFFEVSLFPIGALLCREPVCNGWLSICKKLDWQYVVVKNFWVMNYFLK

SEQ ID NO: 145827 - protein, 67 aa, Heterodera glycines
MLYLVNVATQFFVLNTFIGRNNRMWGFEVLENLFNGEKWQPLFPARTAQGRSEYVAWWCCTVWMHVY

SEQ ID NO: 145828 - protein, 41 aa, Heterodera glycines
MILQLCFLNERKHGKPIFDEAYESECGPKLKKAFLIYGFCF

SEQ ID NO: 145829 - protein, 113 aa, Heterodera glycines
MAKYVGVRGRGGRGILYEDPDYGPNQIQLHFTNNIEVPIQWLRPQQIVDHPQFINQMPEPRDVNQGSLGDCWMLAAASILAQHGHLFYRVVPPDQGFAMGYAGKNFVLNKNKN

SEQ ID NO: 145830 - protein, 58 aa, Heterodera glycines
MDDIVSIDSVQPIDQLSFWCLTLSAMLKLVAVGVTLFTLPFNEWILLQGAQFGGVKII

SEQ ID NO: 145831 - protein, 36 aa, Heterodera glycines
MPAKLGEIYLLGITGVSIIAVLFLVFLMLSQNLVRF

SEQ ID NO: 145832 - protein, 86 aa, Heterodera glycines
KNRFIFVFGAVPPNRCAQIYGETESFGNSFPIACTLILRWIFAPHNCLSTPNGHLKKSIFLFSGQSPRPDAPRFMGRPNPSGVSSL

SEQ ID NO: 145833 - protein, 81 aa, Heterodera glycines
MFVLPSVLLLLLAPFAFCQNALLPMLFQAPPQPQEQLPQKTPRGHTPHEKMKMCCAKLDQADADCKNRFCDWNALSSNTVN

SEQ ID NO: 145834 - protein, 112 aa, Heterodera glycines
MPFSSSSFSSSSSLLCFFLFLFVLPHFSFVSSADANAKLKKCCLTLTSEKDDKDCVARFCDFDAISQANVSGESNEFVSPIKFEMNLRACVDYFDHIRDCFKAHLENKKEEK

SEQ ID NO: 145835 - protein, 103 aa, Heterodera glycines
MGNVEKIGRPAEAVDYFCVQRGGVPIRRSVRPKLNSDRMIPQFLPKNASNPSSTDAKPSGDLLHEHSLPSPRETTRGGGSEISVVPRGQVETNLDGQLPNAIE

SEQ ID NO: 145836 - protein, 19 aa, Heterodera glycines
MRKRDSYFWSRIFLFAFQI

SEQ ID NO: 145837 - protein, 75 aa, Heterodera glycines
MVRISVDVVNDAYQFINPCKQREISLRNLQIPTIENLGVIRDQFDVIDLTDNNIRKLDNLPRLKRLGGDTFKDGE

SEQ ID NO: 145838 - protein, 128 aa, Heterodera glycines
MPFEFLRPDENPKFVANSEWEMVPPIPANCPINVSDEKGKLVVKSAEQMEYERDDQRQSGGQPAVKVSGKLLRVAFRVNQMPKNITIQLEDKQKKPILTLFIGAKHIILNSEQVNGARRHGTRRDGKG

SEQ ID NO: 145839 - protein, 87 aa, Heterodera glycines
MQMNRQANSSVLCDCETNPPPAVPIYSPPPPPPMFLPSPPATEGALAPPPPATEGALAPPPPGGLVITGYPTANPDGYFGNNAHEDK

SEQ ID NO: 145840 - protein, 46 aa, Heterodera glycines
MNSNANGGGGDGPTLKRTMSALGVAALTLGAVPSVEAGRPLGTIMV

SEQ ID NO: 145841 - protein, 232 aa, Heterodera glycines
MCWVIDIALSLQLLVAHVKAFAPCTSNLDPYLRKTIREQRGGEPIIDLSESQEDDDVAQQQDPFGPLKETIGPEAEFVFQDPMVWASVPLGDWTLVKLLIESLRKWKPFSTQSLCSPPDTNSNSVADPVVVVQPQQQKHLVQHHDNGEFGQQNEQRMALLRRIEEEGNGQTMMNNGETEEEKRRKSTKSGEKEEKERRETEEREEEMNSVASVAGSSEQRSLLRSSTSPPKD

SEQ ID NO: 145842 - protein, 278 aa, Heterodera glycines
MGPAVAGNNEPISENVKIFYSNDESDSVAVPSNVYEYFQSIENGRFPFFNNTHVHVSAMRNLNGETLLITASRLGHAEIVARLVADIDVEETDNDGWTALLNAAHHGHAAVARALLTAGASVDNPDLVMIQLIYLFSGFFRYCVFCLGRGFTEVARLLLASGAQVNTSDKFGSTALIWAARKGFRQIVEQLLNSGAELDAVGMYGSTALMLATRGNHAHVVEMLLSRDPNVNVVDYNGLSALGIASREDVLLALLDKKPNLELKNRDGETALIRAVGF

SEQ ID NO: 145843 - protein, 236 aa, Heterodera glycines
MEEEEGREEEEWEGRERRGKRKKSGSREERKKSRKKGRWEEEERKKNGVGRERRGKRKKSGRRKSGRRMGWKEKEEESGRRVGGGRAEEEWGGKRKKRKAEEEWEEEERKKNGVGRERRGKRKKSGRRKNGRRMGGKRKKRKAEEEWEEEERKKNGVGRERRGKRKKSGRRKSGRRMGWEEKEEESGRRVGGGRAEEEWGGKRKKRKVEEEWEEEDRKKNGREEKEEGTPRCVGGV

SEQ ID NO: 145844 - protein, 37 aa, Heterodera glycines
MLKVYLIDDKNKFLAFVVFQGKNENRCIFDFSRKFAN

SEQ ID NO: 145845 - protein, 127 aa, Heterodera glycines
MSLRKRIIDSKDKLTANFNALLNVANEIKQLFQKAGENSNYMTFFNSLDNANIFFGNIGEGANKSHHIQKWIEEIHTDFNTLIIENDLLEIWNDIKDKFSFQENVCNKLAKIRTDISDDDKGFIVVH

SEQ ID NO: 145846 - protein, 166 aa, Heterodera glycines
MKYCVRQTYTKKLPMKAASVLSCCLRQNSKREQRQRLVIGTYELATDEAPIGDKKSGSERCGGICIIDPTDLLPIERYIRLPSGVFRLVKVPTNAITPLLTSEVNAAVATLTDGRLALFTTDHFDSIADDSATFLPFSTTLSGGMMLDCAVNSDGRLLCSDNLGNV

SEQ ID NO: 145847 - protein, 95 aa, Heterodera glycines
MTMFKELTNRQLVAIVMLAISNLCSTVVVSCIGPIYPGEAKRRGMSEAQIGLVFGLFQLVMFISAPLLGKYMHVIGSKWMCIAGLQIASLAAIAF

SEQ ID NO: 145848 - protein, 76 aa, Heterodera glycines
MTKKHLPPAPFEYLSTSESENEMENCGQTEASKLAQKFSSRKDLSPSERMAAILKLISSKSEDICLIYVGRVGFLF

SEQ ID NO: 145849 - protein, 16 aa, Heterodera glycines
EATPEGFGLPINLGAS

SEQ ID NO: 145850 - protein, 214 aa, Heterodera glycines
RRTLVLDGNSLQAQDLVDCMHDKCKLQLAESSRQRIREARIFLEKVAAEHRVVYGVYGITTGFGTFSNVVIPPEELKQLQLNLIRSHATGHGSPLEPAKARMLLALRINVLAKGYSGISLGNVDKLVNAFNAFCVSYVPEQGTVGCSGDLCPLAHLALGLIGEGQMWSPRTGWTDASDVLAVNGLEPMALGYKEGLALINGTQLVSALGALGNY

SEQ ID NO: 145851 - protein, 43 aa, Heterodera glycines
VKHPISALLCREPVGNGWLSICKKLDWQYVVVKNFWVMNYFLK

SEQ ID NO: 145852 - protein, 259 aa, Heterodera glycines
MSTRRSSRRSSAAKGSREGSVAGKSKPSETAISDSKKPSNSSPEKAQETGKMEEEKKLEPVTETEPELSTEDEEKSIVDEKKTTPEKKQEEVGPAVEQPLEIYVEHTVKTEKLHGIVQEQSQAKDSASSDAPIENGQQQKNEATINEEEIVDEDAFIITNESDPAATHKIQVYTLSDSGIPNEQKATPSGSKALVSAKPMLGEEGKGDEITVVKDEGQQPSGSVVDTVGSSEGNAHVTTNGQNKESAETVVATVTLDEE

SEQ ID NO: 145853 - protein, 297 aa, Heterodera glycines
MGKRNLPRKLNCKKALKEREKKREERKAQTAKAIQARLAKKTAPQPNTDAETPQPSEEEPSTSEAPARDNDGRPPSTPTPMTPQEMDVPSVEMVDTDVQIPSTPADEDQQAEPVPSTSTARCDFMATPSTSKCAGAFGLDDVHMFDELRRRHVWIEEELQRQRRSNAVLRKQLKAQRDRSTSLERSASSCRQRKALSDVTNNPQEDKRLSAANDLLITLDAGISFKAREALKRSFAGQGHDVWAPTWAVKRLKRELAEGANFEWVGEEQTRALVCTDVRALVEGRLQALAKSATLFS

SEQ ID NO: 145854 - protein, 52 aa, Heterodera glycines
IKIFINFKASLFYFLAKLIHKYFFTNCSETHQILFTSYFRHSDAFTIKKGDE

SEQ ID NO: 145855 - protein, 96 aa, Heterodera glycines
KEKRNTVIKALVDEKRKHQKQKEELEEMEKKKKEKEEEEERNKKKKQKQMAVNDCVKHVAELDKEIAKIQSELQRSSNKMANLHTGKMSTPAKKGN

SEQ ID NO: 145856 - protein, 117 aa, Heterodera glycines
MRNLRVPILLVLLSPVIIFILKFLLHENMPTKITINPVAGNFMQRRILFFDSDVNTPKLLLGMNTQFIPSLKLAGCLIAKNSNVFLESLFCYLTNMNKINTTNIDYELFNLFVFNYL

SEQ ID NO: 145857 - protein, 85 aa, Heterodera glycines
MVQKITGNSFKKTRNKSLNWGHALMRPFSKAVIHWSGLLSLKHCSQSEGETTETDTTPKEQIQIKIPLPLAIQHNTVTQHNKTSF

SEQ ID NO: 145858 - protein, 25 aa, Heterodera glycines
EFSGTVCADCGASCPSWASLNHGVL

SEQ ID NO: 145859 - protein, 58 aa, Heterodera glycines; identical to SEQ ID NO: 138265

SEQ ID NO: 145860 - protein, 150 aa, Heterodera glycines; identical to SEQ ID NO: 142473

SEQ ID NO: 145861 - protein, 75 aa, Heterodera glycines
VQPSSKLINPFHSQYIYFYTARYCKNEYGLSKEQLSMLAHFVPLLRKVRLQLDSDYSKEKFDEMEPGRKLLINYN

SEQ ID NO: 145862 - protein, 129 aa, Heterodera glycines
MVTRFDAERDEKRAEKANEWLKKCQENGTKNKTAERTMRQFIDQNYNIGKVSELLDNFEKQHFNLTNDALYRNIAILRDYGSIDRCGITVSSNDRPSDNHTANAAAMVDYYFAGSFWRACESYAIYFYT

SEQ ID NO: 145863 - protein, 273 aa, Heterodera glycines
RNWPPRALQTTEGGGSVQQFVQQHYPKTAPKVAHSVALLCSSTDKAELGTALQELMDKTPLASYLIVREILFRLKNLCFEGPKNDPLNQQLLRNMRAYEILLEFLSIPFDKKNDFEMPRLIRKNDFEMPRLIRLSHLSHEFLRSFCRNNRENQARLAARIATAEGGATDAAGAVKAEDCATIVAIYRNNAELCENVPEQLIAHIVSLIEQKQRNAVFLELLQVIVSSCEKGLNECQVKVVEEVGRPREKPRSAHTDQQTIRDSTIVRNRDHSR

SEQ ID NO: 145864 - protein, 65 aa, Heterodera glycines
TDNISHAAGEQQQQQQQHDQTENKVKFQEQKKSENYAMACFFFTRLYRKLAGMLETPFYGKKPSN

SEQ ID NO: 145865 - protein, 31 aa, Heterodera glycines
NLELLVDGLRVHVNAAQPAAVAGWDWYQSTT

SEQ ID NO: 145866 - protein, 197 aa, Heterodera glycines
MNKLKIFFEKLDKKYLEKLKELKESLSGHLLEILKNIHTDYTKASQREASKNGGILLTNYRKEMLRFGQILYETMKKNLAKNMEYDENKQLLTFTLSFAKHLLGRLFEFVERNFKENFKVSDDMDFVQTIRAVASNNEELVAEKRQKSISAGVNVKLSKLLFSLAIRLCLLIDGQEFREKYVPKFVFALKMCSTNTG

SEQ ID NO: 145867 - protein, 92 aa, Heterodera glycines; identical to SEQ ID NO: 124679

SEQ ID NO: 145868 - protein, 113 aa, Heterodera glycines
VLEWLRKNALVGATLVSVLLGALLGTVIRYANPSLQTIMLLTFPGELLMHMLKMMIIPLIVSSSLISGLAQLDAKQSGRVGSLAVAYYLATTAIAVITGIILVININPCQDTT

SEQ ID NO: 145869 - protein, 27 aa, Heterodera glycines
MAGRVHHDCLARLICWFCNIRMEIRFK

SEQ ID NO: 145870 - protein, 26 aa, Heterodera glycines
MALTISRARQSWWTRPAMLDTLTRSA

SEQ ID NO: 145871 - protein, 81 aa, Heterodera glycines
MRLWAASLGFYVSIVIFCEILRGFAYRFELHTQIGGEHHQQFTSLIYEVAFVKLRIEKAQVLAASNTSDQLLSFSRSICLI

SEQ ID NO: 145872 - protein, 15 aa, Heterodera glycines
LKAIHCLPVLGTAKN

SEQ ID NO: 145873 - protein, 241 aa, Heterodera glycines
MEPLCPIHIINASEGEPFEYQSGTNETEDTDDLDAQINQTKRDELLEVHKKTMYKSTKFWEVFRDDYLLALREKEKAKNVDEQRKNWKKNGADFWTCNLIPARIPNLDAKVSTQRGSLKIQVGVGNILNGSGYLNTFEQKQNQFLEAELSQLGKPVKDQVSVFRGVSETHPFSDQFTHHFPNQEKSDIGTSLNLAERSEQRICDKAVNESGTIGRDGAIERVKKGTKEDGANGEKGDNDEI

SEQ ID NO: 145874 - protein, 380 aa, Heterodera glycines
MSKQLEEYGEQKSTSISTAKRLAEFLGADIVRSKGSLACSFVISRFPLGDSVSERTLPLAIFDAAPKERVKFLRKWTKANSLGEEFGSDKCLKESANAPASVVVRPMPTTPGSAGRKSRGASVHLTPWSLKKKQQHQQQSPLTPTAAATTASRRKRPLLATSVDGDEQQQQQCPDGASGNGVSSKRICASADVVVELLEDEEAENAENRRPPPAHQPTGPMDLVALDTLLEQQGHNQQPQTEQERRAEAVQKTAKMDKKKSAAQLKREAKRAAVLQHAGRAFPRRCYAAMSQPTKRSWHSDGFMPWALLERAMEAADDAQAAAGTDADSDAVRIGTSAGGGAVVHLSTATAAALSLARRESTWHILQVHNAHTQSKHYRT

SEQ ID NO: 145875 - protein, 76 aa, Heterodera glycines
MPTCAARTVPSVHQREGSGTARARAAERVEMGAHGAGAAVHADQPTDAGRAVQGVHHSVWGSIFTRKNGDGTKSRR

SEQ ID NO: 145876 - protein, 23 aa, Heterodera glycines
MQHFFNSFTFLKTKFKNAIIIII

SEQ ID NO: 145877 - protein, 126 aa, Heterodera glycines
MTQHFHCDTKSVFVRRFVCFQRTCSPGQDILDFGATLNAKCERADMNLSKAEIKCLIFVTGLGEMHRDLRPECLRQMENARKTTPPRDIKLELLLEECRSIQSLQHSAAALANPGQVHAIPSKPKI

SEQ ID NO: 145878 - protein, 62 aa, Heterodera glycines
MGGPVGIAAGSLVAGIAAAVGGAFAGLYGGRVLQRKVKQSTAVDSQQSVVVGNGAAQNANGR

SEQ ID NO: 145879 - protein, 105 aa, Heterodera glycines
MRCPRCSGPHPIGYPCFIQPLKDETSSGRRSERRMRQPNHHIDNNNNDDADNSVNDRGHDDDDGNEVEEEEQEDDDDANESKKAVRLCFFDAETSQDLPLQLRTK

SEQ ID NO: 145880 - protein, 46 aa, Heterodera glycines
FFLFLDILIVLIFVVFDSPNNNPLQSKSHVNFLNCLIIGGTLFGVH

SEQ ID NO: 145881 - protein, 221 aa, Heterodera glycines
MKRSNTTKDTPPQPKRSMASAPDSGPNTAALAEQERQRTLVLIGLPESNAVRPSQRVKEDREAVTKILDHLDVEAEPTAVFRLGRFNPQRTTPRPLKVVMPTPTHQHMALGGWKRERAQLRSQQNLARLFVRPALTKEQLKEENEARVRKRQQIPAPMAPAAQLPQTNVPTPVNENGSEQKEAANGYISKPQNPVEEEILLDKAISQMQSFRKQFPQLFNK

SEQ ID NO: 145882 - protein, 34 aa, Heterodera glycines
MVLIKIDAEILQMVYGPNSGAVAVARQRNSHNAQ

SEQ ID NO: 145883 - protein, 190 aa, Heterodera glycines
MIHLKTIFNYAKNGIAAKFGSGGRGFGRRFGRKWRKNGRDGRLETIREGTYGRDTAIEQNGERAGHGTVQRGGRRRGVTVRRNEMQRQEQSIGQSDFRLKAISGQCDFQWQPIGWDDVFQREIARGNSFVTSFGRIDEERAEKPQQSVRGRGGGRGRSANGGRGRRGNGAGRGWSRGASRNFDQGGRTDH

SEQ ID NO: 145884 - protein, 43 aa, Heterodera glycines
HSLRKRFSFSKSFFRYQICSFLLGMKRIMADQNKKYKKGIYQC

SEQ ID NO: 145885 - protein, 83 aa, Heterodera glycines
MNKPPPPVVRLLFCRCFLYFFTHFTSYFGSLYCSIAKLSLPFGNRPTKTFSLIALLTNLGTKMREKMPKQRQIMPKISRAMTE

SEQ ID NO: 145886 - protein, 223 aa, Heterodera glycines
NLKIFKSPQFSVFQIVADHLVELKKHLSPIAAQKGLSKLSFMPIFVKATSLALTKFPRLNASFDPSHEQLILKRFHNISLAIDTPDGLAVPNRFHNISLAIDTPDGLAVPNIKNCQKKTIWEIASDFEKLCSRAREGRLSLEDLSGGTFALSNVGSIGGTYMIGGTYMSPLLLPPQLVIGAIGSIRKIPRFDGNGNLVATHVVTFSWSAAHRVSVDIGRKFTF

SEQ ID NO: 145887 - protein, 51 aa, Heterodera glycines
VHRVRPHHGQNLVAGRLRALLHSDLNRSEIAESHRHCGKVQDAYTLRCVPQ

SEQ ID NO: 145888 - protein, 36 aa, Heterodera glycines
MIRRGTPEIRRGTTVIGRGTTVIRRGTTMIRREILE

SEQ ID NO: 145889 - protein, 126 aa, Heterodera glycines
MIRRGTTVIRRGTTMIRRGTIVIKRGTTEIKKGKTVIRRDTTVIRRGTTEIKKGTIVIRRGTTVIRRGTTEIRRGTTVIRRGTPEIRRGTTVIGRGTTVIRRGTTMIRRGTIVIKRGTTVIEEVQL

SEQ ID NO: 145890 - protein, 94 aa, Heterodera glycines
MGSFIDFGFAVKQQTKLDEEIFDHKGNYAYESDGEIWISGEGKGINAEYSYGAGDTVGIAINLSTRQIIFTKNGLRLGWFASVFHYSSDPWKMK

SEQ ID NO: 145891 - protein, 49 aa, Heterodera glycines
MFAEKLWFLEFRDSDPEVSGPVNRQSRATLLQISSVFNRFIVQLVNIRL

SEQ ID NO: 145892 - protein, 69 aa, Heterodera glycines
  unsure (1)..(69): unsure at all Xaa locations
LFEIKVPIPTFWHFLCPVLFSKIPVPNYSFFXNNLCIFKSDPSFFDPTEPCPPAQFKPSVAIVGNQRIF

SEQ ID NO: 145893 - protein, 56 aa, Heterodera glycines
MQNLQRVRRYQRELEDAEGRADQAESSLHLIRAKHRSSVVTNKSNSPKVYVLEDEQ

SEQ ID NO: 145894 - protein, 191 aa, Heterodera glycines
FQLAVIVGNNACFAHNIFSKLPKSVKAMVINSKMPKFLMLPGSGTSDSSQLTEKSNMGIPGEWLMRIDEEQIFLCGAGFRGIECVDSCLPTQCVDSCLPTQWHLDCSRQCHCADGSACNVVTGECPWHLDCSRQCHCADGSACNVVTGECPNGKCNPGKNGKIIVTVENFYIPIIFWVNHLICMNHKRNFK

SEQ ID NO: 145895 - protein, 44 aa, Heterodera glycines
MSPQLLHPAILSRLVLTPAILHPTVMSPTVLSPEQFISRFPFSV

SEQ ID NO: 145896 - protein, 104 aa, Heterodera glycines
MSKSFINIIIQFLFLLCLFYNFAKSFGEKSAPNPQQSPNFQQIPSDVLSVLSKDVAAQLEAIQNNGTLTVHEKAEQIDQIMTEQPSEVLDKIPDPPNFGTLPMN

SEQ ID NO: 145897 - protein, 56 aa, Heterodera glycines
LISSQKSCQLKTAKKAEFSKFFISIFFYSSKFSVIFSRLIEPVKSFRMISRLFDSV

SEQ ID NO: 145898 - protein, 38 aa, Heterodera glycines
MRWNMNCLILFKIAHNHNIFWQSPLGFFEKSFGYFSSD

SEQ ID NO: 145899 - protein, 27 aa, Heterodera glycines
YYFNRVIVTRVRPGPGSRPGFFLDPGP

SEQ ID NO: 145900 - protein, 20 aa, Heterodera glycines
CARGGTVHPPPRHRPPPSVV

SEQ ID NO: 145901 - protein, 234 aa, Heterodera glycines
MKYFMNIFICFIHFYECQTIEEDIFEELWKHINKVDHKFESESVLPKVKEEPIEIAKNGVPTIKTEPYELPMNYGKTVVKNEPCENEMPKTKNDQQIQREKTHLTNYGRIVKVKKEKFNAEEPLYKEEDNRDLKCENECYENSSTDTTDDNYEIEESANDDYDNSEDDADINNVPNEDSSLTDSEQEKRVHLTKKRLRGIFTKKDGPKNAKLFRAMSSTEEKVRLAQAKATKST

SEQ ID NO: 145902 - protein, 94 aa, Heterodera glycines
MGKSFYEEKKKEFIERFDEFKDLYAHGKQKEFVKELGISEVTFWKWKKELAPKYDKSKKRRTDEDELMKMKRYFEIKEANPKMSDELIPKKWEW

SEQ ID NO: 145903 - protein, 65 aa, Heterodera glycines
MYLDPALYFSWIQRSFAPPAGGKNIALNYKLHAFTIKVKINGLEKKPMLAYYSPVEAVCFKVEKS

SEQ ID NO: 145904 - protein, 199 aa, Heterodera glycines
MGNDPIDQMNGLNDQNILKSVQSYKKNETDQQKRETVKKFDAIKEKFREKGKYQRKDQSKIETKIAKLLGTNRKLIQKWKNELNLNKSKIKKRFYDAKKRKFIERIDEFIELNGQGKQKEFMKELGICEFTFQKWKKELLPKYYKSQKNHNNEDRLEKLKKYYEIKEKNPKMSDVIIAKELEISRNTLINWKKQLATTN

SEQ ID NO: 145905 - protein, 98 aa, Heterodera glycines
MQQQIENGQPLQPPLEAQQQGQQRSLLPSTADYEEHDDDLMRNNAEPINLISTKMLLWHFIFSIIFFVYKIESAKIRPNFDEIFGDGWDKDGSDQTVK

SEQ ID NO: 145906 - protein, 72 aa, Heterodera glycines
MTRLRHSGEEAGSKPKLAKMAVPTEVAMEADGCANGSGDGIANGCADGSGDGCAGENKSIKEIGTEIGDHMD

SEQ ID NO: 145907 - protein, 103 aa, Heterodera glycines
MFMTLNKHWAKRIGEAGPNAICHWAVSGCGMYVANIDDSISNNISSYDDDCTAERRPSIESRAEIVDAVEVGAGTRRGPFVLDAKSQAITRLLAAAEYKNGAF

SEQ ID NO: 145908 - protein, 176 aa, Heterodera glycines
MHFLFLSVFSLFLAKHCSNAIPIGAGNQRDVRRSMVIDLLNANQEFDQLRSQLATASANDLNAEDRVFGDLFKKIGNIAGNIGNYFDRKKPGNGEPLQPPQEPPQPGQGQWQPQPGQGQGQGEGQQYPGQGLQQPGQGQWQPQPGQGQQYPGQGLQQPGQGQWQQRSLLPSAADYE

SEQ ID NO: 145909 - protein, 49 aa, Heterodera glycines
FCLPLYTFIVLMQQFACILNLFGNSIDGSVRALPSLLSHVRPFFIVGAD

SEQ ID NO: 145910 - protein, 129 aa, Heterodera glycines
HKMPGFVPPVQSKCPKCGKSVYAAEKMVAGGYDWHKFCFKCEDWHKFCFKCELCNKLLESTNVAPHEAELYCTKCHARKYGPKGVGFGVGAGALTMDCGAKFGNQRVEMTLVLQYATSSCSKTAATTTT

SEQ ID NO: 145911 - protein, 84 aa, Heterodera glycines
MSQSGTTPVSAATRTTPGQMLDLYYTSLCQPAFPSITENPVNPLGMYPSHYLLEQYNQHLSQQQQQQGNNGGTSNASANGGGRF

SEQ ID NO: 145912 - protein, 269 aa, Heterodera glycines
MDFSLVPLAHKPELIDQCIDLLNEEWPRSQKARIVGLKRLLCTSPPMAYVFIENGSGELVGHLRLSPLGMGSARECWIESVVIRKGIRGQGIGRKMMEMVETEARLNQIMERFVRIYASPISKKNGTRKTHRAKLNVSFTSGSTVSTRFDSRMTVKTPTPISKRQICCSTTDKIDFYRRCGYKQSDRPIQNCGSSAPLLERFGLTSLLRNIEQNDELSIKQTGTTTPTECQAKKQSDPAKNVPIPPAPPLFFSGPHKITKKTFVFKQLE

SEQ ID NO: 145913 - protein, 50 aa, Heterodera glycines
MKIKPQFTKKVASAHCRLLALFGIRDPCSTSRKTASPKRCGRLSEKGVFN

SEQ ID NO: 145914 - protein, 50 aa, Heterodera glycines
SRPHRFGEAVLRLVEQGSRIPNSASSRHRKSLLVREDLVLDWRPVNEALH

SEQ ID NO: 145915 - protein, 71 aa, Heterodera glycines
EKIDFFVFGAVPPNRCAQIYGETESFGNSFPIACTLILRWIFAPHKCLSTPNGHLKKSIFLFHKYFFQKVL

SEQ ID NO: 145916 - protein, 64 aa, Heterodera glycines
SIPSFMRHQLHSFLVLPNCLKCIPKNALKMIKPVFSRISCQYFPIRNDTVNSFASLIHSCFASD

SEQ ID NO: 145917 - protein, 95 aa, Heterodera glycines
  unsure (1)..(95): unsure at all Xaa locations
IIFIQKIFFWVFGAVPLNRCAQIYGETESFGNSFPIVCTLILRWIFAPHNCLSTPNGHLKKLIFLFSGQSPRTDAPRFMGRRNPSGIASXIAXYF

SEQ ID NO: 145918 - protein, 42 aa, Heterodera glycines
MDNCCIGRVREGSQRVRTASNISFILGVILPHCTSFVGLITQ

SEQ ID NO: 145919 - protein, 24 aa, Heterodera glycines
RTLSTAVRQRSSKIYSMPQILWAG

SEQ ID NO: 145920 - protein, 42 aa, Heterodera glycines
KFIIFINNREGVRYSKHGNSVLCLLLNNEKIQLQKIIFNCPS

SEQ ID NO: 145921 - protein, 85 aa, Heterodera glycines
MGSDSPAARNYAYTYIINQRLKLPKIEVIPLPPADQIHPADLNAMNVLRQNLYIEKNGEQLGCTVHWVPKKLANEQLLTMVRVKF

SEQ ID NO: 145922 - protein, 249 aa, Heterodera glycines
LLASVAKRRYYSRLVKTDSFSRNNSVSAQACAWAAKATEQVVMTQRWPGIRASRTWEEPSRRWTQLRGQCTGTHTSTPDFPVRTLPQAKGLRSLMSRVFSNASTLVPRQGVPIHELIGLVNHGNTPLTRIPTPPPTLGSASPVLSSPQHLCLRQHLHKSINSPNFFNTQTSCMFYSFRQLPIAGETEATTKVAPQQQPSPFNAEHKRKQALKPRRPRSPQRNRFFFPATISQKRPNHHTHPRQLTNAKH

SEQ ID NO: 145923 - protein, 38 aa, Heterodera glycines
MREWEKREFLSATSSVNFIICFTSFCIATRPRSGRKLL

SEQ ID NO: 145924 - protein, 69 aa, Heterodera glycines
MDPIQARPSNYDDSELISLIQFHSIDIILLTLLAAADLCTSLGIFVLGLMRKALYEQVMETSRIPIEVW

SEQ ID NO: 145925 - protein, 138 aa, Heterodera glycines
MAMLSINNNNPSDELQSARQNRSAHGTLSAEGAGAAEAIQSLNELGKDDEERDELGNNNGNRQMMDGGGGGGLSQEEDLNEFNLYYSMAEDGARLDYFQFAYEGVSESDEPDSVTCSRRNSQESEEEKGWNGRVMDTV

SEQ ID NO: 145926 - protein, 185 aa, Heterodera glycines
MLNALPLPSNREHVEKAAAAGPGRWSPVPKRARTVEENMALIESRWQYLEELRLEREETAKKEGEKGEEDGDNLFRLDLSEVAATDENGNSEEQQRQMAEERMDDEENGVSGDNDKNANNTDNNNNNEDGFPMECVDGMGAGVLLDSLFEALSRLTEHTFATNLQLIGAFNELFAYSQPLLTTYL

SEQ ID NO: 145927 - protein, 18 aa, Heterodera glycines
WRKKRMRRLKRKRRQAKK

SEQ ID NO: 145928 - protein, 91 aa, Heterodera glycines
MAGKCFMPNESAKTGGISLRFSADCSVSPCLMRAVLRGSTNSPAADEACLVEKDGAKKCAFNVGQSFDAVAVSCNGCPSQKVLKCAEYMAR

SEQ ID NO: 145929 - protein, 24 aa, Heterodera glycines
RTLSTAVRQRSSKIYSMPQILWAG

SEQ ID NO: 145930 - protein, 16 aa, Heterodera glycines
EAIPEGFGLPINLGAS

SEQ ID NO: 145931 - protein, 30 aa, Heterodera glycines
MIIICLVKFLCKFGEYFCFDWFHFFSYKFD

SEQ ID NO: 145932 - protein, 154 aa, Heterodera glycines
MQLAFTIISTRTEFNENSKLEVTLANADRIGKALLGISEPIEHKFLEYLKISKIFLLADSLGADETALIEAECKNLEKFITNFVPIRASSAEETNKIGKNNLKFYVHFFKEMQQLLDSIKHIVKSGLKELWKKLIAFVEKFEEKLETFAKSTKN

SEQ ID NO: 145933 - protein, 282 aa, Heterodera glycines
MQKPIPSNRPNSSVSKTLACGLEKMVNASGNEPLTVPVLADRSDPLGLKSVQPDPVPMESAEAGTKEMEVMEVDEMSGEKGKKGEMGKEKVKSGGIEEEEESEGSEGELLGDGGFGNLQLNPSLRAGNKAVEKEDKGKPYLVAQVRSDGVIAARMKLFWDFPELVFVPFSLFDNAQPIEIGDLFRLHKCEWTNSGTGWEERGDWLYEATGRLNYQATATDVSQLRQRIPTQAVGILVDVQRARDRHVKVAMVSAPELSCVMRAYRRHFPADFTDNDIRYRSV

SEQ ID NO: 145934 - protein, 71 aa, Heterodera glycines
MIYFRALLEPGVRSLPYRPLREDNGVAVGLRAGPFERIDDPLNFAIRLEDGVDVAICVQIFVIKMSISGLG

SEQ ID NO: 145935 - protein, 25 aa, Heterodera glycines
SKWGIEPRRKIMKGRKLTTTPHVHV

SEQ ID NO: 145936 - protein, 20 aa, Heterodera glycines
KKTRLFTIGQKWVVKCVFSP

SEQ ID NO: 145937 - protein, 16 aa, Heterodera glycines
MQKFNYFNEKRFNVVK

SEQ ID NO: 145938 - protein, 142 aa, Heterodera glycines
CEFKNSTNKCNGRIWTDLHDQFIRLATPHTCPADASRVDAQMVTTAIKRRAIATFEPPSVIRAEALQNVPSPSAILVSKQAAKDLIKRARREVNAPPVVPANLEQLIISPAYQTYTPTDGIDEEFLLGDSGVYYERGNENPQ

SEQ ID NO: 145939 - protein, 43 aa, Heterodera glycines
CFAVPRTGRQWMALNLQEIRLAISGCKKLLGNELFFEVSQTPY

SEQ ID NO: 145940 - protein, 53 aa, Heterodera glycines
LIEDTGLSNDTNNVQLVEKEKRYSPGSKFLKPNLFGMIKLGLFKLGRDREVPH

SEQ ID NO: 145941 - protein, 747 aa, Heterodera glycines
MYPDIRPKAKPAPAEINAMAIPQPTHKISDLESLTKALQTDFSEVFGPGLGHCTKAKAHLILKSDAHPTFCKARPVPHGALNAVNEELDRLLQIGAIKPIEFSHWAAPILAVMKKNGKTRPELLFLGHVISAKGIRPDPGRSEAIRQMPPPHDLSTLRSFLGALNYYGRFIKSMREIREPLDQLLRKDVKWEWTDEQQNAFQKAKEIMLSDLLLTHFDPSLPIVVAADASKDGIGATISHIFTDKSEKVIEHASCTLNDAQKNYSQIKKEALALVFAVQKFHRMLFGRKFTLLTDHKPLLAIFGSKKGIPIYAASRLQRWALIMSNYEFNIKYINTSSFGQADVLSRIIANYPRPEEDILIANICTETDCYIKTILQTATDQLPITKAEISEWTPKDDVLRKISDHTKNGWPQKCTDPDLSPYFPKRKEILEIDGCLLYGKRVIVPTKLRERIIKALHMAHPGIVRMKALARQHVYWPGLDLEIERMVRQCEDCQSAQKSPPKAPLAPWTSCSRPFQRIHIDFAGPCSDGHSYLILIDSFSKWPEVYRMDRISTPATLQVLRSIVYRLGFPEEIVSDNGTQFHAAEFEEFCSEFGIKHTFTPPYHPQSNGQAERFVDTFKRAMKKCAKDGKFWAEKMLLAYRTTPNSALNGLSPDQLFFGRRLRTQLSLLHPKEEQAEVIDPAKIRKSQADYARKMARQFDQHHGSKSVEFLTKDPVLLLNFNRGKRFWLNGTIIKRLEKSPTYRVH

SEQ ID NO: 145942 - protein, 217 aa, Heterodera glycines
  unsure (1)..(217): unsure at all Xaa locations
MDQIVSGIPGAFAYLDDGIIASKTLEEHIFSLYKLXKRIQEFGLKIQLEKCKFLQPELLFLGHVISAKGIRPDPGRSEAIRQMPPPHDLSTLRSFLGALNYYGRFIKSMREIREPLDQLLRKDVKWEWTDEQQNAFQKAKEIMLSDLLLTHFDPSLPIVVAADASKDGIGATISHIFTDKSEKVIEHASCTLNDAQKNYSQIKKEALALVFAVQKFH

SEQ ID NO: 145943 - protein, 72 aa, Heterodera glycines
MTWDNPLTTAQAKKGNYGERTKSADSPAPNNWSPDSPKPSKQKTEAPLVALSDSGIAIRTNVLRERGEWALC

SEQ ID NO: 145944 - protein, 21 aa, Heterodera glycines
QLHGVRHLNVQQTALVPVRLP

SEQ ID NO: 145945 - protein, 79 aa, Heterodera glycines
GNFLNLYSIPEKWLSLFFEKFYTSQKRLRMRRRAVHNRHFISQRIFIFRGYPRKMAISFFDKFYTHTNALEHDREGGAQ

SEQ ID NO: 145946 - protein, 33 aa, Heterodera glycines; identical to SEQ ID NO: 136332

SEQ ID NO: 145947 - protein, 111 aa, Heterodera glycines
MLSMLTIVVCPPSLFLLLLHLFPSSRRHKEEEQLQQQQKTTATIEANECQTEGRENGGMEAKLPKIVAQNIDGEEEAVLPIESDNDDDEEAEQKEDNSFAKKEVGNCMPMG

SEQ ID NO: 145948 - protein, 102 aa, Heterodera glycines
MAIDSKDLSAEERFQFSMRKLEFLEELGNDAGSVTPQQLVPQQQQHHQRLNNNNILINSNNIKMEHDDVLNGMNSIKVENDYVGIGGTTSIKVRKRRHSASR

SEQ ID NO: 145949 - protein, 19 aa, Heterodera glycines
MAKTNSKEMPGKKLKFFQF

SEQ ID NO: 145950 - protein, 130 aa, Heterodera glycines
MSFQQIFSTSAVLFGLVFITSTLSAPAPKPQNQQQHPAEKQPFNAYLNPGFDKRSFDSFTGPGFTGLDKRAAFDTGFTNYDKRAFDSFTGPGFTGLDKRFEPFDGYGFNGFEKRSFDSFTGPGFTGMDRK

SEQ ID NO: 145951 - protein, 64 aa, Heterodera glycines
MVVLSVYTVSIYMCLSLLRSNSCNDMKKTELSKISLSMSFELKMKGANGNLFILKSVRKRKRAA

SEQ ID NO: 145952 - protein, 33 aa, Heterodera glycines
MFHLRFVVLLLLVIVGLFIGPNFVSADCDKKVA

SEQ ID NO: 145953 - protein, 82 aa, Heterodera glycines
MDKCLNRKDVLMCRELADEAKGAFEIVKQYRLDAGTAYRNAYTQSDLGIGELAEKVKETMKEYLSRPGLSSRPTFNDEFISA

SEQ ID NO: 145954 - protein, 62 aa, Heterodera glycines
PYIWLYRFAFGGFAWNSGIMRTRPIWQVKQRLLTSQKVRCRDETNQHCLPRGTRHGPPKEWI

SEQ ID NO: 145955 - protein, 42 aa, Heterodera glycines
MFLDEQPIAQSIHNAFTDWQRFVWQMLSVQKGGGRCPNGVEE

SEQ ID NO: 145956 - protein, 64 aa, Heterodera glycines
MPPFGAFSHLLFFFLLFLLFVVPTTVPSILRLFLRFFIFKFVVRFLCRPRLLLFQFFIVFVRVC

SEQ ID NO: 145957 - protein, 136 aa, Heterodera glycines
MLTLNEFARWTGLTLFEMDLHSAALFLTSLLFQFPSFSIPGQNSRFLIVPSWSVFNLICLLRLITSSSCSDLSAPLSSLLSDSLPILNAAGSGFSSSSAAEGGELEDEGRLFGWVGEANGGENWADQSLLNDAKGT

SEQ ID NO: 145958 - protein, 18 aa, Heterodera glycines
SDGLGRVSSGRRNSLSCC

SEQ ID NO: 145959 - protein, 165 aa, Heterodera glycines
MTLCDRQKGNGGDGFQLLADSLLTYNENNEKLKKKKPRTTQKTNDEFENKKAQKEAENGRNGGGHDEQQEEEEEEEEIQRLRRVHRIFTWGHNIPRPISDFASLPLPDKFRANLRDFIQPTPVQMQGIPIGLLHRDHLITAPTGLCSNFAFQMLNFYFIMAFNSM

SEQ ID NO: 145960 - protein, 153 aa, Heterodera glycines
RKKQKPVKCRMFGYVPFASFSNDWSAQFSPPFASPTQPKSRPSSSNSPPSAAEEDENPLPAAFRIGNESESSDESGAERSEHEEEVIRRSKQIRNRERWELLKYKMLISSCCTPSKNPSKNDNELPANCKHETAEEEEQWDEEREREFVFSLL

SEQ ID NO: 145961 - protein, 99 aa, Heterodera glycines
  unsure (1)..(99): unsure at all Xaa locations
LSRHFLFSLTILHLFAPLFVASALNFYFLVIIFVRTVIEDGSPKRAIAGNALHFFRVTMVALFEMILXHKLQDEFERGNQQKSIETTYFMIMMPLWALL

SEQ ID NO: 145962 - protein, 265 aa, Heterodera glycines
IEPTKILAKQVGPYLSSSGDILVTTPNRFIFALEKLSDDGQMENLQWLLLDECDRMFEEGEASFRVQLSKILRLCNGKETLSKILRLCNGKETRRGFYSATFSYEVEEWCKEHLEEVVMACIGPRNSANELVKQELLFVGWEQAKVSAVRDIVRRGFDPPALLFLQSKDRAKQLFVELSESCNSIPIGLISGELTEEECEVTIGRFRSGCEVTIGRFRSGKIWLLICTEMMGRGIDFQEVNMVINFDLVINYPSLTLPFLCFSSQ

SEQ ID NO: 145963 - protein, 49 aa, Heterodera glycines
MPWPSSDLQISWSSEYINSTYNAPGVQSPVIDSLINQIIAAQGNKEKLL

SEQ ID NO: 145964 - protein, 46 aa, Heterodera glycines
MRSTVSSSMALLFLLRLPASSKMRRTSEAQNMLSSTSTTSLVKRDN

SEQ ID NO: 145965 - protein, 76 aa, Heterodera glycines
MPDLVHSGAEVISIQSTSEDCERQSNGSKWKIMKIFHETISVKKETQFGVINAHSHHRNVSFIELTQNQHQTQFGD

SEQ ID NO: 145966 - protein, 108 aa, Heterodera glycines
MSDNRNEAEEKMAKAIFISADCWLCVYDLLPASQLGLGIAMISHRFDFYVDEHFKTRRWNLGSMKIKMKFEADGTKEMDVVNANLESFGIAQKPLPKRVVGFKAISLK

SEQ ID NO: 145967 - protein, 38 aa, Heterodera glycines
SGSAMCEFVKPTKRHLAKYTHSQYPAAKSFHWHSAHFA

SEQ ID NO: 145968 - protein, 157 aa, Heterodera glycines
MLYMSQYSLHDFNIDFVLFLQNFKYHVEFMKVEEEREELRLWMDPMRNIEYLIRDFKNNLQENSDAKSQAYMLIVRKTQNDLNFNTNLIMSHPFKALSDQQLLIELIREHKNSGIRTENKTITQQQGQVERRQFEKAQSQRPIRPLKIVFRFVINAM

SEQ ID NO: 145969 - protein, 164 aa, Heterodera glycines
DLTTSAEMQPIALDNNNSNNNMNPQISSSASSSRRRNNANAGRGRGRGGGTRRRANARQQTQSERIQSSQPQTVQILSPSVVQHGQGLTREQCDSILPNLEVNEAMVRNDERCVICQIGFDLGSLNATELPCKHLYHLSCARDWLMHQNRCAICMRRFVLDSDA

SEQ ID NO: 145970 - protein, 75 aa, Heterodera glycines
MSTIGVDEIFKLSQKDHQPPEKRSKLSDGSTQIVPSVAAAKNGGDILEALEKSEDTSELNEIDEASVKRICFQVQ

SEQ ID NO: 145971 - protein, 86 aa, Heterodera glycines
MNITELINGLCVKGAGCVNSMNFVFFLFIFMAQVCIFWAILLNVPARLRCIERLRPRRPPVSNNDEGHPRTLRFLVRREADEAVEN

SEQ ID NO: 145972 - protein, 60 aa, Heterodera glycines
QINENVVKEAVDSIEEYEDNSAYIEVAKKCNEIVHWEDLYTKKCAKNKQPIPLGFLREKV

SEQ ID NO: 145973 - protein, 111 aa, Heterodera glycines
VKIKYTDEAKRKCCWVMLAICIICVSLRFYFIKSEKNFPLPQPFVTLFMLTFMSMILLLSTNLKILSFLSFLPPEVLLIVVILAGLSSQTASVVSLMLCFHKSYFGKIFGH

SEQ ID NO: 145974 - protein, 126 aa, Heterodera glycines
  unsure (1)..(126): unsure at all Xaa locations
GSNTHLFVXTADMXKSNEVHLLFVDGIEWGMGNSACHLIPTSXDIVFCPNWGRDIRKSITKFQIQYVGHHFYKTFVWHRRIVNKPHLFVLFYLKCQSPLLFRSLFRLILTIGIRVCRCPVPVGSAR

SEQ ID NO: 145975 - protein, 80 aa, Heterodera glycines
MPSNGANEPKMWAREGIDALNGTVQLQSPPGYGSFPFLDGRRFQRENGSKIWYFVYAVEPMTDKAKDGLPKQSLTKCLSE

SEQ ID NO: 145976 - protein, 16 aa, Heterodera glycines
MAIVHSPPSLRKRFCE

SEQ ID NO: 145977 - protein, 97 aa, Heterodera glycines; identical to SEQ ID NO: 143380

SEQ ID NO: 145978 - protein, 278 aa, Heterodera glycines
MKECFADGTFSITPKPFQQVYAILARRNRWVMPVCYCMLSNKTHTTYERMFRMLVAVWPDFNPYSVSMDFETAAITALNVVFPFTERYQNDPTFAEMARCVTSLAFLPIGDLTPGIIALDMALPDELTPVLDWFIMNYTGRLKHDVSRTRPRFDPNIWSVYTRTLQGDDRTNNHSEAANRRLQCAFACSHPSIWHFIYLLRKDQKLSDDDFAKCSTGQEPPQKAKKYREADRRILTMVQNYLPLNNVDTNIFPIHQPFNHHFIIAFLIGISRNYEMRP

SEQ ID NO: 145979 - protein, 89 aa, Heterodera glycines
MIPLPEFAEHRQRLPLPLPSPENQWSPTYDVAAILTSIQSLLDEPNPNSPANSLAAQLYQENRREYEKRVQAIVEQASLGPTWEFSHEV

SEQ ID NO: 145980 - protein, 229 aa, Heterodera glycines
PPPPLSMYAWGLYFSTARLKRRVSFNGTAGGGGLYYRNISIKHIISFSTASVILCFSLLIGGIMGLVFRQKVRIQTPLHLKMNTSLKELYGLSDMTAITLAWDSLQREFRCCGVNGTEDFTIWRTSKWHMHHREPKPAFPQSCCVPERLAECMTNFTGSEAAAFYTNTCYMPFRTDLLSVVHVAAWLSISCSFYLLVPAFFATFFAKLVKKYLLVPAFFATFFAKLVKK

SEQ ID NO: 145981 - protein, 91 aa, Heterodera glycines
MYHDWGNAGFGSRWCMCHLEVRQMVKSSVPLTPQHRNSRCKLSQANVIAVMSDKPYNSFNDVFIFKCRGVWTNLIVKQPFIFNFCIGIDVY

SEQ ID NO: 145982 - protein, 27 aa, Heterodera glycines
MDVQKNFIKLIEYFMNKKGHENHENDL

SEQ ID NO: 145983 - protein, 49 aa, Heterodera glycines
MVFMLWILLNFVTDFLNMADIVMQTRREYFVDGILIRNAKLTQKRYILR

SEQ ID NO: 145984 - protein, 75 aa, Heterodera glycines
MIGRAVRNRPFIFQGIFKFILYPRKMAISFFEKFYTSQKRLRMRRRAVHNRHFISQRIFIFRGYPRKMAISFFDK

SEQ ID NO: 145985 - protein, 67 aa, Heterodera glycines
NGYLFFENFYTSQKRLRMRRRAVHNRHFISQRIFIFRGYPRKMAISFFDKFYTHTNALEHDREGGAQ

SEQ ID NO: 145986 - protein, 59 aa, Heterodera glycines
SKPRKKWSSKNRNYAQKASQTILTLPIPSTIAFIHPIMSAKIIRVPKIACDLSLEKNGL

SEQ ID NO: 145987 - protein, 16 aa, Heterodera glycines
MLVCIPAKFGALLISF

SEQ ID NO: 145988 - protein, 262 aa, Heterodera glycines
MYRPSQTPRLTLSSARVGVARLNTKMDTLSGALPPHRLSKESMKVVVFHWRLAAPTYATPLMILHKVRLESSSTGSSFPAKFAKPVPLAVVSLDSRRDSGNLVDPFVRVGKPTRHLATLRESCYSPVYPRLIKFPWLNIQSTGQKSDTVNVHKDHPSPLFLDSRIPRVRASSKLVVQRQPKCIPRAYTQLKRSTSSSHHSTHHPRKNSTQPRAKAACFTQQPGPDLSQFFSRSYESNLPTSLTYIILSTRGCSPWRPAADIG

SEQ ID NO: 145989 - protein, 724 aa, Heterodera glycines
MLEEANKNGTQVTLKQIEEELRTIQLVKDSALTLANPPVATHAIHTRPQQWRDPKGKTPQQPKRANNAKEQPARPPNTNYGKASRGSPTHPCGSCGESDHWRTDCRFKDATCHKCQGQGHIAKACRRSSNQAKNRRERSVHTVVVKSHCMGIGTAAGRWWRLTFIINGIKILMNIDTGAQATILTLKTWKKLGSPKLDKPDIETRNCNEVPFNIEGKFVCDVCQPNQAPKKLVAYVSSEINYDLFGLPWIEALEVIPREIMHPDIHPKAQPAPAEINAMAIPQPTHKILDLESLTKALQADFSDVFGPGLGHCTKAKAHLILKPDAHPIFCKARPVPHGALNAVNEELDRLLQIGAIKPIEFSHWAAPILAVMKKNGKTRVCIDFSTGLNNSLELNRHPLPRPEDIYTAISGSVYFSNLDLRDAYLQMELDEESKHLCGINTHRGLFQCQRLPFGVKSAPSIFQHLMDQIVSGIPGAFAYLDDGIIASKTLEEHICFLYKLFKRIQEFGLKIQLEKCKFLQPELLFLGHVISAKGIRPDPGRSEAIRQMPPPHDLSTLRSFLGALNYYGRFIKSMREIREPLDQLLRKDVKWEWTDEQQTAFQKAKEIMLSDLLLTHFDPSLPIVVAADASKDGIGTTISHIFPDKSEKVIEHASCTLNDAQKNYSQIEKEALALVFAAPKIPPNAIWSEIYSSHGPQAIVGDFWLQKGNTDLCGESSSRWALI

SEQ ID NO: 145990 - protein, 517 aa, Heterodera glycines
MSNFEFDIKYINTSSFGQADVLSRLIANYPRPEEDILITNICTETDCYINTILQTATDQLPITKAEISEWTPKDEVLRKISDHTKNGWPQKCTDPDISHYFPKRKEILEIDGVLLYGKRVIVPTQLRERIIKALHMAHPGIVRMKALARQHVYWPGLDLEIERMVRQCEDCQSAQKSPPKAPLAPWTSCSRPFQRIHIDFAGPCSDGHSYLILIDSFSKWPEVYRMDRISTPATLQVLRSIVYRLGFPEEIVSDNATQFHAAEFKEFCSEFGIKHTFTPPYHPQSNGQAERFVDTFKRAMKKCAKDGKFWAEKMLLAYRTTPNSALNGLSPDQLFFGRRLRTQLSLVHPKEEQAEVINPAKIRKSQADYARKMARQFDQHHGSKSVEFLPKDPVLLLNFNRGKRFWLNGTIIERLEKSPTYRVHVPALGRNVHRHANQLRRRYPLEEDGNDTVRIPPQAQEEQDWTHRRSASLLRNRHQFDGLRQSDDLRVLLWPRVDRNANGKRRSASRQTPEGSA

SEQ ID NO: 145991 - protein, 150 aa, Heterodera glycines
MFPLFTQLPFPSLLLFLSNFPSFAISFRLQGVGVKGVLLCNGAFAAHTNLAIFDVDRNPGDSDDLLDKGHTDGKGRFVLDGTTRELSQIEPELRIIHDCADDIKPCHRLFVIKVPPEFIHSGRAQKIFDIGTLDLEKKREDEQRTCQNNF

SEQ ID NO: 145992 - protein, 103 aa, Heterodera glycines
MPKFCPRFLEWLNLNKLDQILRLRCKTFSCCDYEPFDQLDVQFNLKHLQTEIMDKANGTIFSDELLHLLFNGNPHIKAFSTRWVINCGDDFTDRLIEVEIQIN

SEQ ID NO: 145993 - protein, 193 aa, Heterodera glycines
MDTQQGYETDVGEKGGQMSGEREHSEDIPNFAVTGGQKQRIAIARALVREPAVLLLDEATSALDSESEHLVQEAIQKNLKGRTVLLIAHRLSTVENADKIVVVSAGRVVQQGVHRELIAQEGLYKQLVQRQMLGAEVNDDFPVRPAPMPQSRQSQRRGSRARSKSKTIRSDSPSQQSVTAQSFLGSSLASSYL

SEQ ID NO: 145994 - protein, 325 aa, Heterodera glycines
MSNTLSLYMNVFWSVCLCCLITPMDHFSRNIVMLFGSLIFMFSLSWRLSVITFIAVPIIFLISKVFGVYYDRIAEENQHSVANSNDVAEEVLSSIRTVKSFACERSSKWESSRWYSSTEDIWSSKERFVHAVMNFMSFSETDATQIWHCVIRKSCQWPLINQPLFLIRSARDCSSPLCSTNSNWAKTSEFNSEQKKGSEELIIKELGEVWNGLMQAVGASRKVFELIDRRPLVQNDGRIAPDGRNAKIEGRIEFRKVRFRYPTRPNVPVLNVSGGQLPTHLITSLEDLSFTVEPGQAVALVGPSGSGKSSCIGLIEHFYEPDSGE

SEQ ID NO: 145995 - protein, 105 aa, Heterodera glycines
MSRQAKQQAKPRACPGEYQEDDSTMASKNGKRTSGEKQQKEEAADLRKSDQTKESGRKVSSKRKKKSDRSDRAKKSNVSVRPFPPHPKYSPPSTSQFSVVRQSSE

SEQ ID NO: 145996 - protein, 248 aa, Heterodera glycines
ESSSWYSPGQALGLACCFACLDILVNVLGLAWDGRFFTIDNIYHWFDFVLGLAWDGRFFTIDNIYHWFDFRYYNFTLNPVDFLAVAILRVCVLLAVAILRVCVLLGGALGVYFNPKGGAEACATFSNLTFAFVLVIVAFSPIKLLAFYEHEEMQFAVGDWILMVWCIVAALFVQGIWVTVFAKVRESMVTRGGIWVTVFAKVRESMVTRGDVLEQVDNEYFAEMQKRESEMDAQKRETMAMLWRLFGY

SEQ ID NO: 145997 - protein, 191 aa, Heterodera glycines
MNSSKKFFVLILVLALIAEPFVVCKRSGTYGRISSALGRNSGSNYPIGGYGRDRGGGITGRLFGHKNRHNYGGYDRYGTGKYGGKGAGLLGGGGRGAVGRGVAGGGLLGGLSRSRHRGLGGGGGGYKTSMFRNSGMGSRSRSNTFKNMIVGAAAGFLAYKAGKAIIRNVAAPMMWNNRQYYWGNKQLALPH

SEQ ID NO: 145998 - protein, 97 aa, Heterodera glycines
MKPLKIDVDFPSNSHPTSQELNQDCIPLYEMLEFEELQFPNYYLSEQLGRGAHATVMPCHFHGKPAAAKLFNANVDFKTIQKEAKLLHEFRHENIIE

SEQ ID NO: 145999 - protein, 332 aa, Heterodera glycines
MLSKVCFPKCLLLLLFSCIIGNKFSLCDQILSPQTTEEKDYSECGISVFDPFNERSEENTEISHVFKGQTVDDDRALPWMATLLRRPFEIVQNATVYEPFCTATIVGPRHILTALHCVADINLFADNYKILFGAVQSSKQTHKLRIKRVHYHENATYLVLNDKLNPASGVYGEIVHPDFALIESVEPIQFSSRVRPICLFGIGSSNLKYSFSEKISAQHFNNSRPFVVAGWCYTEPICSKGTHRTSDQLMYGTMRMVSKDACPLAYGNGDSGSPLLSKIGDKNWVQVGVLYGGGGCSEKHPFSTSRRHSLYTPIDCDWISRVTNDEVKCKGW

SEQ ID NO: 146000 - protein, 209 aa, Heterodera glycines
MLFIGIDRMLGIVFGEMHSKCKIRLYLATITIICSALNFSFCITIYQSIELNGDQMITGTYADFFMGSSLYSILWLFLIIITIFIYLFVGLIIRIKSAGLPSADQINYRTFRSLFCIIVVNVGGYCTNLIYLILIKPSIASPITAWFGLVISGISLNIGAASNAPILCFTSTEYRQAFQTAFPFVFKRFSNANQVIPLQNGHPLGTTQY

SEQ ID NO: 146001 - protein, 24 aa, Heterodera glycines
MANLMEDFKKGTKCQEIKQRMAKC

SEQ ID NO: 146002 - protein, 365 aa, Heterodera glycines
MMKAKELKGRLEKYQVTLQSFELEIIYRPGKKNKVADFLSRYNIPGNEKDPEPKQEENSDEFDLQPKILSAKNINENLIAENDGILNENPKITLKTVIEAQTKVKELAKIFYILKTGKCPNDVLKWKRVVSDYSLINGAIYFIKGKENMERPKLIIPHSLRQKLFIIFHSEGHFGFEKTWHEIKERFYWIGMKDDVKLLIEACEKCQVRKIQPGQAKSAPSVPIEPSNGPFQRIHCDLMGPLKKTERGNLYIFLAIDSFSKWVMAKAIPDQKANTVSEIFVEIVVHQHSTPEIVVTDQGRQFTSGIFNDLAKIYGFEHVTTTPYHQQSNGMAEGAMRIMANIISQMVNEKGNNWDEILPHAIFYH

SEQ ID NO: 146003 - protein, 18 aa, Heterodera glycines
MRTRPIWQVKQRLLTSQK

SEQ ID NO: 146004 - protein, 47 aa, Heterodera glycines
PSNPIVISDITSDVFEAMLNFIYTDNLCAVNGENVAEMLYAGKIKFK

SEQ ID NO: 146005 - protein, 106 aa, Heterodera glycines
MCQLLAVRCCWHLLTCIKQITAGPRLIEHSRGIKWRLKLFARNKIGRNGHIQPKLWHTVGKHNLCTGGHLHIEKADISMDGEKLTYYRKSSHHLDYSTHPSTNSIV

SEQ ID NO: 146006 - protein, 198 aa, Heterodera glycines
MARQTSARVIKRLRRDENAPRTEPLNLEQLEIPNTYRIYKRTEIDKKHFLLADTGVFQIQGQNGPQRFLDNYMGRMRFNVPMAAPLFHPHEWNVHQRTLDGADRTNNFAEAFHRKLQRQFSCTHPTIWRFIDTIRCEQKAIDADISRCVMGESAPQKKKKYREADARILRLVHRYNDINNQGFFFYVNTCFFPGFSIA

SEQ ID NO: 146007 - protein, 46 aa, Heterodera glycines
MNAEHVECQRLVTGLKRRAAEMCEAPATISCSSAAKNMHTCASSFP

SEQ ID NO: 146008 - protein, 51 aa, Heterodera glycines
QNQNMKFETYFSFGPRLKNPRLFPRRSNNIVNDKYLVNISKDMVPPAKGVG

SEQ ID NO: 146009 - protein, 114 aa, Heterodera glycines
MNGQLQQRIRHSGVAGTTNNAALTTLSMALCRSQQQPAVPPPPPEFFIDHRTTTLLNGGNGSSTLSSTTVAITSSNGGCHANGTAVVSAAQQLAPSNVTTPALLLKAYEAAVCD

SEQ ID NO: 146010 - protein, 150 aa, Heterodera glycines
MNRRWICGDVWMDILPSFDHAQLGLKMALISDRFDALVDTHFDAKTTEFRIWREIRIRKDNGTKAKLSVRIDGNFVDFPLPDHPLPNIIRIKDLQIYYIDHSVIAFLRANKHDLGQNGHRFGVVYFKCPSRFGMFLSEKFGQFLRQTFAV

SEQ ID NO: 146011 - protein, 70 aa, Heterodera glycines
MHPTGPVVVVYEAPPQQQTSPDNATQRETKQPKETGKNGNEIVDMLRSSIVKMCVKQKDEKRRRTPTIDE

SEQ ID NO: 146012 - protein, 107 aa, Heterodera glycines
MFKKALAGEGSWLDGRVRLQRFEQIFNGRTSPGNCRIGGHLEVTFGEHLTDKLRKAHPLTRHKRSKSFGHVAIVGAIKVQEKPMGQFNVKADADLIFLLKSEKYSDD

SEQ ID NO: 146013 - protein, 23 aa, Heterodera glycines
MNNFGVGQKDSQRQQIGRVSVLI

SEQ ID NO: 146014 - protein, 89 aa, Heterodera glycines
IVPKMNNVLAFSADYLPELVAQRLKERLGIKMPKNKNQQKTKRILAEPIKGTEAKGARTFKKLTKVLAEASKGSHSIASLFGSNKTDKK

SEQ ID NO: 146015 - protein, 18 aa, Heterodera glycines
PYRDRDLSFSKPGTGNRD

SEQ ID NO: 146016 - protein, 26 aa, Heterodera glycines
LTHRPLRRKNQLNCTWSPKLNRRVLL

SEQ ID NO: 146017 - protein, 42 aa, Heterodera glycines
GTTTITKCMTGRFESCGSITNGAAYGYRPAHFTVSRRICATA

SEQ ID NO: 146018 - protein, 77 aa, Heterodera glycines
IFKFILYPRKMAISFFEKFYTSQKRLRMRRRAVHNRHFISQRIFIFRGYPRKMAISFFDKFYTHTNALEHDREGGAQ

SEQ ID NO: 146019 - protein, 285 aa, Heterodera glycines
VWMCGGSIEVVPCSHVGHIFRAGHPYNMTGPGGNKDVHGTNSKRLAEVWMDDYKRLFYVHRMGLKDVEVGDLDVEVGDLSARKALRERLGCKSFKWYLDNVIPEKFVPDENVNAYGLVCSEIQYGKLCLDTLQRLENKGTVILGVWSEIQYGKLCLDTLQRLENKGTVILGVWECQTGGSSSQAFSWSKDGELRRESTCVDVQKSSAADARSKRKAILRECSRHQISQLKHLSSGLCLDVQSLLKHLSSGLCLDVQSLNAGDDIYFAQCHNEKQSQPWQFGTYFA

SEQ ID NO: 146020 - protein, 412 aa, Heterodera glycines
MPIFFARPLPAEKKLPILNKTPEPTESQKDTLSDDGQDNQDSGASTSSQTNLIKNVRILRKEAAETSLEPYIQFQCFAHFAISRKCVNELYKLWFDFWFSHCQDDFPRLPRIGFSCLSLQELYEDRALLSEKNATPDQLSFIQLVRFVDNGLNEIPNWLLVAPKRGQIFTISLDLADGNGVRVSNLKQQFETNRLLRLFKVRFSFGSVSPTPWYSVRYPPYKSDFSLVIEVDKKAVLRRSYEESSTLSILSSCGLLERKLKARLLKSGWTAEEREAQWDSGEQRAEVNIGLNTELVKGECVMCLEPNSDTLFYPCCHLNVHRKCLRDENVEECYACREKCEELISIRQRDIDCQFCHPNECREFNSFFYPCGCSIGCMDGFTKVSQKMDINCPGCGNVIQNVLKIFISNAST

SEQ ID NO: 146021 - protein, 24 aa, Heterodera glycines
RTLSTAVRQRSSKIYSMPQILWAG

SEQ ID NO: 146022 - protein, 24 aa, Heterodera glycines
RTLSTAVRQRSSKIYSMPQILWAG

SEQ ID NO: 146023 - protein, 92 aa, Heterodera glycines; identical to SEQ ID NO: 127421

SEQ ID NO: 146024 - protein, 92 aa, Heterodera glycines; identical to SEQ ID NO: 127421

SEQ ID NO: 146025 - protein, 48 aa, Heterodera glycines
MGDEFTVNAANLDTNEAGVLTLTSYDESALIRHNDKAITYELTEIEYP

SEQ ID NO: 146026 - protein, 31 aa, Heterodera glycines; identical to SEQ ID NO: 142022

SEQ ID NO: 146027 - protein, 95 aa, Heterodera glycines; identical to SEQ ID NO: 128210

SEQ ID NO: 146028 - protein, 56 aa, Heterodera glycines
MVPKHEERLVPLFRCVDELFDNGLEFRNSRCEEDDDDVGNRLHFPPISTVSSVVPS

SEQ ID NO: 146029 - protein, 176 aa, Heterodera glycines
MALLLPMLLLILAQLHQHISEAYIRRLSDIVPSSYNTNRWLASNNGAEGEHGDGTADSRQLLLLVPTEAQIMQQQQENEELKPQQQYINSPLLPMRRPCYFSPIQCLLRTQGQHEMFVHHPAINEFRADLDLSRSDQSKESVDPVVIGGSTSQHQQVSSRSLFGTSTMLAQNFIFK

SEQ ID NO: 146030 - protein, 45 aa, Heterodera glycines
MYNDEKRKKKINVRHVTKQEDCFMCRQPIKCQKGTHFGTSNKFRA

SEQ ID NO: 146031 - protein, 158 aa, Heterodera glycines
MSQSFLKRPLISNSPNQIPQKRQQFVDEVTSMNLDISTLDDEQTISPAARAIISQLNNLLKIAVSIVNNSVSDIDYAAEMERRRSVVITGLPENQSETPSFRAISDNNAVTSFLDQLGVKTRSVVCYRIGWYNTDRANNGAWRPVKVVLPALLICQQN

SEQ ID NO: 146032 - protein, 159 aa, Heterodera glycines
SAIGDFLGEKDDFNLEVLQHFVRLQPLRSLPLVQAMRGFLSRFRLPGESQQIERIMEYFSGHYHVQNPGIFEHQDNCYTLCYAIIMLNTSLHNPSVKERMSLDNFLNITNSLNLPPALVTDIYNSIRSEAFKFPDDNLQEQFSAALFQQSEKQGWLEKQ

SEQ ID NO: 146033 - protein, 16 aa, Heterodera glycines
EAIPEGFGLPINLGAS

SEQ ID NO: 146034 - protein, 272 aa, Heterodera glycines
MSEFVDWILGFKRFETVAFAHYAGRFDSHFVLKELTERGVETELMMADLKIYQMKARGVYFRDFWLLSQNKLADLPKTLGLKTLAKLYFPHKYNKNVNFGKKLTHLPPLEDYCPDNMKEEECAKLVKWHNENYRMEFELGEQLKVYCENDVEILMEAILKFRQLFLEITDGMDVLKDSVTIAGVVMRIFRTKFLRENHLPIIPEGGYERAENQSKIAVKYFEWLAQSKRVRLRHACNGGEVEIGGLKVDCIIGAEKKIIEFQECDVKENLKK

SEQ ID NO: 146035 - protein, 109 aa, Heterodera glycines
MSEFLIFLLGFSFAMLLMLCIFYALEFAKLYQTVGREISRDKFRHIMKTGKKQHELALVLMEKAGINTQEKTFGLKHLEFVQNFWDKEFPDIFRIVAFDMVNEHFLNCL

SEQ ID NO: 146036 - protein, 63 aa, Heterodera glycines
MPYNALRAPQHPIRFPIVNVPPLPLPPQAPPIVNPLGQNPQQMIRWPRQQWIGRPIDPRSPPH

SEQ ID NO: 146037 - protein, 61 aa, Heterodera glycines
KIDFFVFGAVPPNRCAQIYGETESFGSSFPIGCTLILRWIFAPHKCSSTPNGHLKKSIFLF

SEQ ID NO: 146038 - protein, 143 aa, Heterodera glycines
MQPPQLSIEQQQQYKWMQVKRATATPRGMPTSPGVAEQREEQSRHRGRIRGTESAVAGGNRTNFTYQQLTELEKMKKQKKEHDFLLSSSSSTAAASLWPNSAAFANPHPPSSNANNSSDGLSTAQLSSSASSAEGPSPSPKRH

SEQ ID NO: 146039 - protein, 202 aa, Heterodera glycines
MISGETELSDLLSQKRAALKRAQDELAEAERTNRRPTPAPAGRPLPLAAICPSSPKKSAFANRNATEAAPDDLRAILHRQFARLATDQEAAAQWTECRKREIAEEAERMLKRLKEVIVDSIDIQRQLLNEQAVAFRSMRRSMEEAPDTEDEVLSVKSVSSSAGLPGLCAGSVAKATKEKKDKMKKIVLIGLWPVIQFVCLRI

SEQ ID NO: 146040 - protein, 878 aa, Heterodera glycines
MPSDWKTENEPYIERHVRLNGKVHKMVVDSGSKLTIVRKAIWVKLGQPFLTETKLKGRSFTGNIFTFMGNFKVQAALDDGMPLDLECFVIDSKDTLDLMGLPWIKAFERAYKQVVATTLSIENVADSRWCNRSNSTSTQLEMDLQNTFPRIFEKTLGLCTKIRAHLKIKENSSPVFCAARPIPIGVKQEVDKELDRLIDMGVLKKTDYSSWAAPIVAVRKANGKVRLCFDFSTGLNAALEPHHHPLPRPEQLFAQLSGAKVFSQIDFKDAYLQIAVDEQSRKLLGVNTHRGLFECSSLAFGIKSAPGIFQWVMDQLSNGIPGVLGYMDDFIIASRSIKEHYRTLYQFFQRIQEFGFHIQLGKCKFLVQQIKFLSQIVTPNGIKPDSERTKALQDMPPPHDVSTLRSFLGAINYYGKYIKNLHEIRAPLDSLLKKGAKWEWTREHQKSFDEAKSVLLSDLALTHFNPDLTIIVTADASNKGIGATIRHRFNDGKEKVFQHAARTLTKTEQAYSQIEKEGLGLIFAIQKFHQFIFGRKFILRTDHRPLLGIFGSKSGIPIFSASRLQRWALILLNYDFSIEFVRTDCTGQADALSRLISDQRSSSKDEDVVIAQLLADTEADVAHVFNTQTEQLPLTAREIAEAQRSDPLIREVLDCTMGRWLNKGINPEIKPYFTVRNNLSIISDCLVFNGRTIIPQALRDRILKALHLAHPGIVRMKSLARELVYWPSMDADIESLVKRCVPCQEAAKQPTKHPLQPWPSTTSVFERVHIDLAGPCSNGRTYLVVIDTYSKWPEIFQLNNTSSHSVISQLQWLFDRYGVPKTLVSDNGPQFSSSVFKEFCKNNGIKHIFSPPYHPQSNGAAERYVDYFKRQLKKCSGD

SEQ ID NO: 146041 - protein, 121 aa, Heterodera glycines
MRRKCGRFALRSVCPADFPGAGISHLRTHRPFYGRFSPTSVRFWGVNPKASFTDYCSFVRCDFMVKKEVLNEFRIPPELDEALNRKYNGQKGEGGGEREEKAVSRRAPMVEKGQQQQGEGE

SEQ ID NO: 146042 - protein, 15 aa, Heterodera glycines
MPRHWSSRRANLNEI

SEQ ID NO: 146043 - protein, 95 aa, Heterodera glycines; identical to SEQ ID NO: 124528

SEQ ID NO: 146044 - protein, 16 aa, Heterodera glycines
EAIPEGFGLPINLGAS

SEQ ID NO: 146045 - protein, 18 aa, Heterodera glycines
YREAIPEGFGLPINLGAS

SEQ ID NO: 146046 - protein, 85 aa, Heterodera glycines
MPISLDNDKRRITTALAFVVYLLSLVIVIGPCWGPVVPKHAAGGFEKYNTQIVSRQNEILFRYEFKSGISTNLVRISFVSAFNFY

SEQ ID NO: 146047 - protein, 15 aa, Heterodera glycines
DFLGDSHSSIFDAGA

SEQ ID NO: 146048 - protein, 37 aa, Heterodera glycines
VREWTQLDHNHFEARLDMETLTHGMQEHTVIVYTKVM

SEQ ID NO: 146049 - protein, 84 aa, Heterodera glycines
MDLFLSSAQILKLHSLILIDSFIFDIIFMAEERQHGQQSRDQRDRYSSIFSEAVDAETDWNEISVKVSSQKWSKTKAPLTTSRN

SEQ ID NO: 146050 - protein, 127 aa, Heterodera glycines
DHMSIKLIEANESIALLRRQLESRDEEIEQLRRAESVAGERVADAQREAIRWRTEAERGLRRVSSGRNLAASAESGEFAGFDKLLLSDYRSALSKYRTWSLFADKQLQTMKQLLEECGGWTEPNRYK

SEQ ID NO: 146051 - protein, 95 aa, Heterodera glycines; identical to SEQ ID NO: 129573

SEQ ID NO: 146052 - protein, 18 aa, Heterodera glycines
YREAIPEGFGLPINLGAS

SEQ ID NO: 146053 - protein, 18 aa, Heterodera glycines
TVFSLIIPQSPLIPQSPI

SEQ ID NO: 146054 - protein, 204 aa, Heterodera glycines
MESLVPEYDVAGVVRERTGGALPGIVPSNTYTTRDDQNIVIAGNGDAIFHRLMLAIGRDDLASDPDLVRNDGRARRVAEIDGAIQQWCDGRGIEEALNTLKAADVPVGKIYSVADMFTDPQFLARRMIEQHQFADGSPVKLPAVVPKLSETPGGTRWIGPSLGEHTEEVLKSLGYDSAAIDKLAQTGAIGIPAPKETTHVSHSS

SEQ ID NO: 146055 - protein, 294 aa, Heterodera glycines
KIICSREFLHTFPNSDWDDSKHFVDRPLLKDAKKVVEEFNKFAVSEMSEAQVDKLAKFVQQNFGKVVEEFNKFAVSEMSEAQVDKLAKFVQQNFGMADEALIEHVPEDWVESPPNFKEHVPEDWVESPPNFKEIKDEKLAKWATELNKMWKEMSKKMPKDVKLIIKLYSLIHLSNPSLIHLSNPFSFSGGRFREFRYWDSYWMARGLIASGMTKSLKNMQNFAEMVNRMTKSLKNMQNFAEMVNRFGLCPPGGRIYYNKRSQPPFLTLIKLHIFLNDNKYSAPSPKKLKKEFTG

SEQ ID NO: 146056 - protein, 89 aa, Heterodera glycines
MTTQQRIFGNQLLFLCIFLIGVVFFLFSAAVANGAHLVDSSVDQIGRVQHNHNGDINIRRGIERFNDNRMAQNGKEKWRKYEFKRRKSG

SEQ ID NO: 146057 - protein, 216 aa, Heterodera glycines
TVDSDKGNADKSQGADTDGKNPEKPKESQEVEEDGPNPKESTKSQEVEEDGPNPKESTKSQEVEEDGPNPKEPTKSQEVEEDGPNPKEPTKSQEVEEDGPNPKEPTESQEVEEDGTNSDEDELTERQEAEVDRMRVRAGATSMHGLDKLAPTPPPSATSTNAIAIRVATTRWISDTHWRNCDTIRHQQIMRASYPILFLWEGKVRAGNYVQGGQML

SEQ ID NO: 146058 - protein, 36 aa, Heterodera glycines
MTSENERRFREKLSILNENFLRFLQKAYSKNPDADF

SEQ ID NO: 146059 - protein, 89 aa, Heterodera glycines
ILFRNDPAQYREEVRRRVERASASTPRARSSSTPPPVAQPPGEQQQGTPPQPPDGQGMQPPGEQQQGTPQPPATPPQGQEAPQQGEWYL

SEQ ID NO: 146060 - protein, 20 aa, Heterodera glycines
MTMTAGSMTMTAGSVKYDEE

SEQ ID NO: 146061 - protein, 87 aa, Heterodera glycines
MSICFNFVFGWFNLSAFTLYHIARPAGYIFYVLGHCSSAPVLFFTSSVYRKAYQSVFWSNNNQVAPVQNLQRQPIITNNIRTYMNTR

SEQ ID NO: 146062 - protein, 205 aa, Heterodera glycines
MTDASKVGISAILCQHDDEMKLRPIYFASRQCSKYESRYAATELEALAVRFGAKKFAQFITMLPTRVLTDHKSLVPMFKSKAETGNARVDKWLIFMLKVEYQPGKMNVIADLLSRSFQPNNEGIAEPPLEEDKALIGMIKVLTAEEVEASIVEKREAWSHASEESEMKHIYAFLKKKIFPNDPRQAQNLKETSTKYTLLDGLLYL

SEQ ID NO: 146063 - protein, 240 aa, Heterodera glycines
MKEYYDKRTNVSKRDKHKVGDRCMVLYPGANARSPHKKLLWNNYGPYKIVEMSTSSAKLVPVDKTASEPINVPLERLVKVPSEIPNVSTLPKGKNMYKNTLKAILCPNDWSEKGGQNDGEILEREQNSPKTVFQLRTIENLDGGMETDDFCELSWLMSCQGKDHEKCDKLTCSELDPVVDASSELGMTSVRSPLQALLTAFLLKSNAAVSASSGRDLAELILDSEPGMELVIYEGERRDN

SEQ ID NO: 146064 - protein, 179 aa, Heterodera glycines
MNFFNVLLFLANFVLSIGAFSCGEFLETNSMKFKQTLDPDNIRHPSVNLGNYCGAPDMTMCYGIGCSSPDGKEKLIQLDCMHAIDKVNICNDIEVKLKNATQLPAVYCECQFGNEGEEKSNANFYEKYFKNRTQDLSADGATRHLGICDLGPDNWTSRNLETSTFGTWAFGGKTTFRDL

SEQ ID NO: 146065 - protein, 38 aa, Heterodera glycines
MSFFWSTTNAIVSSLLPVLPAFVMSSSHRRDLEAFSSK

SEQ ID NO: 146066 - protein, 108 aa, Heterodera glycines
MPSVNKILFLILLVSNNSMGAPTAYDICLAACGNSELCVSACWAGLKAEMFVGACPPVFGPFCILGCPSACLPFLPFLPAWALCMSACIGAQPPPVFSELRIFYKNYI

SEQ ID NO: 146067 - protein, 20 aa, Heterodera glycines
MSPGFVIGPFKWSNGEITGK

SEQ ID NO: 146068 - protein, 106 aa, Heterodera glycines
MMGPHLFPEQIYKMDTKNGNFLNKKSMLLFQIMTAIDLCGTMPHFQILETNDHANRGHLGLPNDTKIVAFGSFTELYYNSIIFTVWTLLFIKSQFTNRPKHPEQCV

SEQ ID NO: 146069 - protein, 110 aa, Heterodera glycines
ELVGVLKCAEEATKRFTAEPISFVIPQARALHDELYEMKIVNRTVETIRTTLYFAVERRFFGLANLKEYALATFLDVRFKDKVLTENSATFRARVTVWIKNELKEWEIDN

SEQ ID NO: 146070 - protein, 75 aa, Heterodera glycines
MVWGNGGEGNKLAAAPKNGPSPVVGERGQGGDGRPANSFILSCHCSLLFFLRGLKPPEMFFMGICVGEQNKTKHK

SEQ ID NO: 146071 - protein, 153 aa, Heterodera glycines
MPKQNEIVIKYSFLDLTWFLDIEAVFYAISKTKKCLVVKTIFHISLHNFVSSARIETGIRPLERAARALQEVKKLFEFLQFCFHNFRKLFGIIMPKQNEIVLKYSFLDLTWFLDIEAVFYAISKNGIPNPRFLNPGFQKKCLGGENNISHFTP

SEQ ID NO: 146072 - protein, 92 aa, Heterodera glycines
MFVKEEKQRKSEVNEKEQKKGERQMNSDTLQLQSELEKMLAHLGGTIKKEEEKEEEEEDENGEELEEEEEEESEEDEEEEEEQGRGRAEAHE

SEQ ID NO: 146073 - protein, 124 aa, Heterodera glycines
MSAKIIRVPKIACDLSLAKNGVALPIPSTIAFIHPIMSAKIIRVPKIACDLSLAKNGVSKNRNYAQKASQTILALPIPSTIAFIHPIMSAKIIRVPKIACDLSLAKNGSHIINFNNFGEENANL

SEQ ID NO: 146074 - protein, 25 aa, Heterodera glycines
MPAKLTYYQGTDLFLMRSNFAIQID

SEQ ID NO: 146075 - protein, 75 aa, Heterodera glycines
WSLCAIFSIWLVLSTLADEETFGQPQVYYSMISRYNSDIVIILNYVLLALVLLTMMANIAIMVQNRKMQMRSRKR

SEQ ID NO: 146076 - protein, 24 aa, Heterodera glycines
MEKACKIWRDYIDFSALELLELAS

SEQ ID NO: 146077 - protein, 150 aa, Heterodera glycines; identical to SEQ ID NO: 138771

SEQ ID NO: 146078 - protein, 75 aa, Heterodera glycines
MYQLFRALGFVISGPQKRWSRVSRTSPTFVHVLAELLLGQPFFPGDSGVFVLLLFELFISFVKAFSGFMGKPHIF

SEQ ID NO: 146079 - protein, 48 aa, Heterodera glycines; identical to SEQ ID NO: 134709

SEQ ID NO: 146080 - protein, 178 aa, Heterodera glycines
MDFTTTDNTTNTDLTTMDKATDVDLAYEDAATQTEQLNKQLKEQEQTISFLRLQLRNRDAMIADLRRQLEEQAQTNPPTPSTRCKKNATTLERTSRRNLVEKIVDVIDRDRSRSVSRCSLQTLHREVRHKFGHYTPMKKEQLLQQQTIHGEDGLLLLSQLGTQKAYVKMFCDQSNLTG

SEQ ID NO: 146081 - protein, 24 aa, Heterodera glycines
LTHRPLRRKNQLNCTWSPKLNRSV

SEQ ID NO: 146082 - protein, 59 aa, Heterodera glycines
MARKGKMPKWWDDRKGIRVNAKCAEGKACTVITESDVAKMELDAAAVAWTNAFWPTIRI

SEQ ID NO: 146083 - protein, 22 aa, Heterodera glycines
HLLNTQSSLSREGPAPHICCTL

SEQ ID NO: 146084 - protein, 112 aa, Heterodera glycines
FDGFYHRSFFAKSKNYITVDHHRENSKKKLEVAAKDKLNELQLRVRQLLDQVEQITKEQNYQRYREERFRQTSESTNSRVLWWSVGQTIVLLLTGAWQMRHLKGFFEAKKLV

SEQ ID NO: 146085 - protein, 140 aa, Heterodera glycines
MVNFMNKLRGENDQTIKQLRSVIAELKDQVANHQNFKNRRICTQQDWSFNSVRGVVTDLTNKQRCSLIEAFRARIISKEDWMVWDDVGGREIEFMEAEKMRIVSIEEDFYKTDPNSGERVTLANAAMFQNIWPIRCGMKK

SEQ ID NO: 146086 - protein, 27 aa, Heterodera glycines
HYGSSPVLDKILITPNSVIGVNFCALI

SEQ ID NO: 146087 - protein, 62 aa, Heterodera glycines
MRRNVDNDSGANNGANISSNPKIARDAEIAHVVDTGNGANDALGDGMDIGHCPNCSWHCNVC

SEQ ID NO: 146088 - protein, 207 aa, Heterodera glycines
MGVLKKTDYSSWAAPIVAVRKANGKWVMDQLSNGIPGVLGYMDDFIIASRSIKEHYRTLYQFFQRIQEFGFHIQLGKCKFLVQQIKFLGQIVTPNGIKPDSERTKALQDMPPPHDVSTLRSFLGAINYYGKYIKNLHEISAPLDSLLKKGAKWEWTREHQKSFDEAKSVLLSDLALTHFLTIIVTADASNKGIGATISHRFNDGKEK

SEQ ID NO: 146089 - protein, 51 aa, Heterodera glycines
MGQTLVWPSQMNTYADHNYGQLFKKFLIFRNTAFRMGPDIGIPHLEWAQTQ

SEQ ID NO: 146090 - protein, 33 aa, Heterodera glycines
MSVWPTFSHRLPSAYCAACPWIVPLQWFTRHVI

SEQ ID NO: 146091 - protein, 74 aa, Heterodera glycines
MGQSMGKPHNKLKGDDVKKLAKQTYFTEKEIRQWHKGFVRDCPNGMLTEIGFQKIYKQFFPQEGPSDFAAYVFK

SEQ ID NO: 146092 - protein, 64 aa, Heterodera glycines
  unsure (1)..(64): unsure at all Xaa locations
YDXLKRKQKKFLTKNGYLFFLIFLPQTWYQQLPSLVWPYQTILRYLKRKQKKFLTKKWLSLFSH

SEQ ID NO: 146093 - protein, 86 aa, Heterodera glycines
KNRFIFVFGAVPPNRCAQIYGETESFGNSFPIACTLILRWIFAPHNCLSTPNGHLKKSIFLFSGQSPRADAPRFMGRPNPSGIASL

SEQ ID NO: 146094 - protein, 29 aa, Heterodera glycines
MRIMRKAKCEKRNLGPSLFCTYLMLLVPS

SEQ ID NO: 146095 - protein, 18 aa, Heterodera glycines
MTDPGGTQANMKMNFDKI

SEQ ID NO: 146096 - protein, 30 aa, Heterodera glycines
MGQKESRHAFVNCALIRREEFEDKIQELNK

SEQ ID NO: 146097 - protein, 18 aa, Heterodera glycines
YREAIPEGFGLPINLGAS

SEQ ID NO: 146098 - protein, 15 aa, Heterodera glycines
LKAIHCLPVLGTAKH

SEQ ID NO: 146099 - protein, 103 aa, Heterodera glycines
MTDCEHHSVPPSVPPVDFCPSSPPPSYVSSPTAPRNNANDGQQQNTAKGCFLPSCKNAKRATKENDAGGTEPSQPTSAAVVVPMAKDKVTILCLGHNSQCECR

SEQ ID NO: 146100 - protein, 23 aa, Heterodera glycines
MWREWNIGGEGEGKRGGESEGEF

SEQ ID NO: 146101 - protein, 19 aa, Heterodera glycines
INLRQISSEQHRTARSFYY

SEQ ID NO: 146102 - protein, 284 aa, Heterodera glycines
MISHRFDFYVDEHFKTRKWTLKIMEIGQEIGENGTKEMEIVNLDGNLLPIPQIQVPRKVIGFEAISIRYIDHNVIAFVHHFRQLFAASPINLSIEITNDRRISESILHNIWPLLEKNIQSIRLSDENFRRLRKLVPSFLSDCPSLRFVFSHFVDIFIEFPADDNAMASDGQALAKWLFIARPDDVPKVFNCSLAKTLNWASKIEALKAAFASASSPVNFIAVISFFHLSAQHSVVPFVLTNELTREQFALKRIDNCYRFLLVRCPIARDESKWTKWETEAIGKR

SEQ ID NO: 146103 - protein, 119 aa, Heterodera glycines
AVDACQQPLNVGVGPSNLVRWFFFAPSAQCQSFTYKGLQGNENNFLSRFDCEQICQGNQMTVNRLNCLSPSKSMCCGHAFARPTRTDWLLLSHSAEHLPHWLLLPCRRRRQDEFMLSND

SEQ ID NO: 146104 - protein, 18 aa, Heterodera glycines
EAIPEGFGLPINLGASVR

SEQ ID NO: 146105 - protein, 183 aa, Heterodera glycines
MRNCIGKELTRIPIPVNFNEPLSMLQRITEDLEYSYLLDRAAEKQDICERLAYVAAFAVSCYSATAVRTTKPFNPLLGETFEFDRRADLGWRSLVEQVSHHPPAAAHHVEGVNWHLNQVDTLFWFYAFSLHIIYYQPEGIYGQFTLSWQIYERDSHWPYPRVLSGRKGALYVSKGGHDCAQHH

SEQ ID NO: 146106 - protein, 182 aa, Heterodera glycines
MRKHISPTFLFDCPNLVEIVSPVLPERPTVDNSAAPETSSRDLYMWLHTTRVDRLPLVYKLLKWNNRWDQFVNELMMSFNTASVPVNYMVFTSFEFIYTRREQMVNMLTEERLTMLTNVHPKRDRCLQIVLRPCRETDRAENRSNAQTVDQQQMSPKHNQWPLGWNYLIIIFSQNVNFPSND

SEQ ID NO: 146107 - protein, 179 aa, Heterodera glycines
MGSVISYEFVCRHYLHGHIDKRRATKVTGIGGSSKTQGRLTIVVRIGDAKVRVTFDVIKGLPLDMLIGQNVMDALCANHCRQTDQLTYLYKGQRLAVPLLENSDTTKTKEKTWMDHLQCLMNITSYSLNDWMALEQRKIANGGENMPLSDLECGGSTELNGMAIGTSDKMPNGGDKKSQ

SEQ ID NO: 146108 - protein, 61 aa, Heterodera glycines
FFAALLNTLKQDVIKREFRQRRVKKRKKRGKKKVKPNDFFCLQRLLIYTLTQRNASAMGQL

SEQ ID NO: 146109 - protein, 16 aa, Heterodera glycines
EAIPEGDGLPINLGAS

SEQ ID NO: 146110 - protein, 106 aa, Heterodera glycines
MTQIKLLNEEEINISEIKVEKKVENSLSKMQKTNAFFDQSSEIANLRTEFEQKMEKLCERTKENAKEEKAKMEKTKANAADEGHRLGTELHFLSKFGTFISSPFFR

SEQ ID NO: 146111 - protein, 22 aa, Heterodera glycines
MDLNHGLPYLFLSYYIVKTKLQ

SEQ ID NO: 146112 - protein, 25 aa, Heterodera glycines
HPIPSTIAFIHPIMNAKSIRVPKIA

SEQ ID NO: 146113 - protein, 104 aa, Heterodera glycines
NGLSKNRNYAQKASQTILAHPIPSTIAFIHPIMNAKIIRVPKIACDLSLAKNGVSKNRNYAQKASQTILALPIPSTIAFIHPIMSAKIIRVPKIACDLSLEKMV

SEQ ID NO: 146114 - protein, 48 aa, Heterodera glycines
MFEGLTSKASAINGMITDQLNMLIPWVKQLSPILAAKNMARKVAKICA

SEQ ID NO: 146115 - protein, 276 aa, Heterodera glycines
TSLVEHVIDTGDATPIRSRMRPVPYAYREKVSEMLRDYLGRGLIRPSNSPWASPIVLVPKRDGTLRFCIDYRAINSVTKKDAFPLPNIDYILMALGGKRYFSTLDFMSGYWQIRMHENSVQKTGFITEFGLHEFTVLPFGLCNAVATYQRFMTNLFDGMINDFVIYVDDILVASETWEEHLVHLKEVFERVGRAELKLKIGKCHFAAEELPFLGHILTRNGIKMDADKTRTIIGLPIPATKKQLQSFLGFMYFKEFIGFGSLAPLLIKENTPFVWV

SEQ ID NO: 146116 - protein, 75 aa, Heterodera glycines
MRQLREIRGCYTRISRYLEDQRMFKKLLKEADFYEQRVFLAHKNPSSSHYLNSQNLEIFGRFYFSTFVFCVGALD

SEQ ID NO: 146117 - protein, 295 aa, Heterodera glycines
TADGIAKCDGGQTEAAAHETNARKGTKFRTKLERVCWRCGKFHHAPSECPSIKTVCRKCNKAGHLEAQCEKHHEWLNRNKNGKFQGKRACTLRIGGVMVNIVNHPTRLIEITVEMNGRKVIFVLDSGAEVTVINEETHCLIGKPQLRRCQEQAAYHDGSKCTLLGRGEAKFKFGDATKNGTYYVSKSGSLNLLGIEMLDAFGLLDDIRQKVNSTLHLNAIGRGNGDEATIMEELKKKFPEIVADGLGHCKKVKAHLSLKPNATPIYCRPRPVPFNTKSVVEAELERLQSMNVIRP

SEQ ID NO: 146118 - protein, 67 aa, Heterodera glycines
MPTLVVFKIFRNSDFFINYLFFAKLIHKYFFRKCSETHKTLFTERALKHTKLYLQKCSKAHQILFTT

SEQ ID NO: 146119 - protein, 74 aa, Heterodera glycines
FISIFSERALKHTKLYLQVSLGTLMLFLSKREMNKIFNSFLNRPKSLGLTFFSETDQKRTKLCRDTERKSNNLF

SEQ ID NO: 146120 - protein, 39 aa, Heterodera glycines
SRLIRSSPNFAGNLLRTLQMLINFLRIFCLEEHSSSHLP

SEQ ID NO: 146121 - protein, 118 aa, Heterodera glycines
MTERAILGRLTSKDPDAVAGQSPLPPPGPFVTPMAQSRFSGIQPKFAALLKPKHQSKKENLPEKDGNDKQNQEETRPSKEEKRTDADVEKTSDRSTKEAEGSCKEEAEPVQDDTVKEG

SEQ ID NO: 146122 - protein, 442 aa, Heterodera glycines
MAAQRMKVCYRLGSSAVAGSSTGANGSAAYGRASAVGSAAVASGPSADAVAGGAAPPPLMAAPLIAAAAANAAAVAAAAQPSAQQRAVAAAAPQQPQQPQTAAVQLALSAADFSHLFQHYQSAIGQLQPSMGSAAAAVAANQAAAAQIAAAAAAAPYVCQPLAATAATVLPYGSARHQPPPQFSAVTAPQAQSLSQFVPTAMHPFVDPLIAAATGAANAAVAAAAHQHSHAGTMVTGSSAGGNASTASHVGPQQNGAVPQGWPTQQQQQGSANATAQNQAATLAQNANTTAALFPWAIAAAAQQAALLPGAGNNPAGAAADLFLPANAAAAAAVQRQMAAAAAALQFPHLFSAPVQAAAQQTAKNYSQQLQLLAQMQQQQQQEEWAAQVLNGVRPMNAQQQQMLQQQQQQQQAMIARLKNDAAILMQNSLAEHYLLERLGKK

SEQ ID NO: 146123 - protein, 184 aa, Heterodera glycines
MQRFLDIVYDIMSLRGYICEQLDGTVSQPDRQKAIQNFQRPDSDVFAFLLTTKAGGLGLNLTAADTAIFLDSDFNPQNDKQAAARCHRIGQDKPVKSIRLVAKHTVEELIKQRSVKKLKLSENVLGTDEKEGPSLMFDLSKLLLEGLTDLEKEQKKHTQFHILTDKQLEERLGQTDQNGHWQIK

SEQ ID NO: 146124 - protein, 48 aa, Heterodera glycines
MFRILSNFVFYCSYEYDWIKSSAYWRCNFVFKIFGIRKNLAHGFQFSP

SEQ ID NO: 146125 - protein, 317 aa, Heterodera glycines
MRTSSTNLHPLVYESYEVLKKHANVDNRLTYSLRRLDNFTRLNFLMEVERKGKTKIQEGKEEDAYILYSRAMTIYLMISESIDDEFRQGRGGQLFYETSQRLGVDFDKVAVSLQQRFMDGKGELPKFCDPLGLRWAEIVEEPISENLECGKDSNSLDAQNKIQSILPKNETALPTTEEFSIKIKGNNKKQISHMTDPAIVGTLEKSEKVEKLIEESGEAKKETKEKEEAGEKQKEEKNDEEARPNLKLVEQTLEWQKVNSMKPIWTRRHAELEKNEHTKFYNSITKDFDMPFGHLRFSENAMPKYILYVPKTLVAHP

SEQ ID NO: 146126 - protein, 40 aa, Heterodera glycines
MGRDHALCGHTALRQTGGRGGRAPTRAAKRQKTALKRTKC

SEQ ID NO: 146127 - protein, 40 aa, Heterodera glycines
FISIFSESALKHTKLYLQVSLGTLMLFLSKREMNKIFKNF

SEQ ID NO: 146128 - protein, 99 aa, Heterodera glycines
MFEYPKRTLEKIDFFVFGGVPPNRCAQIYGETESFRSSFPIACALILRWIFAPHKCVSTPHGHLRKSIFLFSGESPRTDAPRYMGRENPSGISFLYTVL

SEQ ID NO: 146129 - protein, 286 aa, Heterodera glycines
MNQQQVIKTKRNNDKLVHDGALYVFHKFSNDGLKKFWRCEFHGPADQCKGRLHTDLNNVVQKLVGVHSCDMNAAHVECQRLVIKRLRRDENAPRVEPLNLEQLEIPNTYRVYKRTEIDDEQFLLADTGVFQIHGQNGPQRFLDNYTGRMRFNVPMTAPLFDPHEWSVHQRTLDGADRTNNFAEAFHRKLQRQFSCTHPTIWRFIDTIRCEQKALDADMARCMMGEAAPQKKRKYRDADSRILRLVQRYNDVNIVPQNDHNYANPNVNPENINNFFAGISRNYEMRP

SEQ ID NO: 146130 - protein, 62 aa, Heterodera glycines; identical to SEQ ID NO: 138919

SEQ ID NO: 146131 - protein, 25 aa, Heterodera glycines
KERTPSDIPIFPFHNWPKATVLIDT

SEQ ID NO: 146132 - protein, 62 aa, Heterodera glycines
FSYIFHNLFQKTKKNDSILKRNSAQKGGMVRRKEEFLEKSAPHLIFPFFRSTTGQRRLCSLT

SEQ ID NO: 146133 - protein, 27 aa, Heterodera glycines
MHRIIAAVKKLVVGSVLAVRCTLCVLL

SEQ ID NO: 146134 - protein, 303 aa, Heterodera glycines
FVRLNTENPSKQLCPQKQANYLVGRVSLVIGINQTNRHELRTAMHHHPPNHEKAINLFPVLSQIKPQAPFPVLSQIKPQAPLLNRKTFVSGKLPTRANKSNRKTFVSGKLPTRANKSRRIASWHRLRSELGRYLIAFEPLTFFLINEDILAKCFRCSPSCYGPRISPLTQYEWPRLSLLTIISVSKTNNRTEILFYYSIFLTAAIILCILRAGITAAAGTRLALSILVKGFKLYPFRPASEIGLVISRHYLLALRVAISQAPSPESNPYPPLPVISQAPSPESNPYPPLPVITMVVRYTTIES

SEQ ID NO: 146135 - protein, 112 aa, Heterodera glycines
MLCKCGECFECEDEKRRLKRNRELNTRKEQIKNCTGNHLAPAMMELKRRNMELFKKAYRPVKGVINKITGGPWNVECEVCHETFTYFMVEWENSRTDFSWGPGRNMVEADNI

SEQ ID NO: 146136 - protein, 301 aa, Heterodera glycines
MDSAADSIRQLQRAVREQQQMIFLLRSQIVDQRAVLLQNMMRIESTEGYLANSRGNQRFSPRYSPMAGVELSLLGRRLEERERRQQSRLESNVAGPSTASNGGDDERENGPVLSAVIEGHMNRSRMRLIRDEMVHRAVQQQLEHQHHLLLQQAQQQQQREERERQQHFDQQMEEAELLHEQLQAAEQENDENIEPQPPQQQPQPQPLIRHQQLQFERNVRLQLRESQRFERGVASSVLVPPAQLYWETECIICTSNRAHFYSRNCGHIYLCSTCAVNAVIHKVATCMLCRVRIDGIYPFVR

SEQ ID NO: 146137 - protein, 109 aa, Heterodera glycines
MSTSSNKNYLPKNQCPNCDDDEVDTDPSPEEVEKWTPEQVIEWDQRCYGKMPAEEELWQEFLDKGEANVLREFFGGKGALEVEKSLREYAKKKERRDAILIEKRNEYKK

SEQ ID NO: 146138 - protein, 180 aa, Heterodera glycines
MVLLTEKIAKILNCRVSELRDRLNHPSDCETVVKALTGHRVKTTYKDRNGYTKSFAFGGITAQGAAITMAYGRLGRPFNVNVAAHFYVRHRIKLRHPFLHCAVESFPEGQEDRFYPLELCEMEDGPNEPDWLGRIFTEIRNDNYTDSMSPANREVLTPEDTSMSREGRDECSQNISYTLW

SEQ ID NO: 146139 - protein, 347 aa, Heterodera glycines
MTDKEAGLLNAALEEGYRVTELLRVLEYHKSDNKLFRPYMSEFVVEKLHASGFDEQIKGNFEAEEQFIAECWDQFGIKIDRTKMVPNKGKRSLAKLAVNNLWGRFSLRNYGLSQTLITDDPSELGNYLDNKKIEISGLDMLTPERILTSYQLKKDWIKEHPCSNVVISLFTTSAARLHLLKSMQKVVRSPGCTLLYTDTDSLFLVHPEDSNPLQTGVHLGQLTDEFPKHDILEFVSGGAKQYGLKLRKKGTADEFEYVLKLRGIRLNYDVTENQGLRYNTFKQSVLEFARSGKTDPIKVLYPNFLRPAVIQGNVTSAPLQKIYKPYVGKGIVCSNDFRVLDFGHISP

SEQ ID NO: 146140 - protein, 234 aa, Heterodera glycines
MTDRGWISTCTSLELNAALEEGYRVTELLRVLEYHKSDNKLFRPYMSEFVVEKLHASGFDEQIKGNFEAEEQFIAECWDQFGIKIDRTKMVPNKGKRSLAKLAVNNLWGRFSLRNYGLSQTLITDDPSELGNYLDNKKIEISGLDMLTPERILISYQLKKDWIKEHPCSNVVISLFTTSAARLHLLKSMQKVVRSPGCTLLYTDTDSLFLVHPEDTNPLQTGVHLGQLIDEFPK

SEQ ID NO: 146141 - protein, 929 aa, Heterodera glycines
MSKSPPSKRARRFFIEELLREPYNELSPPQKSAKDYVRKLDSEIEHVPKFQWVKNKSRFVIEDVPADPEGLLIGIFQHCMDEAIGDSRLKGVQPTHLGCIISSQLLTSDIWIPIRQMTPDTINTILNRFNDVAQSKKQDGVTLWGDAFTVIVTTVNRNGLPEKMKLKGGAARKLAPVHHRIHEQCLIKIKNFNGDNYCLFYAMQATMVRAVGAMTRQQFYGYLNGIDGMRGKLRTETTELMEAVQAPLGQPNYDAEIYVPRIVDWWNNEKFAGQWKFKAFIFGAMGHYKPLFKYGPEEYIVPIILYFDDGHFNGVQKSGNLFGKPYCLSCEKTYDRPKRHIASCKSRCIKCSQMGPQFPCKPIAGVRQKCKDCNKMFFNNACYQYHLSSNFCQMSKECKYCGVVWDMRKNCDNGRERGCFIRPLEPNKKKETNGWRLVTFDVETMQHEPADPHFPERKKHQVNFVTAKVACPNCISTGKWKESLLGKFCKICGYHRTITFSQMPFRETTVDRQTIDRHPLVAFVKWLLYKLPKQYETIAYSHFGGRFDMVLVFRELFMEGLNPSMIRKGNRLFEMRVKSRKNLNPNVTFRDSWNLIPGPLASMVPMFGLDVQDKPFFPHMANKPDNYGCQIFPSKADYLADGMNPEKRKQFDQWYQQNKNIPFLLDESLASYCKNDVDILMAGLIAFRGEFLEMTKRPAGIDGKADRAAYKTPHNGIDPVRHCVTIASACMRHFRTNHLKPGHLALVPEKGYDSCGDNQSELALNFMQWYAEKHGVRIQNAFSADGEKRVGNFRLDGWIESQQKGLEIHGCVWHACAKCYPDDNEVLPCGKSAGRIRELNQKRMDFILGKIPNVEVFWQCEIEAMLARDRQMRQKFSEFNGDGGPIDIRSCFMGGRTGPLSFITKRQRARKLATMTLPASILLSSEYLS

SEQ ID NO: 146142 - protein, 167 aa, Heterodera glycines
MVKDRLMEFQAEDDHLVASQSQFMEDFFEQVEEIRASIDLIATSVEEVKKKHSAILSNPINDPTIENNLDHDENGGQANVDLRIRKKPSVNFRIRIKKASADQRIRKTQHATLARKFVEVMTDYNKTQTDYRERCKGRIQRQLDIGQWEGTRLTTDSLLGPLYLVRN

SEQ ID NO: 146143 - protein, 75 aa, Heterodera glycines
KNIYVHARLKACLEGYFHWQLIWNQARLRLHDSSGMRSVWMGQFDERHRSVTRKQKHSEQPYRSDLRRSNVPGRH

SEQ ID NO: 146144 - protein, 187 aa, Heterodera glycines
MSNGQTIELVSANGFHFSDGVQNVEEVSSEGTSSSCGGSRLTHNYPPTTLLSTAEVFSPQQVEPVYVNEKQYARILKRRAARAKLEMEGRIPKQRRVGRRKGRISVQMPFNRNICTNRGIGMLRIGPDVLEESLTRDSLGRTPPLQFKAQREETKRVRRKTEANRWTDKCQKTAQTNDHKTFYTLKE

SEQ ID NO: 146145 - protein, 76 aa, Heterodera glycines
MSFVKNSSHNYEKILTGQRNNSRKLREKGDSCQHVVAQLRIILWSINKLTPNMRKKDATCQEIWRQNVNMSQLLTK

SEQ ID NO: 146146 - protein, 29 aa, Heterodera glycines
MFFIDTYMGGIGCPKGDKQKADGRRKYTS

SEQ ID NO: 146147 - protein, 28 aa, Heterodera glycines
TMGANISKRSKSIFGIALNKNVTERMII

SEQ ID NO: 146148 - protein, 151 aa, Heterodera glycines
TEDVQKLADEIFALTSSTWDIISKLRHVSKHAITFVRVASQIGSLIAAGADLAFKPESEEFKAIQKLHHFVEAKFAALSRHVEHQTNELKFFLTETDYYASVTRPLNGIQSSYSGITDPFSNRTQYKSDFISRCTDRSSPYDVLLVIIVIN

SEQ ID NO: 146149 - protein, 16 aa, Heterodera glycines
EAIPEGFGLPINLGAS

SEQ ID NO: 146150 - protein, 128 aa, Heterodera glycines
MVIRRGTMVIRRGTMVIRRGTMVIRRGTMVIRRGTMVIRRGTTVIRRGTMVIRRGTMVIRRGTMVIRRGTMVIRRGTMVIRRGTMVIRRGTTVIRRGTMVIRRGTMVIRRGTMVIRRDTMVIRREFLE

SEQ ID NO: 146151 - protein, 82 aa, Heterodera glycines
  unsure (1)..(82): unsure at all Xaa locations
PGLKCPAEAKNFFYFREKIEIFPKKIPVDRARKTMFWKWSPFFWENSLKNPKIQKPENRFLGLARKILKNFEILKSGKIGLX

SEQ ID NO: 146152 - protein, 53 aa, Heterodera glycines
MPFLFPSIVNTNNTAFNRINDKSANVRQKLDMMETALVHLTTNKCQLNFSAEK

SEQ ID NO: 146153 - protein, 24 aa, Heterodera glycines
ITGVSIIAVLFLVFLMPSQNLVRF

SEQ ID NO: 146154 - protein, 75 aa, Heterodera glycines
MFLIAKIVRGRRLLHQLEQEEEKEKAQKEREKIMATKAGGGGEKGQGTKGLRRKVPKEKRAMAFLGTETESAEKG

SEQ ID NO: 146155 - protein, 131 aa, Heterodera glycines
MPLIMDKVCLSPRHLSPAKVPAHLVATTSVLLAGLGASASGRWRRSFNDLARLDFGGVQQQQDKEEDDEHSRRAVRQRTDSSLPSVDEELTAYSNHNAKMRRTSSMPSVVESDTHGKEAFAIVKKGNRLAD

SEQ ID NO: 146156 - protein, 78 aa, Heterodera glycines
MSMDLAIEHTKVRQAFGKSISQFQWTQFKLAEMATKLVTSRLLLREACHHLQEDTPNASAMSAMAKMYITDEAFTIRL

SEQ ID NO: 146157 - protein, 87 aa, Heterodera glycines; identical to SEQ ID NO: 129152

SEQ ID NO: 146158 - protein, 16 aa, Heterodera glycines
EAIPEGFGLPINLGAS

SEQ ID NO: 146159 - protein, 117 aa, Heterodera glycines
DRLALWDRLMVLASKVQKVINLSSKISSVQNTDHMMQQPTEEQRQRIYQTDKAKSALLHLLLTDCLAKNDETTVFDRFKMLKEENNCKIAPEMFSNLPLARLLVKFGKGMTMRRGLA

SEQ ID NO: 146160 - protein, 55 aa, Heterodera glycines
SFEQQKMYEEAKLSGLSTLQWLERQRSLNKRGKKRKQEVDTKASKGRKIRYVEIP

SEQ ID NO: 146161 - protein, 102 aa, Heterodera glycines
MKLFLISLIVLGILLTNLEAFRQQTVGIRGRLMCGNQPLKDANVKLWNKNTLGSDDQLAANRTDNHGNYELQGGVGQLTKMNVHFKVYHDCDDGIKVEEIKI

SEQ ID NO: 146162 - protein, 41 aa, Heterodera glycines
MALQFRAPAAQPTTMRRCCCAKCARTKPAAFTTAFSLARDA

SEQ ID NO: 146163 - protein, 17 aa, Heterodera glycines
MSSALCTIFSLYLFRII

SEQ ID NO: 146164 - protein, 24 aa, Heterodera glycines
RTLSTAVRQRSSKIYSIPQILWAG

SEQ ID NO: 146165 - protein, 143 aa, Heterodera glycines
MLKRAREFEKANNWQNGNKKYYSIIWNSPFYDGVSKVEDRAFVAFVKGRSTFDTFCTEFADELAKICYEMTEEQQQPTFDQQKEYLAQKYAAHIGVVYLMRENWHCAKIIGSELGSDGQQKECQKLHKYFDIFYKYLFCVYAE

SEQ ID NO: 146166 - protein, 80 aa, Heterodera glycines
VSTWDSFDFQAAAQKAFDIFRQGPVGWNTSSSYRRLNAIVEGLSECEKRRCDRTVGFGGSPDERGETTLDALVMDGPGHK

SEQ ID NO: 146167 - protein, 38 aa, Heterodera glycines
SAPSCSNLTLFRFVLIFCCWSILYNLNSLNLVYKLIKL

SEQ ID NO: 146168 - protein, 32 aa, Heterodera glycines
KYNVSYEFSFICNHAKTATRKRPLPKRPGPYK

SEQ ID NO: 146169 - protein, 75 aa, Heterodera glycines
MSSFKTLQAALLLVDVIQQAARLVYVVQQNKQRQRLIVSGNTNEEIDNALQPIGHAVKFCWKLGLKAGQLRLSQV

SEQ ID NO: 146170 - protein, 27 aa, Heterodera glycines
MVNLDESSNQEDEVFVEAHPMQPVTAD

SEQ ID NO: 146171 - protein, 28 aa, Heterodera glycines
IFFVCVSNIVRLFDRARQEKATVGTKFA

SEQ ID NO: 146172 - protein, 72 aa, Heterodera glycines
MENLKIQIVTVVFKNDADPFTVKGFDQNNAELYSATTQSGTFNNETWQFVKMNVNHWEGLDAGMITFKDGNE

SEQ ID NO: 146173 - protein, 61 aa, Heterodera glycines
MLNLDASRKSYGVDKLIIFMVIIIQPSLSQDFFGALYFSHKNVIVWENKIINRNYKYGQQI

SEQ ID NO: 146174 - protein, 126 aa, Heterodera glycines
KKSTFWFSGQSLRIDAPEITGEPESFRNSFPIACTLILRRISAPHNCFEYPNRTLEKIDFFVFGAVPPNRCAQIYGETESFGNSFPIACTLILRWIFAPHKCLSTPNGHLKKSIFLFHKYFFQKVL

SEQ ID NO: 146175 - protein, 37 aa, Heterodera glycines
IKVNVEASNQVETAFFMLNISKLVRRKKRHMLQNAVS

SEQ ID NO: 146176 - protein, 28 aa, Heterodera glycines
RPGGGALLSLATFNFFNNSRGMVEAVQI

SEQ ID NO: 146177 - protein, 49 aa, Heterodera glycines
MPADNEARLYFGTFTSGCANAMASNVRADSLIVFGAYYWYNYSHSQYSI

SEQ ID NO: 146178 - protein, 78 aa, Heterodera glycines
MPAQNFVTNQQRKNDYAADHQTMLNTLNPPPKTIKLSARTLDAIALAHPEVNVPKYSRASLSAGIVHFGVGNFHRAHQ

SEQ ID NO: 146179 - protein, 173 aa, Heterodera glycines
ISITGTHSIHQHSNHIPISGTQSTNSPINGTQSTSISITGTQFYCISITGTQPTNIPINGTQPTNISLGLNPQTFQSLGLNPPTFQSTGLNPPTFQSLGLNPPTFHSTGLNPPAFQSLGLNPPTFQSLALNSPTFQSLGLIPPTFQSLGLNPPAFQSLGLNPPTFQSTGLNPP

SEQ ID NO: 146180 - protein, 74 aa, Heterodera glycines
MGYETADGHQRKRNIAMPTLGFFISSTRYNAINNNLVPKMDGIPRPKDFRKLEIGIPSLKNFGRSEFLKLYKIN

SEQ ID NO: 146181 - protein, 66 aa, Heterodera glycines
MLSFRMIASLLDLDAAKEKIGFATTFGWTFSHLLTMLNSDSKWHFFRHVLMRWWTNISMANQNFQF

SEQ ID NO: 146182 - protein, 47 aa, Heterodera glycines
MKFKAMYGTCREMLPSYCAEHMWRQFNGKKTLAAFNNMIYHIAFYYP

SEQ ID NO: 146183 - protein, 25 aa, Heterodera glycines
MKLSMEQISQIPELRTNQFKERICQ

SEQ ID NO: 146184 - protein, 84 aa, Heterodera glycines
MNFLFINFIFFTALFNSVNSQCFSPEESNDTQLDKCCGEKLVYTLNINESCSIRGKKFNCSLAWLLERYKLSDKYTIEANTEVK

SEQ ID NO: 146185 - protein, 99 aa, Heterodera glycines
MALLCAAEPDCIVPIGQTKECLYTRIAPNLTCHRQHQSLLDTLLYNMEYRKQIADPSFLPHTSAKHPRWSAKFIGSFRIKHSRSFVGNAEEWLSNVKCC

SEQ ID NO: 146186 - protein, 54 aa, Heterodera glycines
MSFLLLLNFRFCPIGWLVEAGPVFFSPILAISDILNHQTKFNSVIFIVGMALCQ

SEQ ID NO: 146187 - protein, 59 aa, Heterodera glycines
MPASVDSSSPPKSKSEGNLEHQQKDEAKKNGGGSKDDYEQKEQQLKKTEEKQVEEESDG

SEQ ID NO: 146188 - protein, 63 aa, Heterodera glycines
LTLKNNSLPKSFLQPLIANIISCRFKAIHCLPVSAQQSTNRVFDSLQKIIPYPKVFYNHILPI

SEQ ID NO: 146189 - protein, 28 aa, Heterodera glycines
IFFVCVSNIVRLFDRARQEKATVGTKFA

SEQ ID NO: 146190 - protein, 67 aa, Heterodera glycines
TANLVPTVAFSCLALSNNLTIFETQTKKILDQKMAISFFSFFYRKLGTNSCLLLSGPIKHLFSHFFT

SEQ ID NO: 146191 - protein, 87 aa, Heterodera glycines
LCCTMLLSPAVRRDSSKILYHILLWKVQVPYWTTTCQLAQSPLASCGTENGNIRWGALFSKNSSFRLTIPPFCALFRFKIESFFLAF

SEQ ID NO: 146192 - protein, 95 aa, Heterodera glycines
MNFLLYRRQQLLAQILDATHRINVFDANLATGNMGTEEREQAIADREQLFEFVRELLRQLDVVREDERRMRQRQRDDDNDNNSEVYSHWFWVPLV

SEQ ID NO: 146193 - protein, 75 aa, Heterodera glycines
MSVFSSVAEMSVFSSVAEMSVFSSVAEMSVFSSVAEMSVFSSVGVGASGVGIGVVVVVVVVVVVVDLKESRLKKN

SEQ ID NO: 146194 - protein, 44 aa, Heterodera glycines
MKQNEIEKSFIGIKSLHLVKRMLKSEKRKKKMIEDKKKEIYYVC

SEQ ID NO: 146195 - protein, 92 aa, Heterodera glycines
MAEKISASSSSSFVIILTLLLLFLHPALGGPAAYGICQAGCSALVVACYAAAGAVFGTVTTGIGTPPAIIACNAAYGTCQAACWAALHAPTL

SEQ ID NO: 146196 - protein, 281 aa, Heterodera glycines
MAKIRSLIMGLQTDFGTLFAEISMKKIEKCKWTSKMFPCIVAKINQIVAFAEQSGSYCDLSPFERATEMLNDLISRKELANPSKEQAQRIVDELVVEMKMGIWLNEMKTKMINFEKPFVDIKGFFKFSSDLSAELAEINAAICKWPNSMNKKEELKGKIGKLISIAMEKSHFLKQLIVQKLDGLLKKATNAFEELKSELEETKEAEENFMKFNRKIIDIYSDKAMHMPDDVDFAVFGILERTKRGELLLPTAFEELQKVIEHEKRSAIEAFENKEGQSEKC

SEQ ID NO: 146197 - protein, 249 aa, Heterodera glycines
LLWEFQRRKLAELETAQMTLFLNPSNLCGKKKAEEGQFFGESKWHETAEKVREQISQACEEGEESAAVEGGESEGTTKKTSEDIQSEVTNYMETARLELGQPSTSGNCVDPSSPPLVTHFNSMAELLFWWRINAERFPRLVQLARQFCAVPMANSSDQRKALSNDNAEEEKVTRRYAAEQMAEDGDMAQLESGRTEQLQLLTQLMTVRMALREGATETNENGKKRNECMAPNEEITTIEPIRETSEIKI

SEQ ID NO: 146198 - protein, 18 aa, Heterodera glycines
MRTRPIWQVKQRLLTSQK

SEQ ID NO: 146199 - protein, 43 aa, Heterodera glycines
MTEYASVAVLLNAFYDLSFFLGVLSYKKTKKEFHFLRKTLGLI

SEQ ID NO: 146200 - protein, 96 aa, Heterodera glycines; identical to SEQ ID NO: 139205

SEQ ID NO: 146201 - protein, 166 aa, Heterodera glycines
MLFEDLSAGQKSAVFFQKRLIMTTMPNLKFEKSFFSRDLSETIYLFVNGESTTAPTPLASATEAEEEEQPILLNYLDTLAQSICVMAMEQSANKLFERQIQLFYQFADGLANDVIHSVLRLADEEPSDFDDDEVEQEEQAFEDVHSAEEEAEMMPKDDKNAFLAEK

SEQ ID NO: 146202 - protein, 145 aa, Heterodera glycines; identical to SEQ ID NO: 143902

SEQ ID NO: 146203 - protein, 108 aa, Heterodera glycines; identical to SEQ ID NO: 134591

SEQ ID NO: 146204 - protein, 106 aa, Heterodera glycines
MAILLKCVLLLSIMAIFCDCMDPGKKGKSKDPIPIPKQEGKPSSSAANSPTVTKGTPKRGDKKALQKERQEERKQKERERENRFLRTKSTAGAKNGYPTFEDNPAI

SEQ ID NO: 146205 - protein, 94 aa, Heterodera glycines
ALKAKTAALCFIFEKTTKNDCSCKDLEKELLQLGLPSAPSLTVVCKEQVPTAADPSVKSDYFRLDTTSSDGSTATLLIHRDELVQLRTCKIAVA

SEQ ID NO: 146206 - protein, 204 aa, Heterodera glycines
IEKLPDRCLQLIFSYLSPTQMLSVGRVCRRWKGIAYSPVLWSSVSFRVNHGGIQVTSKHSQLFAQMIGVLFAQMIGVRFTELRLCELSTDLITPIVLHVLHELASRCPKLQFLTLDFSTAMQFSTAMQLHDFNDLQSFPSRLRSLTLCLSENIFLEGFLRKVYTFISSVEILHIIGVEILHIIGTYEKVEDEEETYEKVEDEEE

SEQ ID NO: 146207 - protein, 15 aa, Heterodera glycines
SWTFRGSAIRPWGNP

SEQ ID NO: 146208 - protein, 24 aa, Heterodera glycines
MEKACKIWRDYIDFSALELLELAS

SEQ ID NO: 146209 - protein, 45 aa, Heterodera glycines
EREQRFREFEQNYLGTRDDIEAQIKQETEANLKAMDSNVAKNKQQ

SEQ ID NO: 146210 - protein, 39 aa, Heterodera glycines
LMAQNTAQIEEFVRLVLSSWPSYQFAIKNQLAGSLTSAK

SEQ ID NO: 146211 - protein, 19 aa, Heterodera glycines
LLNFGLLRDQRIHKNIQQR

SEQ ID NO: 146212 - protein, 31 aa, Heterodera glycines; identical to SEQ ID NO: 133797

SEQ ID NO: 146213 - protein, 38 aa, Heterodera glycines
MEKACKIWRDYIDFSALDFLFISLFDSESIRETDLTFN

SEQ ID NO: 146214 - protein, 50 aa, Heterodera glycines
EAIPEGFGLPINLGASVTDWGTQTIMGSKNPTQNYRTGYREAIPEGSGSP

SEQ ID NO: 146215 - protein, 364 aa, Heterodera glycines
MGRESKECDVKEELKKNKEMKKFFESVPDKGPINPRDAYAGGRTMPFCLYAKTTEEIEISMFDIISLYPFVNYDTPYPVGVPKIVVSRNFNVNWTAPDDVPYDGLLKVKVIPPKNLLYPLLPVHIDEMLLFPNCWSCARRAKNEFVMTKDVKKCNHRPAQRAFLGTFTSIELRKALELGYRIVGFYRAYHFEQFDSQLFKGYVRMFLKIKVEASGWPAEVKSEDGKRAFIEMYKAKYDIGLDYDKIGFNPGLRMIAKLGLNSLWGKFSMRNTLSNTEIVGSMERWMELGRDNTIEFGRPVKISEEISRVVYRKKEEFIREHKVSNIVLSLWTTSAARLKLYEYMEQVYKKEGCKLLYCDTGEKE

SEQ ID NO: 146216 - protein, 295 aa, Heterodera glycines
MSREAEPGWKIEKISVDLYCSALSDPVIIPARPFQQSNPDIVFNEFMHRQQSFGEEALEKEDFFWQKNRAEVEALLIEASNYKIIIHRDYESRYSDYIATYHRTPLFCFCMIERNLRFFYDTGTGTPIGRVTTVLHVTVEASYTGEGFISPMFSFWFYWEGRSQTTNESFTSRLYLYTVSMLRAMGKAWGRELLLNPVEVLIDMFYQRIDRDLVGSWSLFYRLPPSLFDTSRRKMQTIAEIKNFEIVDGGRIFVVRARIENVMEAEYRFGSCWSERKVVAFQKKKKSNLPVPEEL

SEQ ID NO: 146217 - protein, 152 aa, Heterodera glycines
MNFHKSEKANAILLEAAKRETERAWKDVVALEEEVSDFAKSSRETLNRAIKSREKAPYANGVREFYIKISDSIWEIFTILDKINVESEKAEAVWRELEKCKDFELATKFEEKSINALTEAHRLHFESRRVHNKIRAYENRLQNIVWEFIGQV

SEQ ID NO: 146218 - protein, 121 aa, Heterodera glycines
MSMQQNQGSDDVLPMWAVPDFDEMGQMPQRQKQKKIPTLKEFRNQWKERRLLWEREEAEKKDPKTWKKRTDEMKKICEERLEQSKGAGGSNKRQEPDKYTWNWGELQRQEREYLDGGLWGK

SEQ ID NO: 146219 - protein, 299 aa, Heterodera glycines
MAFAQNEQFGLQTAETLRQTDAQLLTTKHAFSPTETSADSLFKSVVAAVTAQATSHQPSTSSSQLPTQQNLASASIPQPPQQQQSISIIHPQQQLQSQLLTQQSLVSTSPPSPPPQQPSASSMSQQQPSQIRQHQPRQFIDSEGRLTAHVFIDEDEETETQQHQNQQYSPISDSPLEGVPPPDNDNQITGLMTSILNRIPSSSGSSASTTNTSKSGHELRKHIRALYAELGEKHAEQRDRAKNAIDSKIGTSSTCSTEGGQKRSTTNTDKIKKKVIQHLKFKHSHTCLLCDLIHAGYQK

SEQ ID NO: 146220 - protein, 345 aa, Heterodera glycines
MDLHIDDYLNPFYDSHRNEPFLCDIELSLSSFAVWTNLYNRFDVGIQPREYLSDIFANAKLHMQSMKKVMAMPETDSECLRVSFAWQPLLNADECANEKCRREFLSRIERRVHCQWPVKNMKVHVDKYLQTLTSVGILLDLLVPHVEEEQTRDAVPLHIFDFVCLASKSATVREALLQFSDKLWVALTTSPSSSPTVSSPSTTCNDAAISVDDDKSEEDKEDEQEGKERQKDGGDDEQRRRQHGQEQKQRPGGRRRMGGVRNIGNTCYLGAAIQTLANVSLLSGFLLSKWFIGLIFEFIFPFFAPPNSEQQFRHLPLVRHYVQMLRSLLVAKETASPVEFKVFPE

SEQ ID NO: 146221 - protein, 53 aa, Heterodera glycines
MMDAGAILIAISTLPNMAMSYAGDDSAYGVTNNPHDTRRITGKHFNPISVNEG

SEQ ID NO: 146222 - protein, 88 aa, Heterodera glycines
MASHPALVDSAKMCIPTVAIVDSNSDQKGKKSFKELQQLHDKNGPLRLIRIDVSDDRSIRTAFGQVQKQLVDKGGLNLLINNAGILLK

SEQ ID NO: 146223 - protein, 83 aa, Heterodera glycines
MFATLKTTSSSRHLLPILFIFCCCYRAFSNFGDAAIVPLSALGRYKVSLGELNELLTEQQRSADAVPSTGDKLPNYATVGQKK

SEQ ID NO: 146224 - protein, 62 aa, Heterodera glycines
MCQPFSLPLLGGGIVPLPTARPSQIGVGLQFQAELPENDDEQLQKERPKAPDEEDPYFSILN

SEQ ID NO: 146225 - protein, 53 aa, Heterodera glycines
MRNSKILNLRLSRGPPPLQHVQLLSPKRTARFGTIRCQLHQCNCEHKMDTRHG

SEQ ID NO: 146226 - protein, 197 aa, Heterodera glycines
MCQPCELYARKQKKHRPVQLLLENDPNYADDLSKQRNEHDNAGTTAVVGADTTGAKAAEVAPRRHYPCHDDRNCMLACEAATRVRVQQQQRASWHFNIKEEVPMTPEDKAGAVAIEQSDDEAADGSNVAEGEARNENGGVGIGGGGEQYNNGDKCLQQEEEREMKQRWAQGKDDSSNSFSKRSQILGKMNSKAFKKL

SEQ ID NO: 146227 - protein, 32 aa, Heterodera glycines
DYFSKHLVDWGIIGDYGINRDWAIIRAYTVFS

SEQ ID NO: 146228 - protein, 45 aa, Heterodera glycines
MFRINIIVCERIKNFPLASVLTRFRNIAFEPPTKGIDCINIFILS

SEQ ID NO: 146229 - protein, 34 aa, Heterodera glycines
MSGAVPFLKNKIINTRVQLKLFSLINLALLLIND

SEQ ID NO: 146230 - protein, 135 aa, Heterodera glycines
MRGEEKHIGKNIKEIEQNIVNYQEKIMNFGEEVNLNLNFKEEILKFILPSLIAECITSNLLYGKKIEWKMLEMALEKIGKKELWEEIEKIYNEWKTKFEKKSKNDDNVMEKMEKMKEKLEELKDEIEEEKEEKKK

SEQ ID NO: 146231 - protein, 628 aa, Heterodera glycines
MPTKVEMSKGISVLLRRGGEDEDGEVVDTPPRPPAPPPPPPPPPGKCPPRGPNPPAPPPPPPPGRRPPRPPSPPSPPGSPPPRPQRPPRPCRAAAPSRRGGLIEQWRKRRYDIQLRRPVVRDLLAEAAAAPLPESDDEYDYMLESGFALPAPSQYYGDLPVLPDNADEIEEMDTVQRRIATRRRLKKDLADDDDDDEVDLQRKRNRIYHPSPPRLPSPPRKSEPRPPPTAKREHQKQTKAELKSSTSKKTGHPTPTPRPKREPEFGLDPRPSTSRQAGYNPPPSTPKIKHDPTKRPKPYRIPKREPKIERTPQQQQQRQPPPAAIVEEMPLIPPPRRGTKRRHPVNDDDGDGEVRIRKRVRQPRRVRVQYSPEPGPSTSAQSDEQQQQQQQQQRELFAIPSNQLTMTQRIERLYIKINNYAEQQNHPDGTGNQEGISPEKMELINTTLDKLYNNPSSPAAFAGVTALWKEARKKIKHLRKKDVQHYLDGHRTYTLMRPRRVRFPRAKTIAAGFMTDVQVDLADFQALSRHNRGHRYLLVAVDVLSKRLFVVPLRNKRAEEMLEAFKQLIDQMPMAPHRVFSDKGTEFKNRLLKEFFEEREIEKHEPVHSTVKASIAERAIRNVKQRLY

SEQ ID NO: 146232 - protein, 59 aa, Heterodera glycines
MENSQGELEQFYSTAVKVLDRLSFFLLKLDCKASETDASAVLEIISNKGLKLFSHLNHY

SEQ ID NO: 146233 - protein, 48 aa, Heterodera glycines
MSNRPTEISGGDEDADEEEIDGWSGDEEDELEPINPNGHSLRFHYILP

SEQ ID NO: 146234 - protein, 25 aa, Heterodera glycines
TCTCGVVVKLSTFHNFSPGFNSPLG

SEQ ID NO: 146235 - protein, 47 aa, Heterodera glycines
LGGNGIVDDYQVMRHMVNLESVNTYEGTHDIHALILGKAITGHQAFQ

SEQ ID NO: 146236 - protein, 26 aa, Heterodera glycines
VHTATGEETVVEQAKVGWRARENGRT

SEQ ID NO: 146237 - protein, 47 aa, Heterodera glycines
RCSEIEHFSACQIRHKFVRLCGNAFHGFGFRRQTASPSHHSCQFARH

SEQ ID NO: 146238 - protein, 190 aa, Heterodera glycines
MGLKYELINQRQGFVEKCDGCYFNVFHSNVQFPPIVWPPPEGASEDVVSQHLKPFHDVLRFISANCLTIVQHPELYDQAKKTLDAVNLLNGVLDQHRRQQQGQGQQQQYTGMTVLENSDNNRRQTNNGDEEIYISDADDDDDGIPFLVRRFLNANIADEQTVTAAEQPDYANGETSMFCDDVAEMECQQN

SEQ ID NO: 146239 - protein, 154 aa, Heterodera glycines
MSDPKKYNIEQALQNTERAIEPSLDWQGPTQQQLEEKSMQEENSPTAPSPFQHQLAQQKQQPSRLGQHNSSQGQHPQMLPTPLHPPLELFEEGLRYTATWTFAAMFNKPLEAERIATTLSDASMLLNMCVQILNRRPQRLQHGLQHPTSSSQQH

SEQ ID NO: 146240 - protein, 172 aa, Heterodera glycines
MFKKMVKMFSKNKDKMKVQEENQLEEKYRNLNSLKETDPAMAQIMEKLQMHIKEVKSGKISEPLKQYFIFVIQFLAKRHHISVAEIVPIQNMKTKKVLTELVKLVLEEKRKNKQKNGKNKDTNGQNCQSENKFKSNKAKEERMLRLLLTALDNVNGTINLSMDGLFHYFFVN

SEQ ID NO: 146241 - protein, 23 aa, Heterodera glycines
MHRIIAAVKKLVVGSVLAVRCTL

SEQ ID NO: 146242 - protein, 34 aa, Heterodera glycines
GAFGGLTQLWGAKIPRRIKVQAIGKLFPKDSGSP

SEQ ID NO: 146243 - protein, 18 aa, Heterodera glycines
YREAIPEGFGLPINLGAS

SEQ ID NO: 146244 - protein, 83 aa, Heterodera glycines
MMVQWNSLLSQVVTEVDHPQPILEHIKETAEFSVKQFRDACLGMISELTRTSVDWQLNFPNEMAEQVISVSSILGTRLMQNNV

SEQ ID NO: 146245 - protein, 46 aa, Heterodera glycines
VTLRQIRKRAAEMRRRMTRTTDSHVQVDTKDRGTIIRPLDASFSQP

SEQ ID NO: 146246 - protein, 87 aa, Heterodera glycines
QVGRMCAQHALNMLLQGDYFTPDSLASIAQELDQRERAMLRDESEFQSQNYDDSGYFSIQTADEELFGAATPVISQAEELDIQERLT

SEQ ID NO: 146247 - protein, 34 aa, Heterodera glycines
HSRSIIFNPLNPTIRILGSRCSLASIHPPPQQQQ

SEQ ID NO: 146248 - protein, 90 aa, Heterodera glycines
MPSFGKMPLCSISAAPLSFSLTPSTAPARALALTLRQSDRTAHIRHSRTDDLETNICTDITTMKADGTTDIDEEMPSEHRLTKVIAKQIS

SEQ ID NO: 146249 - protein, 77 aa, Heterodera glycines
MRPQRRRLRPIQLFQLVLLSLFGILLFAKVIYKTLFSQEMDSEKGGIVFFAIFMFIIIILCIREVYKGIDNNLFIFN

SEQ ID NO: 146250 - protein, 151 aa, Heterodera glycines
PNCPSPRRFLEAVLAYTAAPKIDVITHSVGVVLARKAIKGGELIATDGNCSLGNLSDRVDTFLGIAGPNIAGPNYGLCMCQLAQTMPAWCNALDGLYPGYSCEDQLLCGYTQTPCDQVNYSAFLEKLNRDPSREADYVFAFWKTAELILNL

SEQ ID NO: 146251 - protein, 253 aa, Heterodera glycines
LDFQKCTGRLLRIRSGSQFVDKIESGTEGALLLDRTCFYAEQGGQIYDTGVLSKTDDDDTWFSVDTWFSVTNVQVRAGYIFFFGIAEGTLHVGDELNQQFDEDRRWLIMKNHTGTHVLNFALQKVLVSVDQKGSLVASDRMRFDFTSKQALGAEQVKKVEEEAQKLIDTNESVFSRPCVLTEARDISGLRAVFEEAYPDPVRVVSVAYPDPVRVVSVGVPVDRLLEDPKSELGHGTSVEICGGTYVRNQILNF

SEQ ID NO: 146252 - protein, 105 aa, Heterodera glycines
MALKTGDEEPIRLLGKRVNEFEQVGFGNQGLVFDCLCQELNSQLLPYWRRDNLREQVKQLRMAMKKLKKAFKKSTKDEENGTETAEEKRSKGKSGAKKKAEAVEN

SEQ ID NO: 146253 - protein, 224 aa, Heterodera glycines
CVEHCEEGFYADGDKCKRCATDCETCSQAELCDKCHDAKLLIDVKHYGHLDHGRCVATCPEGLVADCKRGTIQAKCVLRTIQAKCVLRRNSCSAGYFESAQSVCLECDKSCATCHGPGPLQCDECAQGFANPLQCDECAQGFANHTMGYCRQCCSPDQLTQKDLHCEDCSKSYPEFPTKSHLSFLFWPTFSQSLASSFASFLFVSPIDLLLFDWSQWKSFSRVN

SEQ ID NO: 146254 - protein, 124 aa, Heterodera glycines
LFEYPKRTLEKIDFFVFGAVPPNRCAQIYGETESFGSSFPIACTLILRWIFAPHNCLSTPNGHLKKSIFFVFGAVPPNRCAQIYGETESFGNSFPIACTLILRWIFAPHNCLSTPNGHLKKSIF

SEQ ID NO: 146255 - protein, 45 aa, Heterodera glycines
MHHHPPNHEKAINLSILTVSGPALQPYFPPEPEDFRFREAPHQGE

SEQ ID NO: 146256 - protein, 179 aa, Heterodera glycines
NGGGFDSGGGLIWPLRLRMAAGAQITHSQREEAWPFLVRGAICLVYSDNERDSSLLNSWLIASGHNFLEGFSVFSRTKLSNNRSVMPLDVRGCTRATLAKSACLPSPKGVGKPVKICRDWDRTLQLLSVNEEFLVGASHQLALNTSLPFVHTARRCPGLSHFEKFGDGCSGRSVCRLEP

SEQ ID NO: 146257 - protein, 121 aa, Heterodera glycines
MSKDCFGVERLFEKEIRRRNRLERFARSAANSSSSFGGRIGSDENLQNPNKEGQHKLAQQQQLTMKISHPKMLTKNENAEDREWTPREEAKKRRSEGGYRFFGVRKPMAQKARDEMIKLRE

SEQ ID NO: 146258 - protein, 132 aa, Heterodera glycines
MNLYTSTHKKNKVIKLFVKNPELPYFTKPPALLFHSLRHTHVELFGDKEACANISLGEFGILDGFAGPVPTNKTALFRNRSFWGYLLCMEEPITALSYDMLAGLPQQGGKLGVIGHKDNDKCPFAIRLVMMP

SEQ ID NO: 146259 - protein, 69 aa, Heterodera glycines
MASPSLMNRLIFPFLLGVLLQNSNNIVDGSGIVDWTTGKQLNSVESRKAPVVITESGEMCANKFKLLRS

SEQ ID NO: 146260 - protein, 75 aa, Heterodera glycines
MGGNAKEKMLRFNDTVKIGEATADYDRKTLPNDEVVPLLTEQYKADAHNVMEMYMEDKKMTCMLLRFNQKNLDKL

SEQ ID NO: 146261 - protein, 104 aa, Heterodera glycines
NGVSKNRNYAQKAPQTILALPIPSTIAFIHPIMNAKIIRVPKIACDLRLEKNGVSKNRNYAQKASQPILAHPIPSTIAFIHPIMNAKIIRVPKIACDLSLEKMV

SEQ ID NO: 146262 - protein, 413 aa, Heterodera glycines
MHREIRETMHMQLHRCSDSWCGPSDPIYGRCKKGFPAPYSKCTILRPDRPAMYFRPSPTDGGAQLEVNGLIYDNSHVVPYNPYILLRYRVHHNVLFAYGNKANIKYALKYPFKGPGHCYVECKQESGNKIGIDEPAQYAKMNFRGATEAYAIVHSLPFAKLSHQVVKLSIHMPNQQPIVYRAFQLVSKAQQIQQGELPETQCSAYWKQWQNEWKHDPKLKDMLFEKVPEHFIWAKDKWNKRKYNLTKRPPIGRIVPVPPSDPERFALYSLMRHFPGDPDHLKMVNGLLCTSFTEAAIMHGLLEDDKIWDKTLAEAALSRWPDQMRWLFVSILVYGQPSNAIELWNKYNDQMYNPQGIITLAQHKVAELEALADIDWRLHSCFNLSCVHFSLPDPPTSIAKNTDAAIEEFFLWR

SEQ ID NO: 146263 - protein, 28 aa, Heterodera glycines
MTNSGILHPQNLILNIELMLNLIWMRLD

SEQ ID NO: 146264 - protein, 21 aa, Heterodera glycines
GPGSRSRVLKSSGPGPGPGRA

SEQ ID NO: 146265 - protein, 19 aa, Heterodera glycines
KNSNFNLYQVKIIQNYLVF

SEQ ID NO: 146266 - protein, 125 aa, Heterodera glycines
YYQSLNTFGISYKLCLFLFKYTEKSPREVSMKKGDVLTLLNASNKDWWKVEVSDRQGFVPAAYVKRIEPGSQHHHQGQPMNTINAKQSQIEDQYKRLLMLGEQRKRKLEEACKAYQVMRREANDL

SEQ ID NO: 146267 - protein, 79 aa, Heterodera glycines
MAFSLVSLLRRFLPPYHQNLVYVICGAHILYGSIALAVHIFMAILCIIPQFCKVEVSEGNRVQELDLCINLARIYLSNA

SEQ ID NO: 146268 - protein, 39 aa, Heterodera glycines
MTFGGKYNGERDNAKGSYRPKSASKDWYADLQGHNGENS

SEQ ID NO: 146269 - protein, 23 aa, Heterodera glycines
MDEFLRNFLGVYILRTAVDFDTE

SEQ ID NO: 146270 - protein, 58 aa, Heterodera glycines
MGEGRAWPLLFCLLSQAVLAHNTFGDTFPARSTYQVAALPKNGRVEIEAVAIIEDTKH

SEQ ID NO: 146271 - protein, 82 aa, Heterodera glycines
MLHNGQYCSPTNTTLNGAFGRMMSTRKWAKRWLLTLSAGPIDNPDELGEIYDSISYAKSNSIIRMRFNHLGEAISKRPFGIT

SEQ ID NO: 146272 - protein, 103 aa, Heterodera glycines
MSKVEIEFFECTRVVHFVFFFCFCVYQFCAAAGYESLLSVAHNASVPRVAQQKAENAQFDGDVAGHGPLQGTDQEILQHSEFGSGNFMNIYFAFPIIGHFNIN

SEQ ID NO: 146273 - protein, 39 aa, Heterodera glycines
MYYKEPLAKQRQVTNLVETILCHVVEKMSSIEVRRVCEE

SEQ ID NO: 146274 - protein, 182 aa, Heterodera glycines
MFRVCAENAFGRSDPLNTDVDRPGLPEGPITYPATTNKEVSVQGPSVVPLKSQRANEKEKDAMQTRTPKTAQPSSAHGIGPSLDSSDQPLSSTARRRQPRRQKSARKDATDMQCCSKNLPPRHKNTERTASGGGRQRVGSTAADRPAQAAAAAYAGDEEAPNEEEVADSEGEQQLLDMTTVE

SEQ ID NO: 146275 - protein, 183 aa, Heterodera glycines
DDNPKDDINGVITGDLLIVMAQIIVAIQMVWEQKYLMQYDVPPLLAVGLEGLFGMIVLGSLMVPMLFGMIVLGSLMVPMYYIRVPATFSRDPEHRLEDVFHALEDVFHAFAQIHQRPIILAPLFLTITSIAFFNFAGVTVTKRLSATTRMVLDSVRTLLIWAFSIPFFGERFIPLQVSLFQLP

SEQ ID NO: 146276 - protein, 257 aa, Heterodera glycines
MENAKISLLYQLEQRKVSKLERENRALRERINGLLEKQDDERIELLVADRTRRKLVQLRAITERTIKSLESGINEFRAFVTDINEAMDEEENKGAIQPLKLVDISNESDRILRNFSPKLKRIPESPMVLSAISTSKSGSNSQSESFRTGLEEEEEERANGMEEVVNETPHLDMMETSGTGTEVENASNSKGKIEQRKSAIAPICSITLRQRSSAMKFAPSEMKRTHSGHYHIKAGKKQEIDLGNLGFMDNILTCYFE

SEQ ID NO: 146277 - protein, 231 aa, Heterodera glycines
MQKNAPEPEKLTSKPIGTLNETKKMEETNATKAGNRSQEPFMKPTTIVGDHSNETEHTQKPILTYTPEPSPEDTDEPEESDKTEQPTTKNSTSEPIENSTTSTDRHDETETYKPIVTETTKMPSSKPIEKLTTTTDDYDVETSESTTEKKEKIRSGKPTKSTRKTTKSTKSVTAHSTETLTNTTTASAMPDNGTTTEPSEGTALPPEQSTAAKFIFGFEFGRIFFKYLKVG

SEQ ID NO: 146278 - protein, 122 aa, Heterodera glycines
MRILGIGIGVDEKCADATHAQKRLHADGLVGLRCRQFDNGASAGAVPLRSSLTGRSTLAVNPSHKAGAVVPVDQSVVAVPSYDDDDDVTHQLSLTVDCIINIYLRHSSHEYGNKETTHKNCG

SEQ ID NO: 146279 - protein, 235 aa, Heterodera glycines
SDIRGFSPMAANSTPYQVVAFLNDMFSGFFSGFDAIIAKHDAFKVETIGHTYMVVSGVPIGHTYMVVSGVPRENGNAHVQHIGDIALKMRTFVSNFKVTHRPEEIIMVRIGFFVSNFKVTHRPEEIIMVRIGFHSGSVAAGVVGLAAPRYCLFGDTVVGLAAPRYCLFGDTVNMASRMESTGMANKIQESTGMANKIQISEPSISEPSYNLIKCFYPPFIVIERGKVEIKVNKKG

SEQ ID NO: 146280 - protein, 15 aa, Heterodera glycines
LKAIHCLPVLGTAKH

SEQ ID NO: 146281 - protein, 47 aa, Heterodera glycines
MTLRPEFLLRVLPRSKSMMAMKFRSLKTLLKQYSYQSNMIRLAMINS

SEQ ID NO: 146282 - protein, 46 aa, Heterodera glycines
MLAGLYLYLEELQKLATFQYQLFPVQSPLNNSLGFDLSAGWPADLL

SEQ ID NO: 146283 - protein, 95 aa, Heterodera glycines
LFEYPKRTLEKIDFFVFGAVPPNRCAQIYGETESFGNSFPIASTLILRWIFAPHNCLSTPNGHLKKSIFLFSGQSPRTDAPRFMGRPNPSGVASL

SEQ ID NO: 146284 - protein, 125 aa, Heterodera glycines
MDLNNGFYDREEDKVKLTIDLTTVDEPKVDKFNLDQSNSKGTLFMEIEKVSEFAREIIGSERKSETVHIKGLPWKIWAGIEKKNESTEKNEKWMGFLLLCDAPKEGQCLQFFGLGFIALILLGFT

SEQ ID NO: 146285 - protein, 78 aa, Heterodera glycines
MPFSTNGRISDRKKGTLLMDIEKVSEFAREEVGSSRYSEKVYINGLPWKIEAELNGLVDSEKWLSIYLLCDATEKGAN

SEQ ID NO: 146286 - protein, 273 aa, Heterodera glycines
MSMDRMKHLLSTGEHSDVHFLVLPAHQLILKSVSDVFEAMFRFDAINYCCLINFANCCLAYIGKNADTLLKSDAFLQIDQKLLCEILECDELQIRGEISIWNAALRWADEKCRENGIDCSAENRRQMLGPALFKIRFPLLSNEEFTKKIVPFGVLSKDEVISVYQFKSLPNCHGISDGIFPMQFPTNGRISDRKKGTVLMDIKKVSEFAREEVESSRYSEKVYINGLPWNILAKIKTKNGGTDNEKWLGIFICCDTSKKGAKLLIVNIYINNN

SEQ ID NO: 146287 - protein, 174 aa, Heterodera glycines
MSAKIIRVPKIACDLSLAKNGVSKNRNYAQKASQTILAHPIPSTIAFIHPIMNAKIIRVPKIACDLSLAKNGVSKNRNYAQKAPQTILALPIPSTIAFIHPIMSAKIIRVPKIACHLSLAKNGVSKNRNYAQKAPQTILALPIPSTIAFIHPIMSAKIIRVQKIACHLSLAKNG

SEQ ID NO: 146288 - protein, 95 aa, Heterodera glycines; identical to SEQ ID NO: 128262

SEQ ID NO: 146289 - protein, 68 aa, Heterodera glycines
MDAISEEELMAQNAVEIARELQAIRGLTDSSDSGVHLQQQQQHELQLRHRRPFPAQQQIHPNGANGGI

SEQ ID NO: 146290 - protein, 41 aa, Heterodera glycines; identical to SEQ ID NO: 129572

SEQ ID NO: 146291 - protein, 41 aa, Heterodera glycines; identical to SEQ ID NO: 139690

SEQ ID NO: 146292 - protein, 70 aa, Heterodera glycines
HPFDKYKKKFEERESHKEDSTPQREESFTVPKVEVEQPKVEEEEAAAEEEVEEEEVEEEEEDEEEEEEEE

SEQ ID NO: 146293 - protein, 66 aa, Heterodera glycines
MDQKETLTAEQLQKVLLDAEKSGEYSYEELLPIWEEAKGMIENEEQMVSLYTTFIYMSRRFAEREK

SEQ ID NO: 146294 - protein, 77 aa, Heterodera glycines
MHFQRYEIFSVTRKRPIPFKPPQVVQRHVAEGLFVAIVFQRKLKNASSRDADILSYEQFDLFVADLDESDLFNVTIF

SEQ ID NO: 146295 - protein, 62 aa, Heterodera glycines
SLSQMESARTLSQCLSEMARHANNETEPQRNVIKRKTSCSSGDLQQNQPSFASEQMDDNDTA

SEQ ID NO: 146296 - protein, 756 aa, Heterodera glycines
LIIHNIYIPPNSSCNNSKNINGFLSGNQDTLIVGDFNAHHTTWDAISPEDERGVDFAESIDQHPFVILNDEDTPTRVDSTILSSPDISLISDSLATSTTWKTTAALGSDHLPITISIHQIWSHTPRRTFINFSKANWNNFADEVDSLLKTLPKPTNIVHGERRLRSAILTAPAHHIPAGRIPKIRPSFPSDMVHLANERDHLQLTDPANHRIHDLTNTITKRVCQFRREKWLEHLKRCPRNSRQLWKTIKSLNNNTKEQNIPLHFNNLPCYDNSKAASLLNAAFHPRPSGRPSKVNRQANRHIDKAMRNSAEFASWTATTVQLAISNTKNSTALGPDNISSSHIRHLGPVAVKYMADLFNLTITSGIIPQLWKNARVIPIPKPGKDTTNPSNYRPISLLSPVAKVLERLLLPHLNAHLPPPANQHGFRRGFSTVTALHSIHKYITDGLNRQAPVERSVAVSLDLSKAFDTVDHRLLIHDISNTTLPPIIKRWIRNYLGGRQAQVVFRGKTSSHRTIRMGVPQGSVLSPALFNFYTATIPTPPGIHIVTYADDITILARATSIAIASDKINAFLQDPRIHTIDGPIPFLCNPKLLGITFDPLLTFNAHSVELRSKIQKRNNILRALAGTTWGQSKEVLLTTYKAIARSLLNYAAPIWSPQLADSNWSILQRCQNSALRTITGCVSISSADHLHAETSILPVKDHNFLLSRQFLLATRQPGTPPTHPARRKWSQLFKTVNPKRKPPVLFIFNSLSMDN

SEQ ID NO: 146297 - protein, 106 aa, Heterodera glycines
RIHTIDGPIPFLCNPKLLGITFDPLLTFNAHSVELRSKIQKRNNILRALAGTTWGQSKEVLLTTYKAIARSLLNYAAPIWSPQLADSNWSILQRCQNSALRTITGC

SEQ ID NO: 146298 - protein, 48 aa, Heterodera glycines
HGERRLRSAILTAPAHHIPAGRIPKIRPSFPSDMVHLANERDHLQLTD

SEQ ID NO: 146299 - protein, 353 aa, Heterodera glycines
VSLGPADCSSSSSPFRKEETSNEKKKEKKAEEVMPKKSKESTSKSRKKNESSGEEEDFDDDSDGEEEEYQPKVRRREGKRMKKDDILQKKKQKSDPSPAKKSDSKKSTKTTKVTKSSSQGSPSKKRVKKQEEEEEVWRWWEEDESNAGVKWQTLVHKGPVFAPAYVPLPKHIKFKYDGKEMDLSLPAEEVASFYAKMLDHDKEMDLSLPAEEVASFYAKMLDHDYTSKPVFNQNFFKDWVKVMTKAERGEIKDLAKCDFRQMHAFQMHAFYVSESEKRKARSKEEKKAEKEEKEGEGKVYGFAMLDGYKQKIGNFRIEPPGLFRGRGDHPKMDHPKMGSLKKRVQPEDVVINC

SEQ ID NO: 146300 - protein, 233 aa, Heterodera glycines
MPNSNGKEKALNECAESIEVISLKEQKANELNIDKMKTDVANTTRKNVLEFQFIDAFSLGKEKYCKFVDRSVQVESDMDFANLKVEGIEKEDENLVESVSAASIYNGKESSISTTANSTNSTEMSVGEVNGRKVARILAMSCATSNKCNHSLAEERRIVITSRRQSPQAEDDELVEVLSAKTLTEERMAHSGGGQKSGKNGQRKGRNGEEDEEQSTLDQVTPIPTTLELSNST

SEQ ID NO: 146301 - protein, 109 aa, Heterodera glycines
MCSYTMFLAMCLLFAAVTLATSNGSEEIIADANNGDLAMTVRVVVDLWLSFFWPWLLSILKNDKILLVYKIKIGGCECNSWNALEEICFVQHPFELVQPVHVQPMLQWM

SEQ ID NO: 146302 - protein, 130 aa, Heterodera glycines
TEEDLFADLWKNLLIPMKPQKLAINYERHGIKRENWIHQNIHNFDKSLLTTSLKAEDVSSERQNEEDIKPKILEEIKKETFSDEEQNAMNVRTKLKFPKKEIYDEMISDGIDEKQAGDQSNSCSSKTDDL

SEQ ID NO: 146303 - protein, 51 aa, Heterodera glycines
MASAHQQPFLEAPNDKMSTPLFQLISAAVQPKAAIGKRGETFNLDLNKLCT

SEQ ID NO: 146304 - protein, 259 aa, Heterodera glycines
KMINLSSDNWTGCHSAISDALSRHSTGADAAYGDSELDKKVERRFCEIFETELAVFLVGTGTAANALSMAYVNRAGGIITAANALSMAYVNRAGGIIFAHRHAHLIEDECGAPEYFTGGARLVGVSGAEGRIEPEALEEAIQRYPPKSVHAGRPMAVSITQSTESGTLYSLAQIRRIANIAHSHGIPLHMDGARFANAMAALGCTAAEMSWKSGVDILSFGASKNGCWCAEAILVFNDLQQVISDGTSLSHGFASKYPF

SEQ ID NO: 146305 - protein, 18 aa, Heterodera glycines
YREAIPEGFGLPINLGAS

SEQ ID NO: 146306 - protein, 306 aa, Heterodera glycines
TSITRDSILLLFITWTQFLCIPITGTHSPAFQSLGLNPPAVQSLGLNPPAFQSLGFCSPAFQSLGLNSPAFQSLGLNPPAFQSLVLNSLAFQSLGLNTPAFQSPGLNSPGLQSMGLSFYAFQSLGLILLHFNHWDSTLQHFNHWYSILLHFNHWDSTHQHFNHRDSILQDFNHWDSTLFSSIPITGTQHTSISITGTQFSRTSITGTLLYSPAFKSPGLSFYAFQSPGLILLHFNHWDSTLQHFNHWDSIHQHSSHWDSTHQHFNHRDSILQDFNHWDSILLRFITRTQFLCIPITGTHSPAFQSL

SEQ ID NO: 146307 - protein, 42 aa, Heterodera glycines
MARKDFRFPTFLGSEFRLPKFLMKSRKFFKFFFQKTSKFCTI

SEQ ID NO: 146308 - protein, 249 aa, Heterodera glycines
MECLLSDDQRRRSHEQFRRGRTQATAEGFYCSHPSVWRFIETLQKQQKLRDSEVSKCLAGFDPPQKAKRYREADRRILTLTRNYHLLNIGDPDRLNVDNYNLHTIINFLAAICLECQANGKLKYEYQLAKGTVKTLHTHLHAIHENSEFTEKLNSLESKAEKDKTKTEDNLRLSVFQQTAYFRLKTALPIVYQRVRQKIKDELKESAFITLTTDCWSGSTCNLLWLSSRGMKTKIAFCQCRTDLALLIY

SEQ ID NO: 146309 - protein, 53 aa, Heterodera glycines
MGLGQNLTFNFSYIVFYGGGKTRKYQNFNVEMLFLSPFLHSICAEKYVNPYNL

SEQ ID NO: 146310 - protein, 78 aa, Heterodera glycines
STGYREAIPEGFGLPINLGASVRGDCPENKNKSIFSSVRLGYSNNYGEQKSTQIKVQAIGKLFPRIRSPHKLGASGRG

SEQ ID NO: 146311 - protein, 60 aa, Heterodera glycines; identical to SEQ ID NO: 144770

SEQ ID NO: 146312 - protein, 30 aa, Heterodera glycines; identical to SEQ ID NO: 126994

SEQ ID NO: 146313 - protein, 134 aa, Heterodera glycines
MFPCQHALRSICEYVEENRRWAISTLLTDPTGFARITFRIPNIHARKVGPNLFRVWPCVQINSTDYSFAPLEEINPGKTKCFDKIPIRFKTAGKERFAYLDPSSMIVSPTAKMAPCTHFRKQVLRISGDVMEVD

SEQ ID NO: 146314 - protein, 154 aa, Heterodera glycines
MDIPDNPKGVRRTTSACGHNTVYELRNEEEMSEMTISVINRKFWSGKTAVKVSDLEAAHNELVKLEDGMNRSIRALNRCMDKKTKWVSEVVSNANSNFEIVKAQIETLVDRIDDLERANDGTDADSTVREQDDSSQFEMPSKDNKGTNRGLLST

SEQ ID NO: 146315 - protein, 61 aa, Heterodera glycines
MARQMSLPLFKRTKPTVSIFTLASNGDLVCRFADDVFSSVVPLMANGTDVPWHFVNETKDG

SEQ ID NO: 146316 - protein, 60 aa, Heterodera glycines
MCLRNSQLRTTRRWPIQPMDNQTESSPLPNCPQLTGPDGAMTLLNTIKMGVTQKPSNKFF

SEQ ID NO: 146317 - protein, 95 aa, Heterodera glycines; identical to SEQ ID NO: 125597

SEQ ID NO: 146318 - protein, 24 aa, Heterodera glycines
ITGVSIIAVLFLVFLRPSQNLVRF

SEQ ID NO: 146319 - protein, 80 aa, Heterodera glycines
SKNCNYAQKASQTILAHPILSTIAFIHPIMSAKIIRVPKIACDLSLAKNGVSKNRNYAQKAPQTILALPIPSTIALYIPL

SEQ ID NO: 146320 - protein, 16 aa, Heterodera glycines
WAKLGLALEAEAEGEA

SEQ ID NO: 146321 - protein, 107 aa, Heterodera glycines
MKNHSALQFSWAFLRLFLCWLTDKAQKTEGGQKNPAIARPKRGHGYGYNNWGGNGGYGYGGGWGNNGGWGNGGWGNGGYGYGGGWGNNGGWGTGGYGYGGGYGYGWK

SEQ ID NO: 146322 - protein, 90 aa, Heterodera glycines
MSVLHKISAAKSRRNSLSEQFHMAEEICEVLEEAKIFIQRQNSTGFPPSDDFLLLCSLRDLLENSLVLAKSAAEQTNFERRSNETCKLFF

SEQ ID NO: 146323 - protein, 63 aa, Heterodera glycines
CIRDNNLDHQLGTQLCGYPSTVRHRLTGTINSYVDNHSWEYEIVRAPHFPIPPALFFKLRDMH

SEQ ID NO: 146324 - protein, 130 aa, Heterodera glycines
MAVLENLFCAAIPTVKQPQKEANHWHGQWQQKMLANSLFQLRTAQNGDEIGKNNAQKTKEFERTTEEKFKKGFEKAANNRVKHSDWFKRRLAKNATISSENFVPTKMPAVKRAVVVVLCQWLNRMGSANN

SEQ ID NO: 146325 - protein, 122 aa, Heterodera glycines
YSKVKLSCAEDELCTGGSFCGENSICMCAPGESVQIENGKAKKCMLQLEEKARDSSQPVKAEPGQLCVEGGMECSGGAKCQNGICSCPEGTSAFGTTIGHSSVVPLPFLSSLFFFRPHSLPQ

SEQ ID NO: 146326 - protein, 1053 aa, Heterodera glycines
MGKSIHYQHRSLLIGHPRHQVLPGARCDTQKGLDCVGESHCFYGICVCLYGLVNIGNECANANVLEKVAPGKRCLPGQHCLGMSKCVKSKCQCEKGQKLDSKLRRCIKVANAATVTTPLLAFPSGAEVVVGPTSIVEIPLGNSADGISQSDGARERPTKFIYAIPAALAAAAEEGKFQQILTANQMSINLMDGEMRSLISKLIEQQKQSNETVVKRQNICGGESGPTNCQHFPPIVTSKLPFSKPIQQQFFQSVPKSASSLQNPFQSIQLAASFNSPHLQGQPGFFCAAGNVCYGGAICLANLCICRPGFRPIDGFCQIAKVNLGEQCFLDEQCKANGFCIDGVSFTIACHSVPFSAFCYAIAVPNSVPCVALSFAMFSIGTVAQRGPSLPWAKTVPKRKRADGTQSAEHSVECANVQLAWKVIRSLGLSSSDCHKFAFCDNGFCSCKIGFERIAGFCLPPARPVVDDPKAYFDPEKMNKNANHLDVEKDNSEGQFWPSKRISPIEVFQAENRREKAGGSWTDEQRMDDSPNLGDNGRNSAETAFANAENASPFPSQQSKTFAFSRHFPFANSQLRFVSSEGNEFLSPNSKGQFQQLMLLPPTIGASFQHFPAHSKGKKATEKAKRKSAKDKAKEKQKSGKQKQNGGNEVAKPGEYCGTNEKQCAGNSKCLSGWCQCGEGAHVQTEGMCVEEPGKSLPGERCRPPSVICDFGAICGEESICKCPAHRKLLTGLCVRLALPGESCANGEFCADAAICAPGLNACVCQVGWNVRNGKCQKGETLRKLMTEGGETWNGQREGQIRPKSHMASSVAKLSLLLTANSTQTVPTFATPIVRLSHGNAPVKTAFPSCIRPFVFLRTKSNCRAMSAFRVPTFVVGSRGAKTDDVLALGGTLKLWKGDVCAKRAKRGQFGEIPRGDSQWQRHWTAQRTGKEKKEQKMERRRRKEGTEAEVGEEEAEGEADLERDYALGEPKSVAAPKTEAIVGGAALITAAANSSAMPCHFCRALFVTRLVSQRLAFLNGVTKCVAEEEKKGKGAEKKTERRKRGEMIGETE

SEQ ID NO: 146327 - protein, 181 aa, Heterodera glycines
MNGSTPRGQKLDSKLRRCIKVANAATVTTPLLAFPSGAEVVVGPTSIVEIPLGNSADGISQSDGARERPTKFIYAIPAALAAAAEEGKFQQILTANQMSINLMDGEMRSLISKLIEQQKQSNETVVKRQNICGGERSAEGRRTEERPSFGFISVVQQIVSIFLQLSLQSFHSVNQSSNNSS

SEQ ID NO: 146328 - protein, 98 aa, Heterodera glycines
MTKTLAEGRESGRNGTETEKGTAPKAIAERRTNQTPNEPTNVPTADPLKNVSKSEPTPNVPIAADPRSPLTDVRSLRIFNQNLTGRETVSHACNVDFV

SEQ ID NO: 146329 - protein, 536 aa, Heterodera glycines
MRQIRAPLDLDAYDADTYVPLVINHWNNAHQQQHRFAVFIFGTTGHYKPLYKCGHDNYDTPLALYFNNSHFDGVHFLSGLFGGKKYCLECEKPYKKPSEHNQSCKAHCLMCSRVGPAFPCPSEPDFFRKCKECHKNFNNAGCYNHHLQSNYCTRSKKCKDCGVIWNVADNSRRKRKGHVCGEKFCLLCNNFHNTERGCYIAPFEPKEEMDAYRFVAFDLEADPHLPERRNHEPNFIAAKVSCPACIENGRWKQGTAGCWVCGPHRTVAFCQRPFTDTPVDKQVVTDNPMQAFVGWLINDLPIKANTFAYSHFGGRFDMVITFRELFRRGYNPEMIRRVSMFLHIFYSDKQIKGNKMYEMKLRAQKNRHPNIVFRDSFNLMPCALGQLVPAYGLDVEEKPFFPHMVNRPDNYGREIFPTPDDYLAHGMMPEKRRQFDNWYEQHRSEPFFLDEALASYCTNDVEILMAALVAFRREFLEITRRQEPVDGRETHNGIDVLKQCMTIASACMKHFRTNHLPADHLAIVPERGYDNAQNQS

SEQ ID NO: 146330 - protein, 93 aa, Heterodera glycines
MQLRRQFEEIRQSIGNSQRVTNASDPDNAKTFWASWDGTRDGAIRRHHYMQLGEEGRGAKRETAVGTGLSIGPCEEMRQEGYVCIPFKTSPST

SEQ ID NO: 146331 - protein, 36 aa, Heterodera glycines
MAGFLMKQMVGNKFDEVTNKLGGDDEQKTVDGEDPE

SEQ ID NO: 146332 - protein, 50 aa, Heterodera glycines
MTYEELKFCDRSLGTIGCEFIHKNGNHHIEEMLLDYNCEVLNLSIGHSTF

SEQ ID NO: 146333 - protein, 36 aa, Heterodera glycines; identical to SEQ ID NO: 134159

SEQ ID NO: 146334 - protein, 85 aa, Heterodera glycines
GSYSRGIRSPHKSGRIGSGGLTENKKIDFFKCPFGVLKQLWGAKIQSRIKVQAIGEAIPEGFGLPINLGASVPGGLPPKTKKSIF

SEQ ID NO: 146335 - protein, 31 aa, Heterodera glycines
MLMDAWGYLPGGDRLAIPLNDSRLNSDCPFG

SEQ ID NO: 146336 - protein, 88 aa, Heterodera glycines
MRDFDFLKEMQRAEMETNKGFRQMVDLTENCYKDGFKQPLIWFCQRADYMTHQSEENDEKKLELKQKTEKNIEFHPSASEYLRGGESR

SEQ ID NO: 146337 - protein, 244 aa, Heterodera glycines
MDQGFKCKNMCGRLLEIENDRKICVFKTENILRQCSRIKEVVKENWDMNVFIQGSIYNGLGRKEVMINSKGIPNDWTKDDSCQFFDKLRKKLRESGMALTRTLIIPSRNVSILEITINSDDQEINAQISCNNLIGLINSKWLACCVQLDVRFKTLYFAILEWADVLPNLIKILPEIFEIRNVTYTKKQIFEVLKQKLIWETTNSQSISSLLIGFFEFYTKINLEESRLNMNEGKIDFWEKVLRK

SEQ ID NO: 146338 - protein, 92 aa, Heterodera glycines; identical to SEQ ID NO: 124679

SEQ ID NO: 146339 - protein, 68 aa, Heterodera glycines; identical to SEQ ID NO: 134950

SEQ ID NO: 146340 - protein, 59 aa, Heterodera glycines
MSASNALWKAPDGTVGGNGIRNLMNDFNDFNITTKAVQLGRRAGRARAVFWPVRMPKLA

SEQ ID NO: 146341 - protein, 52 aa, Heterodera glycines
ASMKYAPVTSCDVERSFSIYKSILADNRMSFTPEHLEMYLICNCFREIDKDC

SEQ ID NO: 146342 - protein, 52 aa, Heterodera glycines; identical to SEQ ID NO: 146341

SEQ ID NO: 146343 - protein, 44 aa, Heterodera glycines
AQKASHPILAHPIPSTIAFIHPIMNAKIIRVPKIACDLSLEKMV

SEQ ID NO: 146344 - protein, 95 aa, Heterodera glycines
YQCRAFTLGLTPAQQMPAECLQYVCVVAGEIFQKAHECECDLTGSVSGICEPMGGQCECKPNVIGRRRATNSLANASVANAASPGASATNVNQDS

SEQ ID NO: 146345 - protein, 119 aa, Heterodera glycines
MVAGYLNWPQATFASKIEEDGAYIKVTREIDGGLDTVKLKLPAVVTADLRLNEPRYATLPNIMKAKKKPLEKKTAQEFGIDMTNQTETLEVSDPPVRQAGGFVDDVPGLVSKLKEKGVI

SEQ ID NO: 146346 - protein, 49 aa, Heterodera glycines
MFQKVFLVLLFLLAFTVSNLRSDEGIGEMDANQKPLNSARILASKFTLS

SEQ ID NO: 146347 - protein, 16 aa, Heterodera glycines
EAIPEGFGLPINLGAS

SEQ ID NO: 146348 - protein, 254 aa, Heterodera glycines
LAPVVNQSSIASLIRSSIASSEPDAPSMLTQIPGPKSKALKEEMEQVHQTTSINFFADYERSFGNYLIDADGNALLDLFTDLFTQISSLPLGYNHPELIKLATDARLITTAVSRPTTAVSRPALGAFPRSDFAQLVARSLHSVAPRGLRHVQTMLCGSSANENAIKTAFIHYQTRLRGGSPPTAQHLSSCMRNEAPGTPQLSVLGFNGSFHGRTLGVLSITRSVYVLGFNGSFHGRTLGVLSITRSVYLEVDLP

SEQ ID NO: 146349 - protein, 307 aa, Heterodera glycines
MPEDGIALGQVGGCASLLDLLEENLILPLRLISANIKIPSSLYSPPKGVLLHGPPGCGKTLIARAIAKEIDAFFINFDISLLSDMWYGETAKLTKALFTLAGKIQPCVIFIDEIGTQYVSTINSVRLFVCSLDSVLRDRHKLDHEVTAVMKTQFMALWDGFLSSNSAVIIIGATNRPQDVDNAILRRLSLKIHVPLPDVNAREQILRVILKDENLEDNFDFEKIAQASDQRSGADLKEVVRLSFLSSYRSVVKELFISGGRGKCVREVELSHNDVILALRQFNGCLNDSQKAHCSKNYLTEEVFEVD

SEQ ID NO: 146350 - protein, 45 aa, Heterodera glycines
QLNVKLTDGESNFAYNVLLMERLCPMVNKMGVAANKSNLIMQPLE

SEQ ID NO: 146351 - protein, 52 aa, Heterodera glycines
ELLVLFDSSMCLLLICKISKILVKFQKSYGQKELKNPVNGLFFCSDFLCINK

SEQ ID NO: 146352 - protein, 95 aa, Heterodera glycines
MTFQICTLPFCPESPKFSLVFKDNALAAERGLKKLRGRDNVKEELEQILSESSSAEKGTSNNFQFFDLFKKPLNWPLTLAIFMHLSQQFSGINAG

SEQ ID NO: 146353 - protein, 33 aa, Heterodera glycines
MGALSTHQISFGNLTDTWGPSFDTVNTVTMIRL

SEQ ID NO: 146354 - protein, 66 aa, Heterodera glycines
RSRKNVVSRNVVERIFRPLLFSFSTKLNILGIIRKHSKNAISLQIFKYFYLCTKKSEQKKFQLLGF

SEQ ID NO: 146355 - protein, 181 aa, Heterodera glycines; identical to SEQ ID NO: 124594

SEQ ID NO: 146356 - protein, 236 aa, Heterodera glycines
MGDTSIGQITDRSKELKLGSPKEQFNQRRIKSKGQKAYSPTGQMNDELQFVSSKTQHFPIETCLNMLKQIRIEKFSDFLNDLLLANFYKFYLENITDEKCTIYLHIAMLIRTIEAKLEMSNALGFKIPNFKQKWHTFKCRTAASEEEPQFLLEKLFFVQNNLDDFAFCSANSKRCMEQSAVALLDSVKMRRVGKNVEAEVTEDAFFDGNLIYSLIDQSAVTDDDALSSLSLGTSSS

SEQ ID NO: 146357 - protein, 33 aa, Heterodera glycines
TPQRNNSWPGLTAHVPKCLNSVRGWVQIRTWCR

SEQ ID NO: 146358 - protein, 249 aa, Heterodera glycines
MNTDKFCLFYARMSSINYLTMDKYSFIRFMKNLARQKEAAVELLRNCGIDGNEIAFEKSADPRKSIRVLWKGPMGRENVVPIFLENGHWDGLKKYVCFFNLQNSKKHSMLIWRDSCLLMPVKLESLKATFNLDCEDKPFFPYYYNKKENYGIRLEHLPPMEDYSPGSMNKAKFIKFEKWYNENKETPFYLDEELRNYCRNDTEILLLSIIEFQRILINDITKGFDPLPRSCTNAGVAMNIFKAMFLLTE

SEQ ID NO: 146359 - protein, 160 aa, Heterodera glycines
SIGNNFTEEMENYKLIDERSMICEKFGFTKNITEFRINSDVRRPDVAMRDAIDTMIKMALKTTEEKMKRKVRMFGVAITGAGLASPVWVPYRAYPQNNADVIMQEINKLGQSGDGDENKKTLLLSEPIMMKITFVTLPSGEGPRNVHKFDFGFKEHQRIR

SEQ ID NO: 146360 - protein, 142 aa, Heterodera glycines
MAHLELKHSTPGFRVKQPWLHTHLEFENRLRTFRPPSPLIIRFTEYNCLPSSSYPGGNFGGNQLLDGSISLSPLYPSQTIDLHVRIASDFHPEFPLASSCSGIVHHLSGLSAYALSPPHRMRSRRDYVAPQHRSARDHTSAP

SEQ ID NO: 146361 - protein, 20 aa, Heterodera glycines
KLHLRLNTATSPIANKYREG

SEQ ID NO: 146362 - protein, 322 aa, Heterodera glycines
TLTLVRKNLIKTLLFSTNCNQVNKKATLLEFGQILHKVSLQFPHINTRGGAVKQFHAINDLENNLMKELQGFFDGPAVKKRIERKQIVNMKELQGFFDGPAVKKRIERKQIVNINRTFGARLSYEISVRFGENGLPISVRFGENGLPEGHRLELDLIGAAGQSFCAFLANGITVRLEGEANDYVGKCLSGGKCLSGGKIVIRPYRNSIYASEQNTLIGNVALYGATSGTAFFRGIGGERFATAFFRGIGGERFAVRNSGATAVIEAVGDHGCEYMTSGRVVVLNSIGRNFAAAMSGGLAFVYDKSGGEETALKRATTKWERG

SEQ ID NO: 146363 - protein, 256 aa, Heterodera glycines
RLGLNPPTFQSPGLKPSVFQSLGLNPPAFQSLGLNPTSISITGTQSTSISITGTQPTSIPITGTQPTNIPINGTQSTSIQSLGLNPPTFQSPGLNPPVFQSLGLNPPAFQSLGLNPPTFQSLGLNPPTFQSTGLNPPAFNHWDSIHHIQVTGTQPTNIPIAWTQPTSISITGTQPTSIPITGTQPTNISITGTQSTNIPINGTQSTSIQSLGLNPPTFQSPGLNPPVFQSLGLNPPAFQSLGLNPPAFQSLGLNPP

SEQ ID NO: 146364 - protein, 428 aa, Heterodera glycines
MTINAVLSCTERETVNSLIHVTGGSATNLQVLHAAADTGSVGSLAGSDLSSATSPLDISTYLSAINLRAGYLGQIKGMFEMLRDTHNSEEIAHQLLSDHLEKLLDSAIKSSDPDSISKPLHLMTAYCNFCSQINQRILHAVIWAPLRSFTEQTMRNCIICWNWILVSMKDIQIDFLQQMTSCWRIVSQQNLGLFSREYDSFACPLSSQNCGQRPTPNAIPHNIWINVRFLGAALISRNIVAVGPRFRLLSSALTMVQGETSGCRISKNILRHRIYAVAFDYFSIGPQTPLYGGASLQNDIRSIVTFWQALYADSKYIRKESFSTNDNEILFNGLPPQFYGGQHTSEAAKNQTWHGSTPISGGWMTSTAIANRTLMGTVGQNPLSNLRIQAKINEENAQMIDRQMKNILRKRQLLLILLVIGISFYYYD

SEQ ID NO: 146365 - protein, 87 aa, Heterodera glycines
MHAFCARAIYHRACQSKAKQQRCCFERIKGIESVNRLLEKYICNLSKILRKSVNRLLEKYICNLSKILRSELEMINFTIQTNFRCSN

SEQ ID NO: 146366 - protein, 46 aa, Heterodera glycines
MFCNEPKATKHLLNMIRDLSTFCAKIWRILVTLALDIAFLENFVIS

SEQ ID NO: 146367 - protein, 68 aa, Heterodera glycines
MWGITETLVANIARDKEKIAEPMGVVAAAVYLIFVFAFIPVPFYEWLSQNILFAGAADNRHGKGTQIE

SEQ ID NO: 146368 - protein, 26 aa, Heterodera glycines
EAIPEGFGLPIIAGLFLVFWTALAKS

SEQ ID NO: 146369 - protein, 95 aa, Heterodera glycines
MGRNGGGEKREKKQKGDKEEAQEEKGGKSGGKGGERGGGKGGERGGGKGGERGGGKGGFFHRRRVKRAPFAERTDNNQITQTIKLYFAFDTYEQN

SEQ ID NO: 146370 - protein, 57 aa, Heterodera glycines
MALSKDMRAQFMRTIHKTVRFFWKGNAAGTTISTRALQTVADSNQYSSQIRKRKNHF

SEQ ID NO: 146371 - protein, 128 aa, Heterodera glycines
MVAQIRPLLADFVGENQVDNIFKILGIPTILEGSNDALLLVDTEREENVESNKKSTTKKKKPKKKQLNTEENGGEEADKTATSDKLSQKGVANESEQSDKVSANISGEQLTTDKQPINDDGDGIIKTN

SEQ ID NO: 146372 - protein, 29 aa, Heterodera glycines
  unsure (1)..(29): unsure at all Xaa locations
LXRAQIGAINEAYRRQPSFRGDLNNNRNK

SEQ ID NO: 146373 - protein, 71 aa, Heterodera glycines
MDLILATDWINNAYPEMDLEDANKDNKEPTKKQEEEAEDPSWISLIDEEMKREPLAPIGEEAPATSYFCCH

SEQ ID NO: 146374 - protein, 86 aa, Heterodera glycines
MALRVLPIVILALFFIFDGTFAKTEDEIKQTQLLKILSTKTTKNSSVQTEDIEDAIAYMKLTNEEGYESRMTKGTGAKQVKNLLHH

SEQ ID NO: 146375 - protein, 236 aa, Heterodera glycines
TQPYSIQSLGLNPPTFQSTGLNPTAFNQWDSTHQHSINRTQPYSIQSVGLNPPTFHQQDSTLQHSISGTQPTNIPINRTQPYSIQSVGLNPPTFQSTGLNPTAFNQWDSTHQHSINRTQPYSIQSVGLNPPTFQSTGLNPTAFNQWDSTHQHSNQQDSTLQHSISGTQPTNIPSTGLNPTAFNQWDSTHQHSNQQDSTLQHSISGTQPTNIPINRTQPYSIQSVGLNPPACHRTNH

SEQ ID NO: 146376 - protein, 146 aa, Heterodera glycines
RSKLGARVGIPGLDRCHDCGLRGTVEIDETCIVRRKYNRGQLRGNVNEWLFGGIERGENGQRAFMVPVLRRRAQDLLPLIEQYIAPGSIIHSDMWAAYGGIPNLPQRYHHTVNHNENFLNPNDPNVHTQNIEGMWSTYKRKFRPNL

SEQ ID NO: 146377 - protein, 124 aa, Heterodera glycines
DDPLPLLQPPPLRRKQFNDLQNQGAALINQRHPAGEVIEVYLRKMQNQRDWMLNLSKCLEGHLRDACNAKAFVEESEQVEQQMQQQLVSLANLFKTKNFSAEKWGGAPRRDHNSALLPKNSNLL

SEQ ID NO: 146378 - protein, 182 aa, Heterodera glycines
LGLSQGARYVTERYSTASSGTRGNAFRRVEDAIQWIRDRMHKLNSMQFSETLEVLEQIFEQHKLDNRDIQDFRQTVDECIARQAEVSAEDSYDYCELLKMMESEYQQLRELSAGRMVDLDSLIAFIRAAQLELCFHRRREALEVKRNRSDLGRLDIPMLKIYLKQVVGRALRTGEKNDHHHQ

SEQ ID NO: 146379 - protein, 283 aa, Heterodera glycines
MPIKQKPSSQTGRSGSKNGSTKTGSASPHSWPSKTGAAEPKGPIATGLRTGILQNPAQDPVLRRSLVTTTLKYQPPRPTTSPKAEPPKPIVVAPKVTSPVTTQTVQPTSPPEGQPKSRNRGRFRTRYVMHRNQSEPEKQFVEARAHQAEEVNTNVLNVNTTESLVVVAACTSVVQQPIEHLKYRSQLLKRKISWTWATKRYFVNDAKFSETKKTELDEALEALILSQVPPPEERELKQKTFDAIGRISRRNLEGIRNLHRWVHAGKHCPKKWGFAHRSEAQVQ

SEQ ID NO: 146380 - protein, 60 aa, Heterodera glycines
ETGNFKFADPVAGLEFKIFYRTGSGRINPANPAILQILHLKSAGSCAGLRIFGNFEKILY

SEQ ID NO: 146381 - protein, 67 aa, Heterodera glycines
MSHRRSHADNVETMAQLIAGLLPPLALEARISGGNALGDQLVTQLGLSVQAAQNVDMAILGRAKLKI

SEQ ID NO: 146382 - protein, 31 aa, Heterodera glycines
MGSKNPKQNYSTGYREAIPEGFGLSINLGAS

SEQ ID NO: 146383 - protein, 50 aa, Heterodera glycines
MAQGGVHHKLADNYYLERDGRREVRPPKPIYKALGETPLWEKAERWAIAD

SEQ ID NO: 146384 - protein, 43 aa, Heterodera glycines
MEKACKIWRDYIDFSALEITGVTIISSAFSCVFLMPSQNLGRF

SEQ ID NO: 146385 - protein, 45 aa, Heterodera glycines; identical to SEQ ID NO: 124527

SEQ ID NO: 146386 - protein, 95 aa, Heterodera glycines; identical to SEQ ID NO: 130684

SEQ ID NO: 146387 - protein, 153 aa, Heterodera glycines
MPTNNAVDRPEFGSLVGTTATIGAAVGAPIGVLVGGFIGSTAFPLLGTAAGASIGFAVGGAIGTLVGAAVGVFVGGIIQAAKDIVCYDKCPARTACVYYDSPDSYLCCKKRYKRECVKDFAEVEAMFSTTTTTTTTTTTTTTTPTPAPREPKA

SEQ ID NO: 146388 - protein, 40 aa, Heterodera glycines
MLGFRSSDFPIQGLVIHGSCVVRGSDSQLLINCIWSYLII

SEQ ID NO: 146389 - protein, 92 aa, Heterodera glycines; identical to SEQ ID NO: 125147

SEQ ID NO: 146390 - protein, 33 aa, Heterodera glycines
MIGRAVRNRPFIFEGIFKFILYPRKMSISFFEK

SEQ ID NO: 146391 - protein, 136 aa, Heterodera glycines
MVKRFCGEFSDEEDMEKDAAVDQNGAELNQQKEDDDDDSFVRGSDEEIPDDDDISMDEQPSGCPPPSRWDEKRAKKTTTTATTIAAVPGAAMPRFARFVEELLEGTIYALWPEASLTLPRFLADRKFFDALMVANF

SEQ ID NO: 146392 - protein, 61 aa, Heterodera glycines
MHHNVIMIQSANGIRMKKHVKEPTRENNILDLVFSQPKELIYNVKVGSPFSILIIILFGLI

SEQ ID NO: 146393 - protein, 269 aa, Heterodera glycines
FNENFRKKKSPDIVLWLVVAISALHITAQLVGGVLANSLSIIADSGHILTDLVSFLISIFMIRISVANSNRRFTFNRRFTFGYLRAEFIGALASIFIIWTITILMIVFATQRIISGQMTVDIVFATQRIISGQMTVDTRIMLITALVGIVFNFVMVLFLKWSTGGAHFSHGHSHFTKNVNVRAAFNVNVRAAFIHVLGDFIQSIGVLSAALLIRWTDFQLADPLCTYFFSLVVLCTSVPIARDIFLVLMESTPSFLDFDAVRSDLNGIS

SEQ ID NO: 146394 - protein, 24 aa, Heterodera glycines
MEKACKIWRDYIDFSALELLELAS

SEQ ID NO: 146395 - protein, 22 aa, Heterodera glycines
MLCEILERDELQIREEISMWNA

SEQ ID NO: 146396 - protein, 31 aa, Heterodera glycines; identical to SEQ ID NO: 135070

SEQ ID NO: 146397 - protein, 38 aa, Heterodera glycines
MVFGWTFSSFDRPQLGLKLALFRPVSKRWWTNISTAEG

SEQ ID NO: 146398 - protein, 31 aa, Heterodera glycines; identical to SEQ ID NO: 135070

SEQ ID NO: 146399 - protein, 31 aa, Heterodera glycines; identical to SEQ ID NO: 135070

SEQ ID NO: 146400 - protein, 179 aa, Heterodera glycines
MEAQELGNSAIIEESNEENEEEEADEGNKNRVGCKKRDDNDRRGPRGGGAGAGGSGSGARGGEGLGGGTNGGGRAERRDAGTGAGIYERGKEGRKTANNDVIIDEQRCRTVENDDDEEDGCAEVDLPELEFEKKVNETDCCAVGLLIADLEGSAFGLMIADLEGTAFGLLDQKSEWYLI

SEQ ID NO: 146401 - protein, 134 aa, Heterodera glycines
MAIEAEAERKAREEKENLDREEQRLKVANNTLQNVSEEFLELLTLKRTNRAYSMDMQISLQDERIQKQVRKHQEKRRRSIIHQRRRKFSKGLRDVDFVGFEATEDIQDMHAEKEDEEMEQLSDLDSGDDPSGQT

SEQ ID NO: 146402 - protein, 39 aa, Heterodera glycines
MVQQLLMNILSIFLNILNKQYEVIDETVAIIHPIKMMAT

SEQ ID NO: 146403 - protein, 177 aa, Heterodera glycines
MIYLFIKDQSDLISCYKYLMSAGQPISKSDQKLLIVNATYYKMKALINGALSTTKQIKSGGRKHNNKLRRMANDIEMTAQKAHLLENPKNFDEKLVKICYLCSFWTHVISNRNLYKESEIWRTFLAYRFGGEEMPPFAQVPWRRRHNGTIHCEKVKSSEVCSIAEVTTSATRTNCAA

SEQ ID NO: 146404 - protein, 40 aa, Heterodera glycines
MKFTKKGKKENVPDRKRVFPVPTNESRAAMGPGHFAGVRM

SEQ ID NO: 146405 - protein, 80 aa, Heterodera glycines
ADSILHSELLMGSPDSNNYIKNGFLANWITSDTQCSGQNYDNLLESNHDGVHVWVGGHMSMLETAPMDPIFFMHHCFMDY

SEQ ID NO: 146406 - protein, 72 aa, Heterodera glycines
FLAVLKPSIACRFSAQQSTNRVFDSLQKIIPYPNFFTTTYCQSNFLQIESHPLPAGSRHSKALIGCLTYFKK

SEQ ID NO: 146407 - protein, 91 aa, Heterodera glycines
MAGVCQSTGYVVEPYKDYPELLDALLKLFKTELSSSMRRLTMKVLGVIGAFDPYTHKVYLGKVHSHSKSRSLALTLPNSGETAEHCKHFFT

SEQ ID NO: 146408 - protein, 35 aa, Heterodera glycines
MDFMELHVQANGSSQSVDQRNQKHLQKGLKVKAKI

SEQ ID NO: 146409 - protein, 87 aa, Heterodera glycines
MNCALASSFSPVGKHFAAVVADKKGMRADLYVNGEELVERLGSCLHCEISSVKIGAGRVNLEAILTTPIKRRSSETLEPIKKSQKNG

SEQ ID NO: 146410 - protein, 88 aa, Heterodera glycines
MLTTLEELKATPCGTQLASFCGQIVSILPSEKKLTALLACASGENVVLAEFKSVSSKFSKICSLGIVVKFYMLKAQRFQERFDGKIGL

SEQ ID NO: 146411 - protein, 44 aa, Heterodera glycines
MNFFYAQLKSYSILKRNWYSTSLSAMSSISCSILTSLTYCFASH

SEQ ID NO: 146412 - protein, 24 aa, Heterodera glycines
MEKACKIWRDYIDFSALELLELAS

SEQ ID NO: 146413 - protein, 39 aa, Heterodera glycines
MSIKTKKDLLIVVKNPIFLKKGMVAIMFCLCQKKRQLVH

SEQ ID NO: 146414 - protein, 28 aa, Heterodera glycines
KETPPSAAGDGVAVPSERVVDEQQKEDE

SEQ ID NO: 146415 - protein, 153 aa, Heterodera glycines
FSHFFTANLVPTVAFSCLALSNNLTIFETQTKKILDQKWLSLFSHFLPQNWYQQLPSLVWPYQTILRYLKRKQKKFLTKKWLSLFSHFFTANLVPTVAFSCLALSNNLTIFETQTKKILDQKMAISFFAFFYRKLGTNSCLLLSGPIKQSYDI

SEQ ID NO: 146416 - protein, 75 aa, Heterodera glycines
MVKISRYSIIDSNNLPLLGFPTLDDINLRWLFSQNSEEILQFLAHNGLIQNKMMCLICSNNMALTKRSQIKDGFE

SEQ ID NO: 146417 - protein, 320 aa, Heterodera glycines
MVKISRYSIIDSNNLPLLGFPTLDDINLRWLFSQNSEEILQFLAHNGLIQNKMMCLNCSNNMALTKRSRKKDGFEWRCQQCQSFFHNSALSLTQMFTIIYMWIEDYRNKNAVKELDMATYTIVNFFNFCRQQCSKQAKIGGKNKVVEIDETCWTKMKHHRGKTKKGSQIWMFGAIERGEGGQAFCVQVKNRKRRTLFRQIRKWIRPGTVIISDEWPAYLKMSLHLPQYEHLLIRHKKTTGGGFSKIITLPNGTEFNVNTNKCEGMWAQLKQKTKRIHGTSIKLTESYMHEQIFRLNARAKGLSVFKAFVDLLHFNYNFND

SEQ ID NO: 146418 - protein, 278 aa, Heterodera glycines
MAYPFCLVGDIEVKNNEIVQNGNQLSKESVSTVPYEQQHGQVIGQVKTVKYKALFEFNARSGDELSIQPGDLILVFEGHQSEPGWLAFTKSVSFTDSATIGKAAAALTKGNSMSASPSVSAALYDLPPADTETVVKLTNTTIPSPTATIEPSSVPLYELPPDNGKMPPSKASVADSMVLSVGVALYQWKARNEQEMTFGRGDVIEVLEQSEMRWRGRLQKNRQITGWFPKSYIKISAPSEQQKDESATTDLYQTGQSAAKNGGKARVGESGEWFIKFC

SEQ ID NO: 146419 - protein, 72 aa, Heterodera glycines
MSDHEGDLAAVAEARAAARAREAAANANVLLGAEQGVGGEQQRERGAGNNDNQQIAALHARMDILEHQQIQN

SEQ ID NO: 146420 - protein, 84 aa, Heterodera glycines
MPGQSFQNRIIQLVAESQGRRERSASNTKLRWQTEARQMSNKERTIARGSDHWLVEGQSISDGQQQQNGRETFAGELLANGLIN

SEQ ID NO: 146421 - protein, 366 aa, Heterodera glycines
MHLPISFGIVSVTLRQNKLVCLELVGIPLLTSNALKAVNSNRLRSVDLSGCRKIASEGIFYLVFNNPSIVSLCLNGCRGLDEQALYDIARCIGERLFRLELDQLHNSNMAEHTEAISSLSRHCPNISRLSLCQFFPEDEQQEEQPPCLIEGTGLRDVDLYGGNGTKCHPNQTNGISLKATSSANFPAFPSPFIQFLISQIPSLSHLALDVAFLNAHFLRRLFAGGVHSPGAGLRSLRLCRLRITYRALFSIGRWARSLVDLETSHMPAVDDRFLVLLGKNCKYLQNVNFNGCKWVTDKGVASLARNCKLREVRIRGTSCTDKSVYAFAQFCPTLEWIAHADFSGRPNFSDKALKCLRDSCIQRVIC

SEQ ID NO: 146422 - protein, 76 aa, Heterodera glycines
MFAFVCRFVLPLFLFALLALPPANGIGLPMQKMECCQQQQMCCAAPMQCTPSCGGPPFSRCSEGKKRRAHRRSGNS

SEQ ID NO: 146423 - protein, 33 aa, Heterodera glycines
LDECHCHLTAPPTDRRLTIDHFLSDFCPSISAK

SEQ ID NO: 146424 - protein, 526 aa, Heterodera glycines
MANKFLLVPQEIYRGLTSASDTGVINLDAVRHDLERARRERTNPTTKNVRYNQQLRRYLQMRRELADRPTKVELTKGLSVLLKRDGGVDDDDGEVVNTQPRPPAPPPPPPPPPPPHQYHRHHPSPPDQQSSSSDDSHPPRPPRPPRPQRTKKNHQSSIKHGRLNQWKQRRRDLQQQPVVRDLLAEAAAAPLPESDDDDEQMLEGGYLLPTPSQNYGDMPILPDYADEIEEMDTAQQRLASRRKIKGEEGIDKNKKYKIYYSPPPSPTLPPVYKRPDHPPPPPRSIPKVELKRDPQPTKLKKSASPPPPPLPPHRAKREPKIELAPPPPPRTVSKREPKVELAPPPPPPRHFTKKEPKFEVDPRPSTSKQAGYFPPPKIKTEPKHELQPTKRPVPYRIPKKEPKIEEKPLQQQQQQPPPPPAVVVEEMPYIPPPRRGTKRTYPQNDDDEVHIRKRVRQPRRVRVQYSPEPGPSTSAQSEEEQQQQRELFAIPSNQLTMTQRIERLYLKCNHYADRMGVRVNTINTAN

SEQ ID NO: 146425 - protein, 64 aa, Heterodera glycines
MEMEAFEWKFEDETNQITIELADDDTEEGGILYLVNYSLNEYVRVIYVQNSRLITIREIFGPLE

SEQ ID NO: 146426 - protein, 77 aa, Heterodera glycines
MTLDIMTRDIMTRDIMTAGHYDAGHFDSAPNRRLIEPVKSFRMISRLFDSVNNFKSYIDSKLAQTELARRSWPVPQC

SEQ ID NO: 146427 - protein, 42 aa, Heterodera glycines
MSDNPEKVEKQMEKQINREPIKNMLAFSAQFVQKAALLMETN

SEQ ID NO: 146428 - protein, 43 aa, Heterodera glycines
MSDKKCVCEAKRFAILRKQTYINILIIIIIVIIIIRKGNQHHH

SEQ ID NO: 146429 - protein, 160 aa, Heterodera glycines
MIEQQNKKQLAGNVLDYINHPLTGRVIGFEEIEIKYISQQVMEFLNKWRTTVFNLCPLYVSIPKGSDRMLEFVSLNILPLFSRTTNGLAFNNDVIRVIPSILTDCPPLHSHFGGRTIHRQFKWPATAKVMNDAAISVGISSDLMPVYRLSDTLQMANKTN

SEQ ID NO: 146430 - protein, 89 aa, Heterodera glycines
MSSPQMSGPQMSNPQMSGPQKSGPQMSGPQMSSPQMSGPQMSSPQMSGPQMSSPQMSDSMNINNLKLCLALLLVGFCLQLFIGGTDAGG

SEQ ID NO: 146431 - protein, 85 aa, Heterodera glycines
MSGPQMSNPQMSGPQKSGPQMSGPQMSSPQMSHHGIIYPKSEFALFVAFLVRQLVEQVRPAQSRVLFRFGATDSNRCEFLWPEDC

SEQ ID NO: 146432 - protein, 208 aa, Heterodera glycines
MTALTAPLCLVAPCLIESWGRRPLFLLITALSTLELTLLTVAQLLYDVLGGGGIFVSSMALIGCTMGQASVNLGLFNMTPILVGELFPHPARARATQGTTAKKKKIEKKLSRNIGEYRVPFAQVALLLPNFVVVGIVLAYPSLIVSIGALFFLPLAAFSSLVLLLMLKLLPETKGRPVDDIFRRLADSRTNSVTDYGAIGDDGAMPTK

SEQ ID NO: 146433 - protein, 79 aa, Heterodera glycines
MVKHCGLFGLLLGTVADVQLLGRLWEMGGAEQMKHGHEETAGWQQPPGPTVAEQRRQAQRGGQQQHEVGTGANCGRGPA

SEQ ID NO: 146434 - protein, 133 aa, Heterodera glycines
MFDVLINFDFRIFPILNRHRREYFNLPPGKAASNSPTVQEHILSGIEEQKIELDGNAAKEETAESGDEFEEVKQRKTETTAEEGNEHEQLVRHAKFYHAGDESLLLDQRDLFWGKLREACSRLFRIHKNEVDH

SEQ ID NO: 146435 - protein, 124 aa, Heterodera glycines
MHTVLYLKLSFDSRNGKKAKQNSNAFANYHIICLFVFSLNKMSLTAKCSLCSDEFSSIDDLEAHISADHFNCLPFECEKCKFAKFPTEFAIKRHYEEDHGLSEYFVRNRVCREIYEEEAKGPRM

SEQ ID NO: 146436 - protein, 73 aa, Heterodera glycines
MRALTPTDPSFSLPRHVVFGKVLEGMNIVREIEDGETAGGDRPKKDVVIVDSGGNSQMFSDLKSIKFFRANSQ

SEQ ID NO: 146437 - protein, 47 aa, Heterodera glycines
MPWKLGDFHGKYGQKSKANMKEIRNGWAFTFTTMTIKMVNKKTLMLF

SEQ ID NO: 146438 - protein, 74 aa, Heterodera glycines
MAQTDPPQTSRSPRGEIEWTYILAQLGWTLDRMWVYASFLILQFHPFGFIDKQIQILCYLCSLIPISLLFLSSI

SEQ ID NO: 146439 - protein, 78 aa, Heterodera glycines
DLDLWRELDLLFAETEKEEPEEADDNILQQFPPKSVECWFEASYKRPSWTVIEEAADAEIQANGVQLSFGPTKNTVYV

SEQ ID NO: 146440 - protein, 335 aa, Heterodera glycines
SEENCIFFKIFPITIAKAFLSNCYLKFGGCTELISDNATAFTSEFFKEFCSMLYINKTYAIPHWSQGNAVTERSFRTFHNILSKYITKEDPDFDEFLDFASFCYNTSCHSSTSESPFFLVFGRDPIFCVDQILDARIHSQVQQAEETDFKQKLVSSLRKAWKSAADANEAAQQKIKEQYDRTVRQPQICVGDRVLLRNYAGKVGTSKKFHLPWKGIFRVIEIDGIYATIVSCISPQQNPKRVHLNQIKKCFENFGPNCTLPKLPIDEEESLDKMHATNLDNFPGHNHFPRTNRQPSKENPEQENDSQNLAEKTDCQEEDGNNSLDESIKPKKGPE

SEQ ID NO: 146441 - protein, 278 aa, Heterodera glycines
MTVTSNTEFRLIECVPILEEVAREFGCITPLPNLGYTFKSRECYDHHTKVTKCKVKRGTEVATIEKSICKSSKKCIDCGVIYQIRHHKQKAHECGQKFCKVCLGFHVPRECYIPYRPKKKTEKRIIFFDFECTTDFKPDPELLRFKHQVNFCYAHVTCTECIAKGIWDQPLDRSCGICGLTRTFAWAPFEFYNTEVETAYVVDDPLTAFTKWLLHFEADVLGLDPAEKRRKRKRANGDNNNKARNPAANAFIDMEAEDDDSDDNDAENNFKGHVTITC

SEQ ID NO: 146442 - protein, 108 aa, Heterodera glycines; identical to SEQ ID NO: 138046

SEQ ID NO: 146443 - protein, 46 aa, Heterodera glycines
MLKKEEQAQLCAQSIDELCITINSVADDQSKLAAATGAYNGKFYKN

SEQ ID NO: 146444 - protein, 55 aa, Heterodera glycines
MNIYSDCMPKLKSELSKQLPPLVKPIFYNSAESISESLIEVVKKLNDYSKYFWQR

SEQ ID NO: 146445 - protein, 64 aa, Heterodera glycines
MLIAFVRNDQKMQISEFTKQKYEAHLGIYCFMRMNWQSKWINGPIIYVNEDALFLEFIKGLATI

SEQ ID NO: 146446 - protein, 50 aa, Heterodera glycines
MSGPLTKLQVRLGFLLGLRLWQCQLHDELALGFQLEQKLLNSFEPFESIG

SEQ ID NO: 146447 - protein, 56 aa, Heterodera glycines
GPERLGPRFWAPAFGPPFLGPGVVWAPFFGPRGRLGPNPKIEKCAFLKIKILKTKP

SEQ ID NO: 146448 - protein, 173 aa, Heterodera glycines
KIHPTIDEGQAVEHNRETEGQREHQQQQTQQPKNRRFSRGGTILEHPPNIEFYRNTLEKEENGTVRPTMFDLVEGDKQQQPQQQRRETDGTLFRSADRWALNLVVPLALFFPLPMPSLDGDINDIRIIALVACAVLVVIILVGLSFESKMQVNTLNAEEEGEGHNWPLISVNY

SEQ ID NO: 146449 - protein, 216 aa, Heterodera glycines
LLPPLPLPSDALRFQTRVKHGTIDVWWLYDDGGLTLLIPYLLTQQKSYQNAKLNAKLRVFTLAGQGKNLQQEHHGLVTMLKKFRITADQVMKKGIEGNPLDFQSDNENEETNVGQAEGLITETELNAQQAINQSFVSISQICLKFLQARTWRHLRIAELLRRYSSDSDLVVVTLPVPRRGLINAALYLAWLEAMSAELPPTLMLRGNQQSVLTFYS

SEQ ID NO: 146450 - protein, 165 aa, Heterodera glycines
RANDEQETESSDVDEDEYVVESDDDIPAVEPKEREERWVDPLPEKLQFQQQVNKIAELKCKYSRANAKVHWYKDRKKLFSDGLKYKILIDKQSVTLIINNPDPDDSGKYTCEANGVPTNSFVTVEDSPDQQPLSSTARRRDSRRPKSARKEATALTPLDAMQWLV

SEQ ID NO: 146451 - protein, 233 aa, Heterodera glycines
VAGVKPQHTYEFRVAAVNVAGRGEWSKNSVPIAATWSPCKPLITMGPLACDMTVLVGEQAKLLVPYAAKPRPKFEWSKNGEAMDPRDDPRVKEEKSDILIQLCYQKCEQSDTGNYSIRIVNDFGSDSVDLRLKVVDRPAPPEGSLKVRCADERLLAKAPLNVPVRPGPPKPLYTTDKSIMLQWTRPLRDRGTPITDYELEIRERGTKLWGKATTNAELWEKDAFGNVPDTRFK

SEQ ID NO: 146452 - protein, 76 aa, Heterodera glycines
MRPVSKCQCAERDMGKKHTYKEQMARKDVNNYDEFDEALLPMFRMIFDEIKKLSMAMMAAKKSKFFLMRNNTRIYA

SEQ ID NO: 146453 - protein, 199 aa, Heterodera glycines
SGQKEYLTRERLLQFLNEEQRDPRLNEILFPHFDQERVQQLIAKYESDESYIAQGKMSGDGFLRFLLSDENAPVFLSWNERYQDMDQPLCHYFINRWRRMAMNILWLLGVRILAFLGGFLKIFCAAEILRHENSAISDFVGHVRILVSDFFLSSEFRFRIFFKPQNFDSGELLTISEFLKILFTDILRMVCAQKCTNFN

SEQ ID NO: 146454 - protein, 320 aa, Heterodera glycines
EREDLDATLFTFEKFLRLYHKICPRTEVQELFVRLSGQKEYLTRERLLQFLNEEQRDPRLNEILFPHFDQERVQQLIAKYESDESYIAQGKMSGDGFLRFLLSDENAPVFLSWNERYQDMDQPLCHYFINSSHNTYLTGRQYGGKSSTEIYRQVLLSGCRCIELDCWDGTGENKGEPIITHGKAMCTDVFFKEVLEVLYQIKETAFTRTDFPVILSFENHCSKSNQLKMAKYCLEIFGDMLLSKPLDEYPLEPGVPLPSPNRLRRKILIKNKRLKKEEERRQMEAFFSQGRLLDEEEAQEEQQPVAQPAAMPSTGGKWFT

SEQ ID NO: 146455 - protein, 120 aa, Heterodera glycines
MYQNDDSMPNTIMGGDTTWDNIGSMLARLLGDDEEAVDNVCLLQRLLVADPGATGGEQRHSAKSKDRANSALFAGGVPNGEAPIGAKNGEDGFLWCPTQHIMPKFDGGLMPPKFGSRAWH

SEQ ID NO: 146456 - protein, 113 aa, Heterodera glycines
GCAWHGCKKCYPSDNMLLPNGKSAGEVRERDAKRLEFIHSQVAHVDVYWECEIQCMLSRSKEMRQKFAEYVDDGPLLIRDAFMGGRTGPLTLYHEARDGEKISYFDFTSLYPY

SEQ ID NO: 146457 - protein, 89 aa, Heterodera glycines
MSPIKRKQDLIVVSKKPRLCRPLTRQMLDEIINWIPFMFLFGVALCKPKPKKLKARRRLPAELVYEMFNFVPVMQLYGGTTPVTKTAVT

SEQ ID NO: 146458 - protein, 841 aa, Heterodera glycines
MSNRQYPKFFISNILGPSQPKKPRQGFLINQLLGIVQQQGEGVSSSSSAQKKANEYVKKLDNSLEHLPGFNYSKVKSRFSIEDVPENPETLLTAIFTHCIDEAKTDSSDRGIVPTHLGCVISSQLLTAGDLFIPIRQITDNTVDTILNLFLKVSQSKKTEGVTLWGEPFTVTVTTVNRDGLPAKRQLKGGARRRIAAVHHRIHDQSLIKIRNPDDRNYCLFYSLQATMVAKTRGWPRWKFYDYLHSQHGQRDKFLSDTLSLMRTVGIQMDLNGYDADTFVPRIINHWNNTQQNHRFAVFIFGSNGQYRPLYKYNDNTYDTPLLLYFNDNHFDGVQAQGGLFGRKYCLECERPYRRDSEHNKSCKARCLLCSRVGPAFPCPAAAGFFKKCDGCNKKFRNNNCYTHHLRTNFCNKSKLCKHCGVIWDVKPNNTNERKGHVCGEQFCTLCNNYHNTERGCFIKTLEPKEQDPYRIVAFDLETMQHQPVNPQQLDRRSHQPNFISAKVICPDCIENDTWKRGTAGCAVCGPHRTVAFCQRPFNNTVVDQQVVTDNPLEAFVEWLIFQLPKQYDTFAYSHFGGRFDMVIVFRELFRRGFNPEMLKKGNKMYQMKVRKQKKRNPNVVFRDSFNLMPMALASLVPSFGLDVEDKPYFPHLSNRPENYGQQIFPTSDDYLANGMMPDKRRKFDMWYEQHRDVPFLLDEELASYCTNDVEILTAALVAFRQEFFEISQRQEGVVAERAASDEHHDGIDVLRECMTIAGACMRHFRTNHLPADHLAIVPERGYDNAQNQSLLALRFFKWFAEEHGVVVQTAHSPEGEKRIGQYSLDGWIQAERRAIEVNGN

SEQ ID NO: 146459 - protein, 424 aa, Heterodera glycines
MLLPNGKSAGEVRERDAKRLEFIHSQVAHVDVYWECEIQCMLSRSKEMRQKFAEYVDDGPLLIRDAFMGGRTGPLTLYHEARDGEKISYFDFTSLYPYVNFVTRYPVGHPKVHVFNEDVTWTHSGDNPYPLALLKVFVVPPKKCDVPVLPVRINERLCFPLCHRCAQDYPMGDVDPDYHCEHTDQQRGWVSTCTSIELNAALDEGYRVTKLFRVLEYEQSDDKLFRGYIAEFMAQKIQASDFAANIKGNNELEEQFVNECHEMFGITIDPEQMAVNKGKRSIAKLCLNNLWGRFSLRNFGLAQTVITDDPAVLAEYLDNKSIDVMSIDELNETTILISYMQKKEWVEEHECSNIVISLWTTSAARLLLLRAMQMVVRTPGCRLLYTDTDSLIFAHLIANCPLQTGPHLGQFTDEYPDHEIVEYC

SEQ ID NO: 146460 - protein, 176 aa, Heterodera glycines
MVLVSEYCAQFFGCSPKTLRDRLNHPEDRERALKELTGKKVQTTYKDRNGMRKTFFIDGITEKGAAFVPAYGRLRQPFNINVAAHFYARHRVKLHHPYIPCIVERFECGENRNYPMELLEIVKEGQQPIGQWLGNLFKERDDICSSSSTLSDKTLVLRDEEDTGRDQCSQKSPEFY

SEQ ID NO: 146461 - protein, 108 aa, Heterodera glycines
MLSTQSSRNERKEMEGQEEQCENSPTKKQKLDKPKVYDSMLWKILKGKYMISMYLCADDWRKLFENREKVQRSANDRVRISFDMCEECARVNCRMTDLIAPPKKNLIL

SEQ ID NO: 146462 - protein, 35 aa, Heterodera glycines
MTTWASLELKWNSLRMKSAPREETHAIKRLLFCFA

SEQ ID NO: 146463 - protein, 239 aa, Heterodera glycines
FEIYYHKGCVVQCAVNLFRRKKFSFTDQFVLSYGGLRGAIAFGLVMSTNNSADARSMFISARSMFISTTLAVIFFTVFVQGISIRPLLFWLKVEKSGLDGPMMSNKIFERYTDHTMSGLEAIIGHKGTHSLRDAFERFNNTVLTPFLMRSGEQQRKTYEASPIVRAYHKITLQEALQLAQSGSKISKLEIILKFELKINQIIFFAISNSNKQFVLSLEKQKFLSNRENVELLYLMFSRM

SEQ ID NO: 146464 - protein, 79 aa, Heterodera glycines
MFVTTTLAVIFFTVFVQGISIRPLLFWLKVERDDDTARPAAEEKKDDNPDEKLDRYTDYAMAGLETITSGAGKHFLRKA

SEQ ID NO: 146465 - protein, 174 aa, Heterodera glycines
MNRSGIASSIDVKVRQCLQMSYYLVFVLFLTFCVYPLIKLARERLALYILISKYQFRFSSLLVISLYTWPYLIVSSSLYVAIAIRLAWIKAHNRSWNSEGASAQSSDKDSGRITATCFAIHIQAWAYVGANSAANYKWYSDFINCHPIGQIAFFPIQLFVCIYVIADEAIKIKI

SEQ ID NO: 146466 - protein, 28 aa, Heterodera glycines
MCGMLELSSMHENAAFSFDYELDIFVHN

SEQ ID NO: 146467 - protein, 138 aa, Heterodera glycines
MTSNKQRQLVHKDVKLRHQFKQKHSSMQLTARFRKQIHMSSTIEEVQQRMNHNRPQPRRSQQRGLRPTQAPKICQSGMAQYKQGRGIRLHTASSAMALTGPRRRLSEQPLQQEQGHESSTSPGRERRPRKSQRHAPDR

SEQ ID NO: 146468 - protein, 239 aa, Heterodera glycines
MSGPIQKGIINALKALDNAKSATSLILHPDPDLSNWENAVNLEAQFDRVVKEIRTMEMQMDSLRDSSNAWIELLARLTGDDKDNGEKEYIKFDKNEKIADRYDAATTKLRDLRDLEATLSAAAKLHRGRADREAKADQLANPQQQPPMPPAMAAPMTMPTFTAPLYQFQPIQLDKFFGQKRKWPEFYESFKSAIGSQSISKAQKLNLLRNLLGGEARELIAGFRLEDANYETVLQLSHK

SEQ ID NO: 146469 - protein, 41 aa, Heterodera glycines
MTLCMYNESMNILLHFMTLCIMYPKSQKMGRLQFIWSYYCL

SEQ ID NO: 146470 - protein, 77 aa, Heterodera glycines
LIEKKLGYRMKLSTQNLVACKQSYAMLMLNEQNYWQRKTLILRTALEWWFYDASAKSSGSAFLNILFPALAERNFNN

SEQ ID NO: 146471 - protein, 141 aa, Heterodera glycines
MAKDSYARFLKSEQYLELLNNNNNNNGNNNNENDGGEHMQQPKGLLRYGLPVPVRDVPSQPSHCHHCPAPVAAEVRHCRRAAAALAPGVGTRAGTLAHRPQRQCQCWPAPTQKRAPPALAIMAQYPPTFCPAAVASAVRHR

SEQ ID NO: 146472 - protein, 160 aa, Heterodera glycines
ASLQHHYSPMRVHRGGGGGTNGGNRSSPQKVGPTSPLKQQQASSAELVDPYNNTNALQQQQQQSPTTKRRGGGGRLRSALAATTDNTMVRRVASFTFSPPLRAGSLQHNQLQHQLQQQNFLSALDKHCSSNSAAGALRLDKRNSVATGGGGTDKLQRRMA

SEQ ID NO: 146473 - protein, 167 aa, Heterodera glycines
MPKTRDRDPHKLDIFLEWRRSPFLGTWVGDNPEKWPNPGKGLTMPLTRPPPISHQAALPPRPQQIVALFKCSSDTSTTNSFQQWHRAPSKHRRHWPTVSAAVVPRSVPAARTLAAVRRRRMSHHPLPHPRRPHRLWSNCPQILLAKQSQQHQQMDNNNSSEKCGGME

SEQ ID NO: 146474 - protein, 351 aa, Heterodera glycines
MAVGPGPNPIKELTDKFHQKAFYNTERSDAGASSSRALITNTVKQRSPSSQSPSENFVVGTLPMDRDFSPILNPTIGQSSLMRRRQHPGREEKQLNQSGEASTEKTGETTDELVVRAIATSIRAVGKPTRQLRFGFVASGSGPFPYALDADVKSIVKLISDRKMESALKAEHLMGQMKEMANERIDKILVQIGDESSEFHAKIRRKSQKQRELSVLFFFVRLWRKLGTLLVLENLDINSTEFHEQILGCLNALRAEIWKEFASSCEAAKNGKAFQWVESLNRFDDAIELTNFGILLLFTPPIVQAAEMVNRPTTQNEFFNTHSPQFIVQEGTDDNYSTELADQMTWKQLSN

SEQ ID NO: 146475 - protein, 503 aa, Heterodera glycines
YPELIDGFNTFLPHGYEVRVHGSHIFIFEPNGSSSMINNSFAIGGDLIEDGMELAVAAASPQIPLPSSSSVPTIQSHSVSKPNTAISESPTGIGQSVRYVHVHHQIENPLTTIPMEVENEMVRPSIDGGSQRISQEGTQTQQKVLSCESEHNIQNQQSQQQTTKTGQLIHFSEALGYLNRIKGRFADRPDVYREFLNILGNYQQCEGDQKWSEAEVYQRVSRLFHNELDLMRDFKSFLPDAKLDFIEHQSEQQKPKLEEEGKREVMEQKQKQQKEQQQPMQTAQNAKPTAAKSADIVHKRQFGKEQANLNAKKAKASVNKITYDVGVAEILEEIPLRDFVIFEKTTTLANSTASATVAYPRTAFVLFVRDAVLSATKCSTIRTSHFPNGKPYHFTEMIMSPYEDLMYRTEDERFEVDIFIEVNSAAITALECARRKIESMGHEDAKKFMSEEDLGCSPTFLTRAVKKLYGEHGGKILFALKENPLVAVPMVLRRLREKDVECR

SEQ ID NO: 146476 - protein, 486 aa, Heterodera glycines
MNICSRNWAFGEPYDEANGRERCAMLNIKLDANIDDIDCDMSAGPELSYRFVCERTHEKHIEHESLNNPLWKKLEDILNFFGIRGAQQDDTNRTSGLEEEGYWDRVLGKSDAFKKRNSAELQERSEKQINAKASEPENQQQNANAQQSAKSSEPEQQSAKASELAQQSAKASEPVQQNAKASEAAIQQQKANAQQNAKASEDVQQNAKASEPAIQQQNAKASEDVQQNAKASEAAEQNAKASEPAIQQQNAKASEDVQQNAKASEAAEQNAKASEPAIQQQNAKASEAAEQNAKASEPVQQNAKASEPAIQQQNANAQQNAKMENITSKDAPNAKSDTSINKQSMNGSDTNEKNAMETNFVVPSSIESRVIEPVREKHPVDHAKSLMLDNTPNSLIAASTDTVGTSVEGVQRMDDLDGQNGTNKFRAFRTQFNENRLTEKTKNDGKKEVKKEVKEKAEEKEEEKSKNEERKEEQKPAEEKREEGKE

SEQ ID NO: 146477 - protein, 716 aa, Heterodera glycines
FQLSPAAGKMKMRRMTASINTIDHNEYKRSCLPDGITAFNFNETKTRLMKLFARPPSLAIDRYECLKATRKEGEEFSVFVNRLKSLFRKFRYSELNEDQFKCLVLLTSLKSSSEAKLRQHILSRLTTEETKNSNAEIFQNISEEIMTMLKTEAEVKILEQAKPKINAFSQNKPIRKKENSGKPSQNIGNKGKTPPNNCFRCGEMNWAQNCPKLNYVCKKCNQKRHIEKATESRPTIKPKGQESEVEHDSNFCRSHQKNGTSKIIRISIIMNGKTIKFIADSGSDINIIDEIAYKCIGSPPLEESDEEGILFDGRRCQFIGKMCYLQIQRIKVKQPFYVAKAGALNLHGAATMDKFGFLANSINQITSKNNETKIRNSINQITSKNNETKIRAIKELQSKFEQVFLEGLGLCTKMKASLMLKSDTKPVFRRARPVPYSSLPIVNNELDRLEKINVIRPVEHTEWAAPILVVKKANGSTRLCADFSNGLNDCLQLNKHPLPLPSDIFPTLNGGKFFSQSIMDNMLSDYPFAIAYLDDIITVSKSMEEHCEHLDKLFARLQEWGLKVHIEKCSFFQKEIKYLGVTINQNGRNPDYNKIAAIAEMPAPSNLNKLRSYLGMVNYYQEFVKNFRFIRQPLDDLLKKDKIWDCTSACQKAFDKIINMLQFVAADASQSGIGGSDIDFDRFRIPDLNSNKSRKFIFHLNHFMLESEQNSGPGFG

SEQ ID NO: 146478 - protein, 125 aa, Heterodera glycines
MSDGSGNGCLFSWRQSFRPFEKSAHNLVDPLAFFTTKIGAAHSVCSTGLMTLIFSNRSNSLFTIGRDEYGTGRARRNTGLVSDLSIREAFILVQRPRPSKKTCSNFDCNSLIAYRIFVSLFLEVI

SEQ ID NO: 146479 - protein, 149 aa, Heterodera glycines
MSVFLFVLIQAHRQQLIREVLELIPIFVRFVNIAVPRHIRGHKLYNKELVEEFHWAQEPGLFIFGRHFTPCSDELGLQTSQAEVLCASVDSLVRKAKFVAEYHLPLIVEKQRAQQTEAKQPQQVPSSSSSTAAATAEENKSTGRSDEAS

SEQ ID NO: 146480 - protein, 108 aa, Heterodera glycines
MLENRDLSFYISDDDDAQAICLMSRRIADKYNPGLKYTIFTKRVPAPFETISFSNRQIIENNSLRTLDFLSCLVYAAPNVVELDLANNAVSEAIHQFFPRVTYLVLYK

SEQ ID NO: 146481 - protein, 80 aa, Heterodera glycines
LISSQKSCQFKTAKKAEFSKFFISIFFYSSKFSVIFSRLIEPVKSFRLISRLFDSVNNFKSYIDSKLAQTELARRSWPVP

SEQ ID NO: 146482 - protein, 246 aa, Heterodera glycines
MNRRWICNDVWMDIFPSFDRAQLGLKLALLSPRFDALVDKHFDGKSELTIWRPIEIRRKDKGPEPKLSVRIDYEFVPFPLPDRPLPSKIRFKNLRIDYIDHFVIAFLRLNHQIFEKRGTDLYLWISSSHSTNGQPIWDVFVREIWPIFSTNIRCLGFTGGDHLDHLRRRTSPTILTDLNQLNSICSCDLSPAAFGDDFDGPNSIISAGQALSKWLHSPRKDGQPKRLRCEDFKGQTDFDWANNFKE

SEQ ID NO: 146483 - protein, 34 aa, Heterodera glycines
MSGDNSALIAAEQAAYGPFFGSLGVTAAMIFTAA

SEQ ID NO: 146484 - protein, 121 aa, Heterodera glycines
MGLYPKTGLAGVASVGRCSVVPIRFETVGWICNDVWMDIFPSLDHAQLGLKLALLSPRFNALVDKHFDGKSELTIWRTIEISKDKGPEPKLSVRMDDKFVPFPLPDRPLPSKILFKRLRIE

SEQ ID NO: 146485 - protein, 148 aa, Heterodera glycines
SWTITPGDRGSGALTVPRFAPEEWSVHKRTLDGGDRTNNYAEAFHRKLQRAFDCTHPTVFHFINTIRCEQKSIDADISRCIAGEVPPLKKPKYCAADERILRLLQGYNAINNNPAIQNDHNYHANVNVNPDNINHLLVGVSRNYEMRP

SEQ ID NO: 146486 - protein, 60 aa, Heterodera glycines
FGPRGRLGPNPKIEKCAFLKIKILKTKPEGSLATWHKLGLITFAHFLQFYLFQILLFFNS

SEQ ID NO: 146487 - protein, 336 aa, Heterodera glycines
MLNEARKNSDEERMRSKIWYDSQPKVTANKFEAGQRVMVAFPGLNRRSRHKKLLWSHFGPYLILEINESSAFLVPIDNRNAEPIKVPIERLIRIPPGIPDISTLPKGKNPFKNALKSLIVSILSSFEVCESDGQMAHYEQLGAIANLKGGEGMIRKMEKAAQSREIPFSEMEIDNEDEAEDTFGWNAKCDVGQGEHEFCAILRVAELDPALGNAELGSITVKTPLQALLAVFLLKAGTVKSMTAARSFVKSIIEGAPKEELSLFVTKKGDYVATGQCPTEEDQMKALECWFEKCSVAKHALEESGFKKIGMDEPVGLNHLADSEKKKWEEAMGETP

SEQ ID NO: 146488 - protein, 325 aa, Heterodera glycines
MDEPVGLNHLADSEKKKWEEAMGETPWVLEKLRAKIIHKATKLIALPRVIIGDSTAHQLAEILDQTAVIGPKNGTLAETVRSLKPVVLSSKVKAALIIVGRDSLLGGETIEVMMEQYEMIANLCRRFPQVKFFWTCPPYVHDKHDEYEELIESLVPMMSQKPFLPVWVTEKGRSLHEVFRFANSFDNQRVTTDGLMQEAGLRALKAWLFTQSDFPGDQKLKIRSIRSTVRAVATIGLGDHRQASTSSLAVNDSIGLGDRRRHTIGSVGHRDRDQRRQSLGSIGLGDHRRHTFGEVPSRERHHPYSRWNNRAVMPYRGRGPSHSRR

SEQ ID NO: 146489 - protein, 489 aa, Heterodera glycines
EPCPLDYYLGQTSLNSTQRELFVSWGLYQVLNCLKFLHNEAKISHNNLRNNCLKFLHNEAKISHNNLRNAIFITESGDWKLASFHLSGTFSSPQCDLTDLADTLNRIFRPNSPQCDLTDLADTLNRIFRPNSSADSTLPKRVQPLFRRFNARGRSVMAVADILNECRSVGGFMKNKFVDTLLFLDEFQLRDAAERQSFFMQLNSNLDLFPDDISCNKILPKLIHTYEFGDAGAHILVPMFKTYEFGDAGAHILVPMFKLGRLLDENEYQQRIVPCLVKLFSSTDYQQRIVPCLVKLFSSTDRTTRVKLLERIDEFSSHLRPQVVNRTTRVKLLERIDEFSSHLRPQVVNEKIYGNLITGFMDSNSAVRESTVKAEKIYGNLITGFMDSNSAVRESTVKAIVSFADKLNHSNLNTDLMKHLARLQGSDPEPSIRTNTTSDPEPSIRTNTTICLGKIGCFIPSRIISAFICLGKIGCFIPSRIISAFTRAL

SEQ ID NO: 146490 - protein, 447 aa, Heterodera glycines
MTQTGDHGGDSPAEITTALLVYAKGLNILTNLSDILTVHQVDIVPTLSLLLGVPIPFSSIGLAIDSLLPQNSLHELRLNSFQLIRYAQQYFHHYPPMQVKLRYIIRQYETAADDFHSNLFVIKSIQKLLRLSLDQFHFSVCVVGLISLLESVLFNGFLLLDNADEWISIRLWVFRSALLFLQLSLVFAAEPSVDTVFFSVTSLAVSLCSQTVVLSYKIFAAVTNKYSPFPSSPCLTLFANFVLSLLPLSNSFVIYESDVLRFSLQSVICVLLLYRLIESASTDFVVSLGNIRLIESVSLRLAQFVYFAFFVHLLAFRWLSVSASAWVWPHFHALAVPLVMLSGYSYGQIISVIVFAFAVSDPLTSSESVWTGAFLLHLIALLSFYATGHHQTLNSIPWHAAFVGLPGNFPFKWLSALLIFFNMFSGKMLASLLAFTREREDTIKGPL

SEQ ID NO: 146491 - protein, 298 aa, Heterodera glycines
QANGLVVRKRPEYLLMYNPKYGLSILLPKYANVQSACEFDEKFSLGEFYSCAFIRVAEREARRLTYEWMCKGDFKLHEPMLKTRLIMDRFVHVHVNCEFTKEKITKLHGDHYVLKTDLGNVRFGKEFLTHNDLYDKSANVWVTFVKETEGCHWEIVQDSWGSLLDDEPPPQMLTTSQPEQSVVAQQQNLQNQLVEQLRSKLYCQAGYVDFLFGSEVCDGLGGERTAAQRYGMANDSDGDGESDSDDFRQVDNWDDSASTTDDGIDADLNNDSEYDSDAEEKRMRIIGGASPPRPRHFQ

SEQ ID NO: 146492 - protein, 242 aa, Heterodera glycines
MSIFTDEYKCRWMAFAMEKQNDVYQKVVNVLGVTIGNEQDEKVSVIATSYGIARQPKRLELGTWVEATIQVESDEQAVRTLAYDSFMHEHTYRVLYSKKISPPMSTRVVNKSGAEKLLLCGDVKCVVNCLRNDYLGRVEDTKQHIRTKPGESYLVEIGINRQPENRRNCFWNVLKSHGKSVKSVHKVPLQVITFFVFGFSQFHLFYPFKLSIYSVEDGKTCDDAHRILIDQVFDARDNTWDT

SEQ ID NO: 146493 - protein, 138 aa, Heterodera glycines
MSLFGRLAEFALSSNSDAIKRPPLANASDLLNSPTTSSSSVDGHKCQIMNNKKSTISWPMPNGAVVDQNVPSVPATVISPSKISKRYRQLKRQCANTGKLFIDTEFPPDNTTLFITDENGDGSAERAAELEIEWKRPG

SEQ ID NO: 146494 - protein, 34 aa, Heterodera glycines
KSAKGMNGRKVFDFRNSYIYGEFLSISLVSYFLS

SEQ ID NO: 146495 - protein, 32 aa, Heterodera glycines
MEDKSEGTPYKANNSIKFRRRQLKMDSNTKIS

SEQ ID NO: 146496 - protein, 44 aa, Heterodera glycines
MHRMYRRRRNRTTKVGEKTLKEKKVGFKGRFSGAYFSEIFWVDS

SEQ ID NO: 146497 - protein, 445 aa, Heterodera glycines
MEKVNYLPCPKNSKSGKPSRLSSDFPAMFCFQNLEENIAGKIKNFVEKNNLLPNCQHGFRKAHSVTTQLLEVVDDFSFALENKKSIDVIYFDLAKAFDTVPHNRLISKLKSIGINNSLLKWIQNYLENRKFFVKSGSDFSDEYPCLSGVPQGSILGPLLFLIYIYDLPKFCETENVKIKLFADDLKAYHVLSNISFSPLQNFINKFNQYCKFNGLKIASNKCLTLHLGHKNQKINYFIDDFQIPKNPGNEPVRDLGIYFTNDLKWAQHIDIISKKALRSAFAILKSIKTRDTKILVNLFNIYCRPILEFGSPIFNPYLKKDIEKLENVQKTFLRVIFRRNNYTVDLPNYAELLNIYDQKSLESRKINLQNNESFSFSKNPVKNEFIIRTAYCSTNARYNSFFIRTSRLFRLLPKETRLLNPNEFAKLLERSDLNLLISLPPQLQK

SEQ ID NO: 146498 - protein, 126 aa, Heterodera glycines
ATSNGECYAPFLANPFVNMGMYLAYYWTTLVAMLILYKGIHKAAKKLEKRSRAREGIHKAAKKLEKRSRAREHRHIALLLTQRLGTQVGVGLMLHAKRYQEEARHEQQTAETDNENGAQQVTEENR

SEQ ID NO: 146499 - protein, 297 aa, Heterodera glycines
MLLLSFGLIVLLFACANCSTEGGTTEHPSSSPPPATDRNGDKPSPVHPVLKKFTNARDAVKKHVEAAHKVVVPAVNKYFDKYLLPNAKKVGETATRGFRNFRRKFLRPTVNNVVERSHSLGERLASMKKWESSDDEETEKQKDKGGEKEDEEKKKMNGKNDKKEERMKENEHAKRHGEKKEHHAEKEGKEVKKHEEKEEKEEKKHEAKKEHHAEKDGKPKNEVGLGEEKKHETKNEFEEEKVHKEKREHEEKKEQEERKDEEKKKECEENREQEHDNHEAKKESKSDEINSIEEKLN

SEQ ID NO: 146500 - protein, 23 aa, Heterodera glycines
TRRSRVPEREALSPQQQNSIDNV

SEQ ID NO: 146501 - protein, 59 aa, Heterodera glycines
VYKLGCPVGYGVHAWLGNIWPSFVILKHTKHYQLSSVAVGKALRAQGRGFAASLEIDVI

SEQ ID NO: 146502 - protein, 115 aa, Heterodera glycines
MIEERPLIECAVIGPTNSGGAEKNAAIFEFRTKEGCTVLKTLTELEQLFEHFRNLLPQGTEKMPKKKFLVPEQKLMEKRKNWAEALVTHLVANHSEKWEKGGGKEKGPIRKGGEI

SEQ ID NO: 146503 - protein, 103 aa, Heterodera glycines
AETEETKAIDSLGTQSFCGPKIPSNELRSPSKQQRMLSPLKLLFANSQPHPDAVSSNSVGPGGVFFPPPGDSFLSLDPPFEENDPYCPLFMNDQNTSLNSLFG

SEQ ID NO: 146504 - protein, 597 aa, Heterodera glycines
PWSIRAKLVPGQHDLLRLVASSRPTSTGDELGGGPSTSSQPEEVPSSSSFSVFADGAQQSSPLKKDNTADPVPSSSPSVKETAAASKNGENSSRMAKISAIFDRQWTEWKRLYHSLADPPPSGQAQTTDSVPHSAAPSPQTNAQATTARSTATTTNASGLTGRNSGGGDGAWDAAGQHQKQQQALPRLVMVEVNGHRMLYPSQFVAVLADELLPIVRRERAPSEQTTKEEEEQADGETEAAAGMSNSASTSTDSCGQTVPKSGHNNALPSSSSVTQRPLFLHRMRRRSAAAIGQCAARCSFEDALLRARGSGVATAVKRELQQQQQQQFQNVQQQQHITGTTTVRTLDEFNYDYARREFCYCRICHGGRRNGGGLAPSSTATTPLATTTAVGLNSPSSTASTTVVAAGGPLTPTAATTAIAAPATAATVLHSPCSCAAHPAAPFHHRHGNDGNYDPYSSPATQQYIQAVHDEPQHAHKTSSSSLKKAVPSLATGKRASSKFNGTTKSGTDDAAHNTHQQHSSSQQQQQQNRWARGCATNAATSSSSTTSATEWPTVPEWDLLKTGSVLANRRKTQQQLLALSKTKEGGQQHEIAATT

SEQ ID NO: 146505 - protein, 259 aa, Heterodera glycines
MCSLGVKRGSINGCSEQNKSAGESDSERHLEQKVLDPLEVFGPPPPLPSTEPPPLNDELVSAFNRFSADHVGTSSTTKAKEQQPILQSVSFVSMASGGTLGDGRPNRRSASSSSSTTSDEEDICLAAQRSKIRQMQIRPLNDSQQPKLNASVDELRTAIGQISLPKCKGSESDPWGGGPTQSVTTQLPSGFFSNSHQEGPIRAALTGDEHLRRKYHGIFKKNLIAVEPALNKSIEYYIAKELVRIGIRTHTQVGTGTGH

SEQ ID NO: 146506 - protein, 283 aa, Heterodera glycines
QMNAGDKHIGYSVLYENMKKGEESVHELLTFLKERVNMEDDLFKSLGKSLHRVNGYISNKSGFVDAWKLAKETLELWRVNGYISNKSGFVDAWKLAKETLELWTEIQSSTIQSSTLRNLNDLLKEVARYQEELARMRKRAKDADTLETINLMQTTTTCLQKARDTFNQRSTEVVSLKQSNKEWTAASTKEYLRVLTAHEEAHEEYKQYMDKYSQIRDTFEERVNQAARSFQEHDRLHLLQMKSFFTQFFTQMAKCLENAHGANAQVSATLRQRVEHINVEQMM

SEQ ID NO: 146507 - protein, 316 aa, Heterodera glycines
FSWIFPMGFGRIQGKYIYEHGSKFGKRVQSNMGAKNHGVILPDANREHTLNQVAAAAFVAAAAFGAAGQRCMALSTAIFVGDARGWVSDLVERARKLRVGPGWEAGTDIGPVISQKAKERICELVESALEEGADVPLDGTNVTVKGFEKGNFVGPTVITGVVITGVKPEMLCYKEEIFGPVLCVLETETLEEIFGPVLCVLETETLDEAMDLINKNPYGNGTALFTRSGIAAHRFVSEIDVGQVGINVPIPVPLPMFSFTGSRGSFLGDANFLGDANFYGKAGLNFYTQIRTVTQLWRSEDASTEAKPQLSFPQFK

SEQ ID NO: 146508 - protein, 633 aa, Heterodera glycines
MEPPAVTSCGVGGHSASGLNDGTGGLQKRDLSTVAGFIQIDPQISFNTTSRHFEELPENFLETISPQQGHSSVGHHQLIAGLGGLHHESGGNVSHVTTTPQLASLTTVSMAGTADGNSFGNGPAGLLSPLHLEGTRRGDPEGSLGLLSSVSVSHLHRPNGGSRTSDLLNGIRRSSNNVAYIKEEINPSNELGGYHSAASVSHHHEAYGDAGPYTLQGPTAQELERMANAETPPALSNVEITSSILASLSRESPSPNIQQQSPHQPTHFIVHQMSRQPQQLEHQIVQRHPITSTPSTTARRSKVKQQSLSQNLGQNSQNSDQQIILASNGSGTQSGYGPMGPGAGIPRTTYSTTDTTDPLNAEIDDEIYIDTKDLCKRVAYELKQHSIPQAIFAERILCRSQGTLSDLLRNPKPWNRLKSGRETFRRMFNWLQQPLHIRLSILDMYKGPMASGVIPPPTPAQNSRHHHRNRRTSDTNEEGNPPQKRPRLVFTDIQKRTLQAIFKETQRPSREMQQTIAEHLRLDMSTVSNFFMNARRRSRNGNGMGDEPAPYQQVNCDFIKEKLPNNLKDEITQQFPSMENGPMLDLTMGGNNNAFGYFPTNGVFNHNINENNDQLLASIYGQHAINMASQYGQ

SEQ ID NO: 146509 - protein, 99 aa, Heterodera glycines
MRLAISPSIKLNIVGKTVVPFFGSVVHCPSWSVRFVSTVPNWIHGQRVESKTKEWIELTNPATNEVVCLVPESTLDEMQLSVHSCKKAFLTWRHSSVVT

SEQ ID NO: 146510 - protein, 62 aa, Heterodera glycines
MPAFLAQQLVRLSDQTIAGLRLFPVDERHVSVNSEESNAGTLLRLLPDKFRENVLSIQPDDS

SEQ ID NO: 146511 - protein, 40 aa, Heterodera glycines
KILVDNDKTYPPCLIRPNRPIQWFLDEEAVKEMAAAMNVA

SEQ ID NO: 146512 - protein, 155 aa, Heterodera glycines
MTFTFIKFFYARPRPHSQTGRIKTTLGSVDLSRPGATLFRKGIFSPELTVERLWKAKHLYESAYHPMSDQKMLPFGRMCAQVPCNMVLIGGMLSFYKSPLAVVFWQWTNQSFNAVVNYTNRSGDSVSTDQLLKAYACATGGALTAALGLNAAAKV

SEQ ID NO: 146513 - protein, 219 aa, Heterodera glycines
MAYISVVGGGLFRFFCSVRNNLCSSRSGCAFLTLVSRSCAQQAIRKMHHSQIFENSQLLTASGTETLANLVTLLQQPNVISLLEAARVIQSAQNVTSSADLLLKMDQNRQQNLFKMPTLLPPNLNQGALLGLSQGLLLQQSAVGASPLGHSALNLSVPSAIHSVLPTTPPNLPIISPSCSIVSRMTPANPSYPIDKYNRGPDGCNLFIYHLPQDFADTD

SEQ ID NO: 146514 - protein, 200 aa, Heterodera glycines
MAYLSWTTTTLKTTTMLLNLTLFCQCVHSLVIHPRLCSTSAAVAARQIGAGPERTAVEDEQLQHLLDISNSRNSNTKRMRWYGAEAKQMLRHLDEIRLRTETAQQRKAVAKVGKVSLLDKLFALFTDKPDDEGPKHDCFFSAFNCPVNPARNIPGVRRVRITADERQKLLAAKQRAATIGSSGGGITERHWRRPRHHHHQ

SEQ ID NO: 146515 - protein, 258 aa, Heterodera glycines
FRNKLQKRHNPQRADKECHSYVLKNCKENLVRPLFHIFSFSLMTAKIPEIWKKSIICPVPKIQNPVNPVDFRPISLLCSVSKILEENIAGKIKNFVEKNNLLPNCQHGFRKAHSVTTQLLEVVDDFSFALENRKSIDVIYFDLAKAFDTVPHNRLISKLQNIGINNSLLKWIQNYLENRKFFVKIGSYFSDEYPCLSGVPQGSILGPLLFLIYIYDLPKFCETENVKIKRDRKLFIILSKMDDRKLFIILSKMDQILY

SEQ ID NO: 146516 - protein, 158 aa, Heterodera glycines
MKIGVKGKQLRNYHKYILSNTGFYRVPRAGLKFGPFSEPGDKGYCRGYQKKKMGAYCKHFPLTIKFNGGELEAFCATTDQSKNFMADAYALGLRRTGRDRDPAGFLRDPAGFLRDPDLGIRPERFFKFIGIDWDRDFIGIPNLDPSRPFYQSRGIPRD

SEQ ID NO: 146517 - protein, 151 aa, Heterodera glycines
MFEIDRDRDSVGIQSGSRLGIPPTPVVRSLICPMPKNSLIIFLSINNSLKISVIAFLKNPSYLAQQHEKKLLGVELFSRMLCLPYANKELATWDEAMRFYGRTQFGKLIANLITILIERAHGPDPFQISLSEHFVLAELPFIRPLIKVKNS

SEQ ID NO: 146518 - protein, 159 aa, Heterodera glycines
MFYFIFLFLVSLIFELFLLTPGLPFKIDRIFRESRQCSRKSFGLPSRLAHIFYGSLIKEKIRKKKLCLGKTRMKKRKDMDRLANDEQVRLFGLNCESETIKGICNICLLAVFASADSGQVFLGPQIRVLRVFLIFAEFRVFPNYPINHVVKNGNEGFVK

SEQ ID NO: 146519 - protein, 71 aa, Heterodera glycines
MAYATEPVSARFADHAAILGLWPQGQCVYLLPLSEDGTAGPHGEHYAGVRPAARQTVADAQRTPCGLVVQT

SEQ ID NO: 146520 - protein, 184 aa, Heterodera glycines
MLDLRCFNTRIPDQQISVPLVPLHLYYIVFELLKNSMRATIEHHHRVKGFDADSSDDLAEISDRGGGVPSAKLANLFHYLYSTAPKPSRDDSNTPFAVPSQACELLPVYGASSRRFITMAREAPDYCFQKPTAITAPALDSTTSADISAVPVKAVKPKLVPETTTTKTKSISSSSSGKAERVAI

SEQ ID NO: 146521 - protein, 42 aa, Heterodera glycines
MRLARLRQSQLAAKREFERNMQMKANNAAQSPASNCFDRAPW

SEQ ID NO: 146522 - protein, 163 aa, Heterodera glycines
MPQIFENLCHCCVSIVNKTIPKHDPSKSAAKAPKYEPKIDRNNTPVDYDGKEKKCKVEANIDVMSEELKNILKEKGADKRDINAAEDGCGLKEYAWHSTVVVAIMLPKSTASKKRSQPKTSTTWTSSTSMASCTHNVEKTGIVGHFRQLLAIFRPNFGNVLRQ

SEQ ID NO: 146523 - protein, 339 aa, Heterodera glycines
MKKANKNVFCGVFFQKNFLKQFLDFELILRKKYIHIICAFRKLIMAISMFGQFTDFQKSFLKLEKQAVLPFPIRSFRGSVNILLAFYSLSEMLNLSGNFISVYTVFSGHYFMPFQMLYRLSLIPFIGASCAMILMFFTGVERLFIVLFPLKKFNQKLFLGIALTFNLIAIFVIASSTKYFDQKTNSLEVFANYYEIGSLICKLEQSFILSLSGLITVIISVSVYALIAVALQCQKVPSISNSTQLTNQRIFRSLFTIVVVNIGGYLIVFLNNLVIVPIFGNNLLAWHATQIGGILMHISASSNGPILYWRNLEYRKAFHKEFAFVLKIFCKRSSAVVPQ

SEQ ID NO: 146524 - protein, 133 aa, Heterodera glycines
ALWDRYRAMFALRNLNNDRATKALADEIFNFVYNYSPLSQGLLCDDSSALFRHEVAYVLGQIQSPVAIPALSARLQMHGENGMVRHECAEALGSIATDECQRLLRQFVGDEERVVRESCEVALDIAELNRTDE

SEQ ID NO: 146525 - protein, 89 aa, Heterodera glycines
RIYGGRCRKIVQSAQQSDERIECQKENAGVLRKTIGHVARMRLALPSANARRIENNERLRMDKGGKDAEEKAFDGHCRNGKQTNDGIHF

SEQ ID NO: 146526 - protein, 41 aa, Heterodera glycines
YEIHFQFFDSVRRFDKDGFRFAISRSTFGNWSRIFSAITCN

SEQ ID NO: 146527 - protein, 66 aa, Heterodera glycines
METEPIESTAETAEPNVVDTDQHGNAELRERFLRFLQLLPGRSVDVKLYGDIQVGGKFVAAEPSSF

SEQ ID NO: 146528 - protein, 112 aa, Heterodera glycines
MSPKSSHVNYDLLPEISHTFRSPEPRPSVLVSDMFSVLCASPLIILFLLWLRIGINFGKFKFSLSALGFHLGLCAVFGLYVFFWLELNMFQTLKWLAVIGVPTLFLGSRLSF

SEQ ID NO: 146529 - protein, 505 aa, Heterodera glycines
MTTNCYANAIILRPAEGVASYVGEQYMDVCRPGRGGYCSRVVFLNADGTIREVITSCLKREQLVPRELPFVCQNSTTPQWNKLVNCCKSESFCNDIQFPIELGLRNGFLPESFDGLPSVFLTLLISLVLVLLFALSICVAISCCCFPRKRAVVDRCIGCSKADCEMDSESLCGAPMGQLAEAATFSTGSGSGVPMLAPRTISYQISLQTVIGKGRFGEVTLGEWRGEKVAVKIFESREVASFDRETTIYRDNMLRHQNLLRWISSDTVDTGEGIMHWLVTDYCPNGSLLDHLENNTLNTQQCLQFIRSIAHGIDYLHTSLTGNKNFFKPSIAHRDLKPGNILIKNDWTCCIADLGMCVRLKSDGIIDRPEGGDRGGTARYLAPEFLDKSYSNDSITSYIRMDIYALALVIWEICRVSALDYQVPYQEYELTSTHPSPDAMKQIVCVEGLRPTIPKEWSKTKILTEFTRVIKECWNAMPQSRLTALSIRCTIDRICTEENIIITTT

SEQ ID NO: 146530 - protein, 132 aa, Heterodera glycines
MVETVIQQQFDDQAKLEKRREKRRRQRKRKRMEQQEKEGDDKKEGEKEEEQTEDEADPFDDENYTVKQFEEEAERMRKKRMGTELDEDEREIRHLEAKLRKKGRKKGKKELEEDGDELDELEKAILGGGEND

SEQ ID NO: 146531 - protein, 80 aa, Heterodera glycines
MFKKFDSADDVVGSQQLKGSVQKSIRAKLVEQYPSIEPYMDAILPKKENFKLVKCKDHLELIADANGTVHFVKVGIFNLK

SEQ ID NO: 146532 - protein, 108 aa, Heterodera glycines
DLANYFPTLRLLHKYPFMLPHQQVDKGAIKFVLNGSHIMCPGLTSAGGRLLDDCNEGAVAIMAEGKQHAMGIGQMKLSSANVRSQNVGIAIDNVHFMNDGLWRLTTVQ

SEQ ID NO: 146533 - protein, 123 aa, Heterodera glycines
MAMVGTTTTNSSSDCSSTATRPFVHINVNTVEYAVPSEYQFVDYLGGGNYGNVMMTIGLDFLTYFFFHIMALRLGFSRHFSFSFDGICATLFCWQLHCVRIRWRQPKAGVGPTKTVGPIADQP

SEQ ID NO: 146534 - protein, 248 aa, Heterodera glycines
MNFDEHGQINVMSSEHAYFMLKAAHFGDMASFHHIRHEPTPAAAKRLGRHIMPFVEQKWHVVRFELMCRALRAKFAVEPLRSALRTTGYGQLVEASRDEYWAAGREMHDVGLTATANWLGQNALGEALMIIREEVRTHPPTPNNLVRHYVVAQASAEDYVIVAAAFDHEPFFVRVGNDMLQGLGLQRNLAVGDTLVLVGYYWRAAFEQVAQIGHPTLPGWLHQGQLCVKRRRSRCRMSSWCHLSSCQE

SEQ ID NO: 146535 - protein, 965 aa, Heterodera glycines
RPLLPGDKVLVNGYEYISGKEFLDKSKWIYAGLIQCQAVVTKVTKVRFAKHHEQYGIVVDLTRRGRASEATIGSISVTAYGMVRAMALYERQPLPDTHMASLKKAQIIKLNLAKVPEAWYVGPNYVLPPKSPVRSGMELFADFGTMIPATADLFDRDWLRMDSMGIPVIFPFVPEYTDEEVKIAERIVAAALVAASEYEEMLKLVTQFVGVVRPQWDQNADADGNEEFPKYFWLKFQTKDRKLVKQLVKQWTTDSPVTAKMEFDAKAFAYGQVILIKKSSEKTEEGSDIFFVSVKVRLGHHESDGQISNFRKMVNGEETIIQSVGASVGFSDHADCFGTNEPSRLAEEDSPRGEIMKALLARPGRSGLKVTTQKLIDYGLGQKTAMPSVARLNEEQQQTLALIACDLPLVVLQQAPPGTGKTLTLATAIDLLLSEKNEETVIVATATSNLSVTKMVEETRAVGVSEEHLALFSGTARVRYGEQIQPLERSLLRPRLTQTFLEEVKDKKDVKQFEDYKKHVFNTPLRVREAKVAESYLKYDKRKVIFLTTHMAGRVKGTINCATHLLLDEATQASFTTVVSLACGAPNLKKMMVTGDVRQLGVHLSELQEVLWSGFGLESITDQLLKSPRMEETVLKRCYRSHGSLVECVSFASYVPHGEVLLPVEAVTKARTSLTTSAINLPMAGIPLVLIHSEGRIQMDETSFSLSNVEHRRIAQEVVMILDANLPKSNTIVIICLYLYEKEQLASAMREAREKKMLSRTIEVHTVDSYQAKEADLVIVVTTKTAATADQNPFGSSRISGFFQDSHRATVALSRAREGMFLIADFNTLMGCKVWGRFVEKAKEMVPIFNEEYLRMMESTKIKRVDGILANLNGYSPIPSSGKFTNPTDARNPAGGPVRGRSVGWRAFAPSQIRASHSERPRPSNRGQNSFDQGIFSRQGTQNITRGACFNCKKSGHWSRECPSK

SEQ ID NO: 146536 - protein, 358 aa, Heterodera glycines
MQTPADTTTTIVLREMLVDQQQSDDNSSAPWPSIVTTTDHAHPSLLVFPMGVLTVLALLANTALTVYIVWRRLYHNYVSSQFILHLCLTNIVGLSVLVPLFCVNLWSGNNLWENNHLMCRMQTFMMCSVWTVIHFMTLCIAGVHLLTFARIHYAQLFGLPPGSLCALAWIAAFAVALPSLTNSHIVVYDPALRHCVWGSTDYSYKFLAYMLILCVLIPSILSYFCYIKVLKILYHSPIVFQSIGLYKSRFLVYAFLMGPLYQAPFYIITMSGTWRFGHGSVMPVLAMFLGYAPSMVAPFVYGLSLFQMKEEDMAMTARAHKTMNTATYHHQHQHNQQQQLNNCSNNRGATQEARAQLL

SEQ ID NO: 146537 - protein, 69 aa, Heterodera glycines
MSPVHLYLLGVLSKMQSSNRLASVGEPTLHLPPDSEERRKLIGTRVGDHRNEQLKKRGPEIGSIAYIVQ

SEQ ID NO: 146538 - protein, 112 aa, Heterodera glycines
MFQSLAFFICLNELTNIGSSLALKILFAHPAFPPFNSHFAFGLSLAKSLANDGHDVHMLATIRAEGQKLSNESADKLTMHYKMTKSKPLEMGSGKLENDTTNIGKIKLKIGN

SEQ ID NO: 146539 - protein, 53 aa, Heterodera glycines
MQTIRELENQRQKITAMITDSSDLKMGLVISILDWKYIHFIFFAYTFYIKRIA

SEQ ID NO: 146540 - protein, 22 aa, Heterodera glycines
MMVYPPSELIDILLANSRGGLE

SEQ ID NO: 146541 - protein, 201 aa, Heterodera glycines
MKMEQKEQKEQNDNSAAVDQMGEEMGNDPNDQRKREIIKKFDAIKEKLREKGKYQLKNDTKIEQKIGKLLGTNRSKIYKWKNELNLNKIKRMEKSFYEQKKKEFIGRFAEFKSLYGQRKQKEFVKELGISEFTFWKWKKELVPKYNKTPYSNEEKFKKMKQYFKLKKRNPKIIDKKIAKKLEIGYETLRKWKKKFASISEM

SEQ ID NO: 146542 - protein, 277 aa, Heterodera glycines
MAAAAAKQSAAQMEQNATTKSDNAKTEQQQQQQQQKLIGEEAEMIKQLKLADLKFEDLKALPPEVLDESEHQFSSENLPLNVSAFREVPPFANGAALDPPEVAKAALGLKSGKCSPEPTTPIADEQQPIAAANGLMNPLEPPNGVPLPKTAEERKQYKPMPDTEFELLMDAVERIKRDNLAKQQKKSPHLGEELDELEKYRPQDSACREFELEVQRQKPLYDADFAWESRYQIGPDTLLIPTRGARFNARVRDYRLYQGSVSSLNGKDILEIRPSHL

SEQ ID NO: 146543 - protein, 170 aa, Heterodera glycines
MHLLALCRDDPSKRWMLCLQLLPSATIKWQTVSQQQQSPAKVEFPEVSYKQSASTRIYWTDQHGIQSDVQRLQRLLKRTDRSEQFRQELRRIATYATALGYHNFASVFAEVIERRVGGIPEENRVTLQTAAKVLSPIYGIKTIKAENEKFEQCYWVETLIGTGFGHHKCA

SEQ ID NO: 146544 - protein, 284 aa, Heterodera glycines
VLSIFCFQLPFATAVRNKEIDDEYQRLIPLRNIPQGSTTPKAYFQYGFVGGGLEKCQYGFVGGGLEKCQVWRASEEESHYERYKCKHLKGHFNEEKGKCECKEHWHFNEEKGKCECKEHWKGPICNGGQTKARRDQRFPISCTPNNCQHEGELALGSKHIECICKAPWDGRFCERLACWRMAVAENERRWRNSGEHCRCADNYEGTNCETVVSCQNGELVGGRCQCAEGWKGEVCDRKCQCAEGWKGEVCDRKCIPNQTGANIFELITIIRLKDKEIIVILFSL

SEQ ID NO: 146545 - protein, 104 aa, Heterodera glycines
MNKIYFHYFKLTRNNPGVLIFINLEVHIQKSIAARNPDFQHQIPVIFVPWNFGFPFRKFLGSRNAIQLITRARVIYGSSPTIWEKKSGNWYQIPRELSIRLKKF

SEQ ID NO: 146546 - protein, 85 aa, Heterodera glycines
MINKIWRTSVPTLSAVPITYKIFLRIRETSNFFQSSESDYETANESDSNESVEVDESQSAQDEYSLNIGGSHGVTRVPGGEQPGP

SEQ ID NO: 146547 - protein, 97 aa, Heterodera glycines
MGKSRDVLMHLALKPSFLLLNNTSVFNHTSSNLKEIKIILLKAYMRFNQQHKTAEAGHNSDGDEEILNNFANRENCEKVMKLAEEYKKSKTLKGYFF

SEQ ID NO: 146548 - protein, 23 aa, Heterodera glycines
MSSNGESDVTLPSKGAFCHVMEK

SEQ ID NO: 146549 - protein, 291 aa, Heterodera glycines
IEKNKNMSIVRYDRSLHSATSNAVFDHNPAAFQSQPPRPTQQFNVSKYILDHHPNSVPPMLLELILDHHPNSVPPMLLELISFLRVHGLKTEGIFRRYAPVTNIKELQHRINMGESIDFSNDESIDFSNDLMFHGDIQSSVTHAAVLFKTFLRSLGEPLITNKLYPELTLLNGIEKINRTDEIRRFVIEKINRTDEIRRFVHKLPPENYLLLLKVIEFLVEVAQHSHQNLMDANNLSVVFGPNLTWPTDQQVPMVQLNNLNSFCYVPMVQLNNLNSFCYSLIKDFDEIFVD

SEQ ID NO: 146550 - protein, 56 aa, Heterodera glycines
LMMMMRSVCSFGHQFQLKCPDIKLLGSAEFEKESDDGRPMASVDGPSDRLPKLTKL

SEQ ID NO: 146551 - protein, 348 aa, Heterodera glycines
MQNLGQRASALFSDATTEQLLSAGDGALVRDALHRLGLKDIPQKALPSDEIGLPLLSSGYLVAARDLTILDIPGMTYGKVLGYAGPSLIFHRSDHQPSLNQDNNNDDQNVPSDQLLPVEVRRRRDGLPETTQQHRFEVEPFFQQLATKRLGQVLLYVPVCGTTMEHITAVSVASAVSKLLKDEIPDFPIRLKWPNDIYYERSYKLGGLVVQVSHCGPNYCCTVGVGLNVANAKPTICINDMLPMHSNRQLTVEEVLAGTMNEFEYFVNVFEKKGRAEFLKSYYRFWMHSHEEVQVLHTENGGRREKVVIRGLDEYGYLEVRSKETGQIMNVMDDGNTFDLFHGLIVPK

SEQ ID NO: 146552 - protein, 94 aa, Heterodera glycines
MVNLALLMLLFRQRSLSIPSGGYGASAAFSCQDTAWNCFQFAPMCAYSLRMVYLCPRTCGLCPSLGFGTAMFGNGMQTQIALANALGSSAIGKK

SEQ ID NO: 146553 - protein, 133 aa, Heterodera glycines
SSLFSPPPFSLFLWHFPLPLRPISFRPYVFFSFFNYSFSPSPFSACIGDQCPPTCPGVCTCVGRRDCCTDRNAGGGGDGIAVDLISGGGASLPRLLLALLLGTGRPGLPSLQLALCRDNALNCPLFLSYCQLP

SEQ ID NO: 146554 - protein, 71 aa, Heterodera glycines
MPKGKCQREKRVPKTNSNPPPDIKSTAMPSPPPPAFRSVQQSLLPTHVQTPGQVGGHWSPMQAEKGEGENE

SEQ ID NO: 146555 - protein, 105 aa, Heterodera glycines
MPSSHFVHFAQSVVPSNVEKSKRRLQQQAEQQFGTFYNVICGTGFFSYIAHTDEFCLMAVHDMNCYVFSPVCASGQMPTEEKEKRKSARVFNANSSRRRRRRRST

SEQ ID NO: 146556 - protein, 484 aa, Heterodera glycines
ASEEEAQKKTTTTTSDSTKGKKEEKPTRTSETDTAAQKKPTVTSSKASEEEAQKEDHDDYIRSDERKEGREAGQNIRDGQGSAEEDHDDYIRCDERKEGREAGQNIRKKDKAAQKKTTTTTSDPTKGKKEEKPAKTSETDKAAQKKPTVTSTKASEEEAQKKTTTTTSDPTKGKKEEKPAKTSETDKAAQKKPTVTSTKASEEEAQKKTTTTTSEATKGKKEEKPAKTSETDKAAQKKTTTTTSDPTKGKKEEKPAKTSETDKAAQKKTTTTTSDPTKGKKEEKPAKTSETDKAAQKKPTVTSTKASEEEAQKKTTTTTSDPTKGKKEEKPAKTSETDAAAQKKPTVTSTKASEEEAQKKTTTTTSDPTKGKKEEKPAKTSETDAAAQKKPTVTSTKASEEEAQKKTTTTTSDPTKGKKEEKPAKTSETDKAAQKKPTVTSTKASEEEAQKKTTTTTSDPTKGKKEEKPAKTSETDEAAQKKTT

SEQ ID NO: 146557 - protein, 197 aa, Heterodera glycines
MVAFTIIPHLLLFTVFMSIILVILSQCCGCTPSKKKQTATSTKAAKDEAHKKTTTTTSEAMKGKKEEKPAKTSETDKAAQKKTTTTTSEAMKGKKEEKPAKTSETDKAAQKKTTTTTSEAMKGKKEEKPAKTSETDKAAQKKPTVTSTKASEEEAQKKTTTTTSDPTKGKKEEKPAKTSETDAAVETDERSKYFKKM

SEQ ID NO: 146558 - protein, 394 aa, Heterodera glycines
MDEKINKIYTDPANPGGFAGASALYAAVKKKHPKLKRTDFDDFLQRNTTYTLFKPKREKFRRLRTVPGGFMTDVQADLADFQALSRKNSGYRYLLLAVDVDVQADLADFQALSRKNSGYRYLLLAVDVLSRRMFGSPVKSKRPADVKRAFEEVFGQMPKLPETLYTDRGLEFVAKPMQEFFAENGIKKYETSSKKKAAVAERAIRTLKTRLYKYFSAKNTSAWVDVLPKFLSAINNSVCRATGLRPNEISDGVYGEGLVPADKSPKIKAGETVRIPEPKHIFEKGYIPNYSDHVYTVDAARATKYIPNYSDHVYTVDAARATKPQHYLLKDYYGTKMNRKFYLPELTKVQVDENTMYRIEKKYKERMRDGKKEILVKFIGFPEKYWVTDEDFEK

SEQ ID NO: 146559 - protein, 418 aa, Heterodera glycines
MFTNYPVGHPKVIQMDKDVNWTAKEHIVDDDGVKMEGIIKCFVVPPRHCLYDIPVIPMRRNNRTLFPLCRKCAEMYPKGLVDPGYNCPHFEDAERANGFPADCAADDIDEEERERRKQQYINNPWKGCTVRLDANNIKPNPGMRYLSKLCLNSLWGRFALRNRLTKTEIIDCHADLAKLLNDVKIDISSIDQLTEKFWMVCYKAKDEHVVEHDTSNVAIALWTTAAARVHLLNSLQLVYRQENLVQRYDTRILYMDTDSIFYDFKTALGDPLKGGNQLGELADEYPNHTIVEFICAGPKAYALWLRNNATGEDEYKLKLRGITLDSNACTRINFEKMKEMVLEKWGTPGNHVRFDYPTKNFRITKQGDILTVPITKQFNPTVNKGVLRDRGLKVVPFGYSSWDYCKAHNPYDCLCKRE

SEQ ID NO: 146560 - protein, 37 aa, Heterodera glycines
MNRHFAVRSEAEMSSLGVEVRTGVPQSAINNDLISFS

SEQ ID NO: 146561 - protein, 86 aa, Heterodera glycines
MPVSGPVWHFQNDRFPGPASEKPVKPEFSLKPPDRFPGPCFYPTEACDNFTIFKQNAETTELNADNETKWIQLNDLPTGEGCLPSM

SEQ ID NO: 146562 - protein, 122 aa, Heterodera glycines
MEEEIGGPQRSSTPNQNSDDAPSLSLNDDTTPSLNGSGSFLDITADENFNRLIPASSQLEKRDIAIGVLSSQLDVLNSQLEKKDIAIGVLNSQLEKKDIAIGVLSIAVVGMGATIIYLLNRR

SEQ ID NO: 146563 - protein, 310 aa, Heterodera glycines
MEMQQLRSPPSAFVSGGQFEHIHHVQSSSSTSYDLYYDDQAATQQYSMVSRPMHSSAMNLGGDGQPIQQQLDHHQQQQQMYHQHGHASAETRGFVRRVTAPTAKTPFEEEEEEEEDEDEEEEEKEVQMGGNETKEEMGGGGGSIGRRASAGSGSGRGRRTILLDDSAPLPLPPTMTKGGKIVPDNKHPLQQSSNRGAALDEENKQKVRRRKQEFEKSTTANKPIVGESPSKTSTATAVFGSAGGVKVEVKYDDGTTGNKKGTKTKQQQHQSDGTAPVIEETSPTTKNLMHEQLINLTIHNYSFLHGTLKA

SEQ ID NO: 146564 - protein, 37 aa, Heterodera glycines
MPHIRKLGNFNKSVTDLNKFFVNVMPNFDSDIIITFF

SEQ ID NO: 146565 - protein, 149 aa, Heterodera glycines
MPPGHMQRPTPQIPLHQQQSQYRGGMMGSSGGAQMGKFGRGMENLFRWKLVPVDDVITLVVSGSKSQSKNVEATRIRGVMEAICLPEISLPISDIDENDYKQHQNETTDHMPKIIPHEMITGQSISTLFLLGKQPVFADALFRHRTLKL

SEQ ID NO: 146566 - protein, 77 aa, Heterodera glycines
FSACDQSSHFGAACSHSRQCPILPMLFSATVFPQMFGIKSLFHPKLTFLADKWPPSLRECASLRRSSTDFCCPKQPK

SEQ ID NO: 146567 - protein, 109 aa, Heterodera glycines
MSSSLVDRMKLMLSTGEGADVHFLVGKEKELFKAHKCVMMFASAVFGSMFRFDDKNSKTKTSADCPHVIEVTDVEAEAFKVMLSFIYAEDLSELNGQNAMAVLYAGENV

SEQ ID NO: 146568 - protein, 453 aa, Heterodera glycines
MLSTAEDADVYFLCASDVFEAMFRFDSQNGKAENASAVSPIVVPDIEEAVFRVMFNFIYAQDSSGLNGHNAMALLYAAKKYNISGLIKACLDYPIGQLSNVFLAIDHARFLSEHDFALRCLDFIDRNAKILLQSEEFAQIDQNLLCEILESDQLRISDELTIWNNALRWADEKCRQNAIECSAENRRSALGPALFKIRFPLITYEEFTQNIVPSGVLTSEESVGICQFHLPGLLSPVAFPNHARISTWNNTPKGNAGTLALEITKFSRFARRDEGKCRLSNGKVHIKALPWKICAKINTTKNENGTTEKCLGFFLQCTAPRADPKWSCKCSATFRIISQKRGTEHLIGKRNDHIFNNKMNILGFSNFITFSELMDPSRGFYDKDGDKVTLAIDVIVKEEKADKLDYSNPNKTNGKIVMEIGKLTEFSREICLSERSSEIKQIKGLSWKIGTDN

SEQ ID NO: 146569 - protein, 167 aa, Heterodera glycines
MLTDCPALRHVHFCGTLLPEFPPDDSANASDGQVVTKWLFTPHFDNLPKAFNIVKLTVDQWTTIVEQIKAAFSSASSPVNFGISVLFPPSSSLSVVVPFELINEFTQEKLTLSKEDEDEEEAEDPKYFYLIRSPIVPEDQKKQKINEMGGQWNKIDIVATDDEFINR

SEQ ID NO: 146570 - protein, 76 aa, Heterodera glycines
MSSASSFSPTNSASENSTIRFALPINQAKQLLHCLEQLQIDGGSDGGCAGNSDPLNVHQQRLSGPLFGFKKSAFYL

SEQ ID NO: 146571 - protein, 460 aa, Heterodera glycines
AFRSRSDTWVALVQIAQGLVQGLAYPAMHGGLVQGLAYPAMHGVWCHWAPVWCHWAPPLERSKLATTAFTGSYAGAVFGLSYAGAVFGLPLSALLVSYVHWSMPFYISMPFYIYGVAGVIWSVFWFSMTFEKPAFHPTITVQEKQYIEAQIGPVNQSHPTVRTIPWRAILTSKPVWAIIVANFARSWNFYLLLQNQLTYMRDVLGLRISDSGLIAALPHAVMGCVVLIGGRLADYLRSNKILSTTAVRKLFNCGGFGCEAFGCEALFLLFVAYTKSERTAMIAFIFHFIFSGFAISGFNVNHLDIAPRYAAILFNVNHLDIAPRYAAILMGFSNGIGTLAGLTCPFVVESLTSRNANGWVTVFLLASLIHFTGITFYAVYASGELQEWAEPKPNEEESSTDFHQSTAQNQNGGTAATNPFMPIGATTFTTLGASGNKSFGTAYGGQPQQHAVDDDYYQQQ

SEQ ID NO: 146572 - protein, 98 aa, Heterodera glycines
MPSIILSFCGIPQFFFPFATYPIKVKVQWMYMFWVRQFGTIMTNQHLLLIISFARGKRGPMTNRSIDACDLWAEPTDARPQKAQQQRKARAQNRAEIH

SEQ ID NO: 146573 - protein, 204 aa, Heterodera glycines
MTGESAYELVLLVKPEVFIYKIPPLTGNKGYKAADWKLDSPDWVGRLRLISIGDKLEIRLEDKTSGELFAKAPIGQLNSVDYESVSDSSRYFVVRLRNDNAQTAFVGIGFADRADSFDLNVAIQDHFKAVKKCDDSAEDNAETVPKLDLSFKEGQTITVNIGKKTITSNNNSSSAVPNLRTSLGGSSAVPLLPPPPASGNKIRK

SEQ ID NO: 146574 - protein, 176 aa, Heterodera glycines
FLLFSVAMGGATVTAVTRLKKDYQKLVRDPVPYAIAAPLPSNILEWHYVVTGAPDTPYEDMITPSGRFQTNTRLCLSISDFHPDTWNPSWSVSTIIMGLISFMNENSPTLGALVSTDEEKRVFALNSRHDSSSLTANLLMVRSIQFIISLIFIVKVAGVVILFFAVRYVILNATTV

SEQ ID NO: 146575 - protein, 174 aa, Heterodera glycines
MEQCQRDFHDEAPIAKRKKTMAFAQNEQFGLQTAETLRQTDAQLLTTKHAFSPTETSADSLFKSVVAAVTAQAPSHQPSTSSSQHQQHQSQLPTQQNLASASIPQPPQQQQSISIIHPQQQLQSQLLTQQSLVSTSPPSPPPQQPSHQHHQCRNSNHHKYANINRGNLSIVKEG

SEQ ID NO: 146576 - protein, 256 aa, Heterodera glycines
MPKKQMAIRSGGPPKHPLFPPPVAAAVQLEVGLETPPPPPAAAAASTFTPPTPPPFPTPFHKHFSFLTPSPPPPATVDLDQIPLPPTPPATFSLDFWLPPAPPPPPAATVHLDMNPTSSSKAAAADEIERENRKKRRGNRWNSTQKRQTVRVKKGGVPAKVVPRHPEPDLSDDEYVVKAILAYCEVKSRGVTSKCYYIDWAVRRRMVGVNAAPICRQHFAFHTCVTKDQFDKAERLYKELLVREGLIEDPPSHGAQ

SEQ ID NO: 146577 - protein, 114 aa, Heterodera glycines
MLKVKPTIVSLWDDLVSVERKLLSVLEVAFVERQERIRSLCTSASDLTPGNPNGVQQQQLWATLASQQTMGQGQMPNNGSNHQQQGAGGGTHFASPLLSVDDSGIDMERLSIFI

SEQ ID NO: 146578 - protein, 412 aa, Heterodera glycines
VGRQRRGGGHSDAMANKEIQFEYEVDSNRERIVLGRGTYGTVYSARDITTQRSIVVKEVEVKNEEEVQPLMEEIQLHSTLSHDNIVKYLGSVEKREAGSFFLIFMEHVPGGSLSSLIRSSLSSLIRSKWGPLDNEQTMAFYARQILEGLKYLHSQKIVHRDIKGENVLVNQYSGLKYLHSQKIVHRDIKGENVLVNQYSGLCKISDFGTCKRLAGLNPVTDTFKGTLQYMAPEVITGGQRTLQYMAPEVITGGQRGYGPPADIWSFGGYGPPADIWSFGATLIEMVTGKPPFIEATLIEMVTGKPPFIELGLPEAAVLGLPEAAVFKVGMHRIHPPIPTHLSGMHRIHPPIPTHLSESASNFIKSCFNPDPADRSSAAELCFNPDPADRSSAAELLGDPFIQHFLHSTEGGR

SEQ ID NO: 146579 - protein, 184 aa, Heterodera glycines
KHDAYKVETIGDAYMIVSGVPRENGNAHVQHIAEIALKMRMFVTNFKLFVTNFKLAHKPEEIMMVRIGFHSGPVAAGVVGLAAPRYCLFGDTVNMASRMESTGMANKESTGMANKIQISENSYNLLKCFYIQFVVVEISENSYNLLKCFYIQFVVVERGKVEIKVGEKSERNATMAFKHLIKLI

SEQ ID NO: 146580 - protein, 232 aa, Heterodera glycines
MNRAFGPLFLLFPILFTSFPICNCMNRENTQTAAKSKNMNAGGTGSEQSAQKELLRLLMTSTDYLQLTPGQQFSTFKWLTDDIASRGGGITDQKQLCAMLHLLRQYEQNIRWDAERVALLERMLAEPEYSELSQEAQWHIYKSLKDGAPAVPNRAENGGQSQQRQQPSLSGQPTEITPMATSGAEWLAQNQKTKKRAKTSQPNFASQKHSSDKGWTNNSINQYLRYDQLQSN

SEQ ID NO: 146581 - protein, 70 aa, Heterodera glycines
MGPSPPLRFVRRSFFTLLVVLVLLQLFVFADWVDDVIEIIEKKIEMHQKKLKKLMLKVVGNATFVSKKRN

SEQ ID NO: 146582 - protein, 572 aa, Heterodera glycines
MRQWNVEHIEGQSNPADVASRGTSPEDLQTNELWWKGPPFISLKNTQWPQTIREFDPNVWADQNQEVTVCELANPARERNQRKLGSFLTVYVNHFSKWKRIRNTVAYIRRIYKGPLQFVQQIEPIQERKLLKARSETIKRIKPLTAIELREAEEVIIKEMQENFPPDENTRRNLQMFTDDNGILRCKGRIEEGGFDYDTVNPIYLSHQIPILDLLISDAHLETEHGRKSQTLNYLRKKFWIPKCRRMITMVIKKNPYTKYQTKGIRRKEKWSMIMNEREVQELTANKGITWQFASPLAPWRSGFFERLIGLVKHHLYRGLGKKLLDYEELLTYLIQVERIVNERPITYIENDEIMEPLCPIHILNASEGEPFEYQSDTNETENTDDLDSQINQTKRDELLEVHKKTMYKTLTMEDTVSLASMEEEWYEIDEVQPTEQPSSTTTPTALFEDDIYHDDEPAVKVIKAPILILGQGEEDGGVLRNCLINADARQFCHFPEEWDAHLFSKELQIESVQSIIVWRKGATLDDLGFLQTLLTAQQLYNDRLLFWILDAKVSTQRGSLKIQVGVGNRDA

SEQ ID NO: 146583 - protein, 212 aa, Heterodera glycines
MKIAPYKNIRCEQTGNGANEELENFMDTISDIVVGENITIDSANTNGEHQESEMDHAWRPNQNIVLHDEFQNALALNMDVENNNLEEENSESMGDHHSFANSVQNGQQGAFRLPPIEIFIDGSLPEKTPRIGSIQGINNPAIRSLDHCGGVKRISGLIYEENRTVPIVRENEPTFNEEIGPQDGNVSELSVCATDKSSHGRAPRLELIGSDV

SEQ ID NO: 146584 - protein, 53 aa, Heterodera glycines
MWKLPNAKENKSELQKFFGGGHNGPTSVQCAVVLAPWSGRFHLTFYEDMDDRE

SEQ ID NO: 146585 - protein, 138 aa, Heterodera glycines
MVNRFGFVPAGGRIYYNKRSQPPFLTPLVYEYFGATGDIEFLKEIMPTLEKELLFWQTKRSVKVKVKGTMKMFYQYRADTKLPRPEAFCQDVGLVKNISDPMEKAKIWHEIASASESGWDFSCEKEKRGKMNTIYLLF

SEQ ID NO: 146586 - protein, 71 aa, Heterodera glycines
MFPGEHFPPFLYGGCYLTTPSTIKAVLEQAHKTNSFYLEDVLYTGILAELANVTVSDQLSHFYGNGLQLFI

SEQ ID NO: 146587 - protein, 70 aa, Heterodera glycines
MVRFIRLELNLTELVRRMNLIGYGRDEIMLITLHSADQLNAPDGYTQTCFNQKKAVPTKHLTSFFLNPQN

SEQ ID NO: 146588 - protein, 79 aa, Heterodera glycines
VSDALSAVEAFPARHCQYEQLGAISARLFKLSPCIQAKVPEMNLEVVANLSTVDDVCHWNEQGKHLPNARDDHALSIGK

SEQ ID NO: 146589 - protein, 165 aa, Heterodera glycines
MPALTTPMNGTAKGQQRNFWLPNELIYELLLWVRPSYFWRVRQMLTTSLILCRLLTGGKHAITWHEPYDVWHLESTFSDRKFGPTKVCAYLCRNHSLLLPRNFLNYLHCSEDYVTLYVLIVLDSSKFSSLAQLALARQGFDGRGPCRDTGLCESGSFVYCPDEVR

SEQ ID NO: 146590 - protein, 36 aa, Heterodera glycines
MDEQKYRKKVKKMVTMMMMTAKQFNICQLWQTIASL

SEQ ID NO: 146591 - protein, 792 aa, Heterodera glycines
MDILDVGPSQSNKKYICVIVDHFTKYLVAEPIPDKSAESVAKVFVEKFILVYGTPQKIHSDRGKEFLNATMEEISKVLDIKRSFTAGYDPQANGLAERINRIIIGILKKSTASNWTWDERLAYGVFAYNITPSNVTGYSPFLLMFGRNAKFPLDKHVPFPVNPVYTIDSGKYIQLFRENLLNMLEEAQKNSEEAREQSKIWYDSRPKVTANKFQKGEKVMVVFPGQNRRSPHKKLLWSHFGPYLITEIGDSSANLVPIDKKEVTPIKVPIERLVKVPKGVPDISTLPKGKNPFKNDLKLLSMYAGIRSEICEMTGNKCREIGGKSESQLGTIASDCLGGNWKSDSFSEPMDVGSVSAGFGWTSECSGGGSGHELCEKITLGSIDPVLNMSNLGSAVVKTPLQALLSIFLLRTGVASSLTAAQTLVQTIVGAEPKLELCMYTGKRGDQISTGKYPTEEDQRQALEKWVGSCFVARQALTESGYKPLSMQMPEGVNSLPDSEKNKWHEVFKDSSWALERVRATIVHKASRFLAHDRVLLGDSSAEMLAKHINSSYCIGGESSMADLIRQFQPIVLSSRVKALLILAGRDSLMQGETEKSIAAQFEMIVSLCQRFPHVQIFWCPPPYVHAKATECEELITKMHAIITKSPITPIFTTDKGRSVLEIFRFGENFNKHTVSEEGKMCNNGCKMLKAWIFSQTKFPGDQDLKIRTVNSAVVSTSNRADSRMNPTVVVAPNVTARDRVDPCRIGPFPPQNRRGTSTRHHPYAGQWRNTNRYGPPMNRRSDPSDSRPFRR

SEQ ID NO: 146592 - protein, 475 aa, Heterodera glycines
MGQKVRLNSVGEEICYDELVGNASDGSFTFNPIQSVFENETEMEFTPTQNYDLGKKVKKRLFTTNFVMSDYLRSLPSMVVNGLFPLLHFAKRLLKSKQPEVIEGITRPRHLVKEFQSVKQPPKDDKRKMKRHGAVEETVQKKTLKKKNAGTPLTPANGPILVGGLPLSTHLHTPSSSGSFNPMGEIVKLGQKPMQSAWRKASNMAKPPPPTHIHQLKKRFDYSSTTTNNNTMDGGGHHNEADNAFDEFATQQKGTEEGGAGQQNATVADDAAFTTQSTSSFGTFCKERKMGSQSDGGNGTFAFTNCHAFGPVSHAFTPSNNNRSNNQWNNGNFGGNSHWNNGKSANGTAANLAETTNGTTANLGGTTHGTAATISGAAEVSVANNRTNRHRRNPPAAPSANSRAHHETTRLGGTTTNGTPATISGAAEGSVTNHHPAEEGSVTNQHRTSSHSNPSAAPSTNCITFLKCLLATNKI

SEQ ID NO: 146593 - protein, 205 aa, Heterodera glycines
MKISSLATNFSIENLLSKPHTSPTPPPNASDTAPPIVPMPMFLPFPAAMPTPETVPAATIFPPPSSMLWPVHGWQFFTPIATAPGTKQNVKTMTTPPSSSSTTTGTAPTASNDNNHHQQQQKLTAAATASEMDRKTGNEQMPKLAPKMPTNPNNAHGDDDHHDDKEDHHHHLGKIPSNNSAFSSLKKACSATVATQFYGNSKMLF

SEQ ID NO: 146594 - protein, 47 aa, Heterodera glycines
MIGEIGKCHRKMPFFCQLFVTRVDRAYNVNCFYREQRQDVSVDFGVK

SEQ ID NO: 146595 - protein, 55 aa, Heterodera glycines
MQSTQNSCPLEMHKIPVERCDPVFDKACEGRTEIPFTRAKYDKTTGHGLNSPREQ

SEQ ID NO: 146596 - protein, 104 aa, Heterodera glycines
MLSIWHKNSSWHVPVDNGPHVGRFWLRGSLPSRHHHRHQGPKKHSVHWKKMFSRYQEWGIGVIREKYVFSFQKYVKTIETKANTNNELDNFINTYCNLQHTNPW

SEQ ID NO: 146597 - protein, 58 aa, Heterodera glycines
MLQIFLTISFLLIIGSAISNGTDEVKRVEISLRALVDDAINWAHHIGMAWRADKKFPR

SEQ ID NO: 146598 - protein, 60 aa, Heterodera glycines
MPFFLIFLLIPFSHSFFLYFLFIMLLQMSTEILFSWSALFLHWSITFAATFCSWIQFDQM

SEQ ID NO: 146599 - protein, 213 aa, Heterodera glycines
MKLFPLLLLIILFLIDKIGSEKKKLQQKSFGEIFGEKWEEKEEEKRNELKKREIIGKFYKIKEKIKQKGRKYSKKEWGKINLKIAKKLGTNRKYIYEWIKEFGLQKQMHKNYKSKTDEEKLEIVQKFIEITNEYKQKRKKYAEICKKIGVSEFTIMKWKKQFGIRGKITDEEKMGKMKIYWEIKKENPKMSDNQIAKTLRISLNSIIRWKKQF

SEQ ID NO: 146600 - protein, 388 aa, Heterodera glycines
MAKFFWQYGEEPMAKALVAIRLYKCMSREAAHDYTEVEVSNQLRECANAFRDWSLELLHNCHQQDSQLTMRLLTAELPNWGHRTCLSLAVIANNKRFLAHPCCQILLAELWHGGLRFRSQSNFKVVLGILFPPSILLLDFKTNSFDNFHSNADTSLEEEEEVYEEEESNSDEEKEEGTDKMSEMSEEREEEQLMEERRRRAGERQQQFVRCQCLGNRKEMQLPMAHCQRRVLCRPTFPICRLLSKFVLFYCAPITSFWTWSISYATFMLALIFVLLIEFPSEVSPVEWFLFVYVLSFAMEHFRKLFVLESSSLIEKLSVFYSRYWNILTTVAVLSFFVGFLFRLNPSTVHTLSRTVLASNSVLWHMKLFDFLSVHPRIGPYITMAGKM

SEQ ID NO: 146601 - protein, 449 aa, Heterodera glycines
RRAAGERHSCEEKSPGVSREGRDDLRENRDLFQRRVRQPPSYAWIERVFQRRDCIKFIPVGDHSDRCHCGRVSASHSQLAFRALPLQLSNEERARWTIGGCTAPNNEERARWTIGGCTAPNPTDAYGVIQFQGGPHVHKARYVRLSFDSEPADVFRLLVREWGLSMPRLVITVHGGMADFEVPERVGKVFREGLLKAAETTGAFEVPERVGKVFREGLLKAAETTGAWVLTAGVDSGVVKHIGRALDEAGISARWVLTAGVDSGVVKHIGRALDEAGISARMRSRIVTVGIAPWGLLQHRERLLMRSRIVTVGIAPWGLLQHRERLLGRNVQVPYDRHSSGSSSGGLVLNDRHSYFLLSSGGLVLNDRHSYFLLADNGTVGRYGADIVLRRRLEEFLASRGGRSNRIPIVSVVLEGGLCTGRSNRIPIVSVVLEGGLCTLNLIHRHLTG

SEQ ID NO: 146602 - protein, 56 aa, Heterodera glycines
MIYRRSPTEEEVPFLHKAMHKLMSMVFWYWVFYTIYWHHQEQFTVRAGTVSTNKFS

SEQ ID NO: 146603 - protein, 44 aa, Heterodera glycines
GEWYFPYHYEWTDEELGVPPDDAPDPEERQFWGHPGELIGTYRA

SEQ ID NO: 146604 - protein, 110 aa, Heterodera glycines
MRTSARAFDRVDRGVHSAGGAFGGCGGMSAARRNRQPVSAPTPLILPAMLAGVSLRPTGVNLTVDRAEGQRRADGTDEEPVYDEVPLDTVEQRRDEENGEEDEEEDDSDF

SEQ ID NO: 146605 - protein, 243 aa, Heterodera glycines
MSDKKALFKRVIAEVDLTISTGGITLSGPRLSVPRFIPFEENGRCRACKGTEAEVDTMVTKEGITLWCTRIEKAQFVPFDIVYELPGHCFFRVKNKARVFSVPYSELPSSDKCAQSLPPPVKHQRTPDDEEEKNLRRKAKVALDLVEAGLAADAMMQDGTRWKKAKTAINVLANLLLAESLTDVSPTFDQQQQQQQQQLSSKEEEKEECINNSSAGAATESAPDGDVMDDFVNSIQAATSNMQ

SEQ ID NO: 146606 - protein, 192 aa, Heterodera glycines
MERYKRQQQQQQQAKVSQLIKENANWLCALSKAKCVKRCGRLIRKANTDQLLSLVEVCLNIVASRFRLTTRQKKRLMPYVDTMRKEHADRPTKVELTKGIRVLMNRGGEEGEVVDTPRRLLAPPAPPPPPGRPPRRPPPSPPGPGGPSPPTSPPPRPQRSSRPSRTSRRSGRMEQWRKRRYDIQQQRQPPPL

SEQ ID NO: 146607 - protein, 54 aa, Heterodera glycines
MKILIIGAGASGLPALKTALEYGLDAVCMEKSLDIGGLWRYKENPGQGEGTVMK

SEQ ID NO: 146608 - protein, 490 aa, Heterodera glycines
FSFSNSVEYEEANESDEITDPLPGLSFELNFKHFSGFLQVSPTHFLHYWFVTSQFLQVSPTHFLHYWFVTSQKDSSKDPLVFWFNGGPGCSSLDVFWFNGGPGCSSLDGLVNEMGPYLVNPDGQTLRENPFSWNKFASMVYIEAPAGVMVYIEAPAGVGFSYATDGNTTTNDDLTSLENYEAIKQFFAKHPSFRNHSVFITGESYGGVYVPTLTARIVDGQAEFPINLKGMAIGNGYMNANLNIDTSARFAYLKGMAIGNGYMNANLNIDTSARFAYGHGIIDEKIWNELEQRCCRGCIDEKIWNELEQRCCRGCIDGCDLTALKDSCERMVDDIFEFLWHGGLNPYDVDDIFEFLWHGGLNPYDLYRDCDPSPGRNSIRMEYRDCDPSPGRNSIRMEVLKNGLVPPKMLRRFFSNVTRNFRRRLQVFVGKTIEKRIKMVFECLLDTDLTTYMNLPEVRKALNIPDSVGWDIRKALNIPDSVGWDICRLA

SEQ ID NO: 146609 - protein, 114 aa, Heterodera glycines
MEEMGGGHLQKALRGPIIGKRCQRLARKVLEVQFEAEPGQRVGDFVRFIRFFVFHRIRKTEGIAMVELRTDQDEQQMNQQQTEKHIQRDGGEKRPKERKMANLKEEKTNKYTIA

SEQ ID NO: 146610 - protein, 363 aa, Heterodera glycines
MKRWIRNDIWMDIFPHFDRPQLGLKLALLSPRFDELVDKHFDGKTELTIWRPFKIEKIGTEAKIAVETKRKAKIVHFPLPDRPMHNKIRFNRLQIEYIDHSVVTFLRTNQQMFDKGTNLDLYIEAKDVKPIWDVFVRQIWPIFAPNIRHLGFVRDNHFDYLRRLISPSILTDLTHLDSIDAAYLLPTVIADDGPNATDRQALSKWLNIPTKDGKPKQLICCATTTTSGTIELINNFKEAFLHATTPAANYIIQLQLFEPTPIEPFELTNEQTNEKLTVKKEDGDENMEKEDEDDYIVVVKRCQIGATVRWEDKKTNNFSNINFWPLNGKYCIGRMSPPKSGQKNTKNRLKMNPGPSGQQQKKE

SEQ ID NO: 146611 - protein, 84 aa, Heterodera glycines
TRRAIISSIKIHNDRSEFLISQQFIHSFFCCCPLGPGFIFRRFFVFFWPDFGGDIRLNEIKCLNLIFKAKTVSLIRLTQYSICH

SEQ ID NO: 146612 - protein, 611 aa, Heterodera glycines
MPSKFCIFRNQSPSSYALKRLHNYDGVDDNCPNCHRRIASPLSVDAATAPAKDDRSDSSEHSDEPIEPENQQLSEAVDHALNINEEIYTPIKAEYDNTSIAYFAVYNAMIRAKNNCYRNRPTPPPEMLAELRVCSEKEKSLFWDFNASTKRHQYAMEQMLKMKDYLKATAQAKHRQCVKEQLCDSLKEATNNKAPIIREQHCLLIQALEEQLYDIIKQFLLLWHSLQQICPSTATLDSMQDWLQSAELEAAIRKQEEAQNTTDEEQRPRANSIGKKRRNEDKSATCETSVKRRAKAAQAAEQRMQRPILMTAEQAKALEAERIEAQKRMAADRRVQERLRQADQFLKQHLAQQKRLKQRNLVWGRQAAYERYINERLEKLKAEVNALRKSARESMNFTEIDICQLKIIILSNSVKYLVLPTRQAVEAYCADIIRYANHHAEEDVQKAIKEHQQILERRERALDEERQRQKLLSTWRDEDRQWAYREDPVLAAELEKIRQQKEQIDVEYAEEQARLRNIRRAEEDARSRARNELLGLYDSPESEGWSDEDLFYNVRQADRMPIMQEVGVAQMPPEAIRAREVIDRRLNFQEADYVGEMTPANKGDDNRGSRE

SEQ ID NO: 146613 - protein, 319 aa, Heterodera glycines
MINCAILRQRKIVATSDKLLIPSSFGTTARIISKPFCCRTRRLLLALRSKSSLRREFPPSIHLFGEEVEAMEIAAPAAAPSAPIPSTSSGIEEKRSTTVTAPSIVTEEEDVFLEESLPKMESCKCCNSAVVPPALEDANVHLKQQFAYYGYISTPCCGDFHLRCFEKWSHLFFKSVQITSIFRNQSPPSYALKRLHNYDGVDDNCPNCHRRIVSTLSDDVATEHAKEERADSSEHSDEPTEPESQQLTEAVDLALNINEELYTPIKVEYDNTSIAYFAVYNAMIRAKNNCYRNRPTPPPEMLAGFEGVLRKGEKPLLGL

SEQ ID NO: 146614 - protein, 152 aa, Heterodera glycines
MPISKTLPCGNYNHEQFAKLKNEIVNEIKEKFVKNSQFEESERKCFEELKSKLKVLADYSFYAKIEGEYLIGNWTDEKEKEKEKEGPKKVDKFRQILAYLELWAKNNQILDDLMGFLNTKMLLTMLTKIFLLYPNGSMPFLVEKFFLTYSTW

SEQ ID NO: 146615 - protein, 134 aa, Heterodera glycines
MVDRAAGLEWMAQDEALVEIIVPQMLTDERLKAQLEAVKSKYSMKVYENFWRRYFDAFNGGKEKEQFVKDFLKEETESNLTDEERWTDFSESLRKVINGTMEVVLTEKVNGKPNSSNQTGNSQAKVNGQKERHN

SEQ ID NO: 146616 - protein, 78 aa, Heterodera glycines
PDAALFGILTQFFETPLNVFKGFSKKEGPLYEFTKEVKKTLGFADNSKWEALTKRPWQLNFDTEFIFGFTGDDSSKYN

SEQ ID NO: 146617 - protein, 97 aa, Heterodera glycines
FIIASALIMFAVCLPMHEKCAAVEAVRQLVCLSSVPNSIGHSALGQTQSLPPFGIPRLHCFGRCLSFGCFSAPSSAVPLFDHLFDFEPWTAACDSFQ

SEQ ID NO: 146618 - protein, 120 aa, Heterodera glycines
MLAVRPPTAAASALAQPLAPNYGINYGQYAFGHPSARPPTSTAFAPAQPLAPNYGTNYGQQPFGLHFGAAPSVTVASVPAQQLAANPNNGLNYGQHQFGRLPGTLSLYLIRDKSITNCRH

SEQ ID NO: 146619 - protein, 37 aa, Heterodera glycines
RDRLLRHMPFFLRTCFDILSINNAFSTWFEAPTLTFY

SEQ ID NO: 146620 - protein, 180 aa, Heterodera glycines
MAPSFHEAIGICKEWKQALFGRGGLLTEIFNFVNDKRKEDLAKKQAAPNLNDKASREFSQILDALLRKAKSGNFDEEPLPEIPFIGICNRLSCADIYKALDQFRKSEFFSNFQTAIALLQDPKGLDMIGELLANPDLIENFSGPESLGEMFGSKMAQKSGTSRVEIGENVVKKSINYIAK

SEQ ID NO: 146621 - protein, 61 aa, Heterodera glycines
MPNLTKMALLNEHTVVSIFQCLAFLTFIVASKIGNDQKGTAHFGAGLFGAVANNFFPVQPN

SEQ ID NO: 146622 - protein, 30 aa, Heterodera glycines; identical to SEQ ID NO: 136834

SEQ ID NO: 146623 - protein, 96 aa, Heterodera glycines
MNEKNTINTNNSLKAKGGTLDEKLQPTANGETEGQNRMFPCGRCVPAVLHLIFLDVPVDVAGLPRPTESRRVVCPMDMLHFRLGQCQHDKVLLFIS

SEQ ID NO: 146624 - protein, 196 aa, Heterodera glycines
MTFIFFHIVNLFANDAQRIFVALTFAPLVLVGPFVLIGGLVYLLFVIGVLSLLGIAVFFVFDIIQAVLGVTMVKFRNRAIAQTERRMALVGELIRCIKCIKLNGWEELFYDRVRAVRRAEQRSLGWAGYAQSLAVASGAIVPVVATIVMTLAIVLNGHDLRASDVVFGGLIFLEIFNPLSGLRINALFENRLKKKF

SEQ ID NO: 146625 - protein, 24 aa, Heterodera glycines
TPSEKTRCVPINRECQRKTLSFFS

SEQ ID NO: 146626 - protein, 419 aa, Heterodera glycines
FTKIFFPITKQNIYIFRSYLHNMHKRLISEGLQNVSFSSQKKRNCLPFSAIEVNGLSTKSSEQTTSRKQRTFNNSETDPSNPCLGNIIEIDQCFISDINFNIIETQNLLKKLPNKNGTSPDNISYKILKICHSSLSTVITDLFRISLDICSLPDIWKESIVFPLFKKGDKNNPENYRPISLTCSLCRVMERILSKNIYNFLLKNKKISEFQFGFVRNRSTTSQLITVVEDWYEAIINGKVDSIYIDFQKAFDSVPHELLLYKLKKIGLRGKLLMWIKDFLSNRTFRVKIGDDLSSSKKVGSGVPQGSVLGPLLFLIYINDLPDALPSGVRIKLYADDVKLYICYKARTETEIMHKALHNLSEWANKWQIRISIKTFVLHLGNKNPKEIYKIGGNIINVVDTIRDLINIDKFAFSHVTQI

SEQ ID NO: 146627 - protein, 57 aa, Heterodera glycines
RQIAMGSPRVPSHRCPVKRRPSRFAGRSVGRVCAGGGDGDGGNCFAGGGAVAGFYSR

SEQ ID NO: 146628 - protein, 344 aa, Heterodera glycines
CEQFVWQGEAGNENRFGTSEECEAMCKCKQRKSNAKVDDAFLSLRTVAQVPGILRPKNVVVTNARGTSKAPTVPLSADRQKSEEVGAVHGEHPQNGNERHSIGGEEAQQEQLGHENDLPLAKAASIAQTEDAEGAVGMPGPAQAIAEMPPAAFPGSAAAPSAPPQAPPPLPPAMAGSAGYALSSAYGAQPLPKFPQKVPDNLPPMLGPSPPAVIDYQTGKRCKPKEKDNPITKSIPTQLTSPKRQKHQQRWLLLLQRLLSKDCQITCHRAKSKALGGLTKKVTGKAQWHLKCIFKASATAFWSHSPKICWLTVKIKRNNRHTQFRCVRTDSVPCDTKTVIHSRI

SEQ ID NO: 146629 - protein, 98 aa, Heterodera glycines
MVSAQLGVCFALGKTNFFPLGRFFNAQSGLCEQFSFGGCHGNQNNFADQDKCEAKCSRATTSVANSHQMLPERCALEKEEGTGGGYHVQWYFNVEKFT

SEQ ID NO: 146630 - protein, 601 aa, Heterodera glycines
MEQQQHVQIPVQVGGVQIEKATEVGRKSAGQTESDRHREEQKTTVNKESEKNREGQMEEGVEYDGDMIFLETQSNGREEKRKGKQRKGDTEETDRQTKLEETLTELEPDEKEGWKESGEETEPEQVYISPAEERPAAEKEGARNNREREGQTEGKSEGREEKEKERQQNREKVQHQQQQVQEVLGEQPQQIQPVQAKKGAENIGQMENGQNTQPKQAHQGQAVQGEQPQKIQPVQVQKGFLNIGQMENGQNTQPKQAHQGQAVQGEQPQQIQWMEEKQRQNVNGGKQQRQQKKQEKITVHQHEVPAQKLAMEEGKQQQNVEEQQQQQKLNKNESLSSDQDIIRPSNPIIEQQRQHVEEGQQPQQSEQSKAHNQQKQLVPTATTAEADHFSPHSADQSVVAAVPSVSVPNSPPTVSLEGSGNGGAPPTAPSAASSASPPSASAGAPEGSLSDLFTMHHLQQLRSGGSSDVGSGREEVARKMVPVWGGLIDDSSQLQPISTTLEEEEQQHMQQNGTTEKQQREEVGGEMPTEGDDKETGGTAAGAETNPPKQRQPNGEAAQAMPEQQEKTVVVSNNGSGEKKETGEGFDDQLSAREGGKRTRE

SEQ ID NO: 146631 - protein, 310 aa, Heterodera glycines
MVGQNQKHQIVQGEEMQTEQEKKIVQTNPGQQQIRQGHRHQTEQSKTIQGQQVEQSTEEDPHEGPQAVQDVQPTEGQQNQAVQGKQQGKQTVQGQQMNQQIQVLQNQAVQGQQTNQQIQGQQNQAVQGQQQGKQTVQGQQMNQQIQVLQNQAVQGQQTNRPIQGHQNQAVQGQQTGQHNQAVQGQQTIQRHQNQAVQGQQTNQAIQEHQNQAVQGQQTGQHNQAVQGQQTIQGHQNQAVQGQQQGKQTVQGQQMNQQIQLLQNQAVQGQQTNRPIQGHQNQAVQGQQTNRPIQGQQAVQEQKPNEPQEQQ

SEQ ID NO: 146632 - protein, 91 aa, Heterodera glycines
MVTAPTAAADVAASVAASVASAAGGGGSCTACSSSVNLAVLTREEVAAANSIRNARLAEEPVNQISTSGGCTTLTPTCPPGESLGLRGAFF

SEQ ID NO: 146633 - protein, 122 aa, Heterodera glycines
HSHCPDCLSGIENIAIRNAVENRVGLNQVRSNEYLVDKVNKVQISIECPLCRARCLLNRQRVKNYAIEAIIASMGTVNNEQDPNNEIIAAKNILIKQLEKNEREMKRRFSEQEVRIERAFFF

SEQ ID NO: 146634 - protein, 75 aa, Heterodera glycines
MADFWLLFLACLLAFFVVLQTDLSRLSQHRPNFVQCRCKRAMRSEHCKWPFIFGEVKTDNSFGHDPFNFNLSWLL

SEQ ID NO: 146635 - protein, 55 aa, Heterodera glycines
MEAEQGKLAEELAGSKQQFQFCKTLRVLVGRPFTVRPLFAVPSAIVAKFFLWPTK

SEQ ID NO: 146636 - protein, 102 aa, Heterodera glycines
MKNPISKNNPTLEKGQILVISSLGTVFLYNLLECIHCKMLFIQQQNELHHWPIPLAGFDVIMCQQKVDGDTMLVAAQKNWPFVERHHFLTGELQFLSLNPDH

SEQ ID NO: 146637 - protein, 64 aa, Heterodera glycines
MLYWSSQQKIDYSIRCLNKNKIYIIIYYAGQFIFLENVLKKDKNNYFILPSLDMHMYFKFFIVM

SEQ ID NO: 146638 - protein, 462 aa, Heterodera glycines
MSCSFYTFAVLQLVPPPQHMGIRGEFKGRECEGLQEGLTSTVLSSYNKQFRWRITANAKRRWTRQRADKEYIELYNCELGMNDELIEQYKQVERIIGEQASLDKISDNGEAATEYLIKWNGLPYSECTWEDEGLIRREFDHKIAEFEVREQSDTQPKKSYPSMPDFLRPVDSEMELRDYQLEGLNWLLYAWSKSNSSILADEMGLGKTIQTISFISSLFHLHDMHGPFLVVVPLSTLPSWQNEFTLWGSRLNTVIYMGDVNSREQIRIHELDVDEHAKLCKANVVITTYEICLKDKLYLGKFTWTCLVVDEAHRLKNDDSLLYQTLYSFHTNHRLLVTGTPLQNSLRELWALLSFIMPEKFNDWCEFERAHQDRDHKGISSLHRKLEPFLLRRVKKDVEKSLPAKVEQILRVDMTAQQKQYYKLVLTRNYEELSKGIYDFCFNYRVHQHNDGAEEELQPLLL

SEQ ID NO: 146639 - protein, 101 aa, Heterodera glycines
MADEDVVIAKFDATASEYSIHLLLFFNLQFTFLDDVPPQFEVRGFPTIFWLPKKDKANPVPYQGGREVKDFIKFIAEQSTDPLKGYGRDGKKKKKAKAEEL

SEQ ID NO: 146640 - protein, 351 aa, Heterodera glycines
MSFTPSNAAFIPPPPGKGKPSRNVPLVSGPSPAAAAFRTRPSGGAAAGDNATQKNFVDQSLSAMFANRQLLQSVCNNPMVQSLGKQAVVSMVRQQGKEFVGRTSTAFGGGGAAATNQKTMPQRTVMSSSNNSNGGRTASAQPTANRQLSSSQCLAEKELEDIFGPLSLGPSSNKMPSSSSTAAHPPPQWAVPCAGGSAAFADGFFTAQSAPLRPFDSAASFPAHSANAPLYPVLDRYSPPSPLIELKTPASVPLDGQCRAVALYDYDSGVPGDLKFSANDWVMVISRVNADWLRGELPNSGGNCLRGIFPVNYVQIGPKELSRLPWEDEDSGMDSTKQPKQQFLRALYDFK

SEQ ID NO: 146641 - protein, 86 aa, Heterodera glycines
MNFSPITLFLLSSLAIFSAADAFRQQTVAVRGRLMCGDKPLTDTKRIPNIFCQFITTVTVASFRANAKLTSAFRASTSRGPAPFSD

SEQ ID NO: 146642 - protein, 132 aa, Heterodera glycines
MSFLTNSINYGDAFTQAAAKGEVNGDAINLDNYGQLFDGKNSESITDQRQLKEFREKFARMEMELEMAKLELETKTLEQKLKQQQELIGLKEKLAKIEQEKEKNDAKYLTVHHREKERGKKLQIIRVVNYMD

SEQ ID NO: 146643 - protein, 18 aa, Heterodera glycines
MLYRWGIEPKRTVKKGRR

SEQ ID NO: 146644 - protein, 123 aa, Heterodera glycines
MKSLITFGFAVKQQNKFDGIILSHKGTYAYYNRGDIWINGKGKGRNGKYSYGVGDTVGIGVNSATRQIIFTKNGLRLDSSEFFVAQSFADDSFHPFVSIWHYGGQDQIEANFGPNFKFDLATL

SEQ ID NO: 146645 - protein, 159 aa, Heterodera glycines
DLSSVTEQSSTFDDLSSVTEQSSTFDDLSSVTEQSSTFDDLSSVTEESSTSEALSSVTEESSTFDDLSSVTEESSTSEDLSSVTEESSTFDDLSSVTEESSTFDDLSSVTEESSTSEGLSSVTEESSTISESCASVCSGFGWTNYNGNCYKVIEGLMNQ

SEQ ID NO: 146646 - protein, 29 aa, Heterodera glycines
SSPQIFMLVLKMLKINNIQHKLINWPHIL

SEQ ID NO: 146647 - protein, 295 aa, Heterodera glycines
VDDSSVTDDKSSNVDDSSVTDDKSSNVDDCSVTDDKSSDVDDSSVTDDKSSNVDDCSVTDDKSSNVDDSSVTDDKSSDVDDSSVTDDKSSNVDDSSVTDDKSSNVDDCSVTDDKSSDVDDSSVTDDKSSNVDDSSVTDDKSSNVDDSSVTDDKSSDVDDSSVTDDKSSNVDDSSVTDDKSSNVDDCSVTDDKSSDVDDSSVTDDKSSNVDDSSVTDDKSSDVDDSSVTDDKSSDVDDSSETDDKASDVDDFLGTDVETSHNERSSDCESLDDLESSDDESFDDDSDDEECSDEEC

SEQ ID NO: 146648 - protein, 314 aa, Heterodera glycines
PIQHSSSEHSSSSESSSKDSSSDDSKSSKDSQSEDLSLCEVSTSVPKKSSTSEALSSVSEESSTSEDLSSVTEESSTSEDLSSVTEESSTFDDLSSVTEESSTSEDLSSVTEQSSTFDDLSSVTEESSTFDDLSSVTEESSTSEDLSSVTEESSTFDDLSSVTEESSTFDDLSSVTEESSTSEDLSSVTEQSSTFDDLSSVTEESSTFDDLSSVTEESSTSEDLSSVTEESSTFDDLSSVTEQSSTFDDLSSVTEESSTSEDLSSVTEQSSTFDDLSSVTEESSTFDDLSSVTEESSTSEDLSSVTEESSTFDD

SEQ ID NO: 146649 - protein, 701 aa, Heterodera glycines
MIMARTIKSLDIFSYSMILHQLPELKGNAGADQVNAFFRQFDAVSEDWPNERRLRALKSKCSGRAERAYNSAVANNPFRYENIRRAMKQQLDSTDAKSTCAFDELMTGVCRMNGESIDDLADRVSSLVRRAYPGHGEHLYDDYSIRHLIRSLKNPNLALTLEMARKPDMIFDEFVAMAARAEITQNAAKAAEQRDTNFCQNFEHRRQFNFRSSNQPENFVRSFKCYNCGQEGHVSRNCWYPRRDQSNYAPPQYNASATGADRIPYTNESQKSQQNFPNHTQQPRNFLRQNYLVEQTEKSPACHSNVLIGGISAVSEKVEKLFEDVKAKDAQSAKEKREIVGKILLANVSILGQHANAMLDGGAQISLISAAFLNKILNISTSSKEFLNPSRQTLRVIDINGEEVKCYGIVSLPVRRMGRTVSVRLHVAQTSFGYDLLFGTNSLSDLGFKLFDELSDTIVDFKPASNNDNKAVNIIYGLTLIQNSTPCLLGKERTEKARKNDVAISQEQKVADDNVAKIPKSQQKSSQQKNRSKWQAKNGKNSAQKGGKLEKKFGEKGSEKSRKDVECKTEKSILEVQKNGKVCRNVRGRSSQLGTIEFLEGGKELDPKKSTTGKKNGKTNPIFRNFGGSYKELGKAGHRISANFRQIGNVNENREKGGGWKRKTIYYATPSGPIPKFVGSSTADGNVSAENPSFRAESRKF

SEQ ID NO: 146650 - protein, 155 aa, Heterodera glycines
MVIPRSPHQTRQRTRQQGVILDSDGMQILREPNEEPPNFVVSEAIRPANEILESGSILGGEQFRQRHLEVNVHEFEPAANEERMSEHLALVAPMVNAGSGHLENFGRNMGERNAVEIRNLPPNGHLFGDNGNFEDGWARSPNSPLFESSRHAYLN

SEQ ID NO: 146651 - protein, 32 aa, Heterodera glycines
MGINIPNYIGLEEKTNKTINAVHSPGNKYGSV

SEQ ID NO: 146652 - protein, 43 aa, Heterodera glycines; identical to SEQ ID NO: 145884

SEQ ID NO: 146653 - protein, 55 aa, Heterodera glycines
MVLINNPNPICTKIICLIIIFVTIFDTNPILCANLIDDTMSEVFKHMKIHGLSII

SEQ ID NO: 146654 - protein, 108 aa, Heterodera glycines
MIFCGIGGSLDPTEWANFVKIIKWKSATTKNFAIAFRNLPPINLSWSGPGFLTKTGTGNFRIEKSGLFGWENREKPGTSPGQNWSKPGLGTQLYPFFQYQSRSRPALI

SEQ ID NO: 146655 - protein, 59 aa, Heterodera glycines
MPPMIFFRKLSPHIFVTITGQQFAASPRHRLELHFQVLPKALDMACMGAGDRIHKVRIR

SEQ ID NO: 146656 - protein, 86 aa, Heterodera glycines
MVPFELVNEWTKEKLTLAKANENELDNWIMKRCKIIGEKEENWDNNCNNVFFWLVGGIDCIGPLSPPPAEETGQSITKVASSADDE

SEQ ID NO: 146657 - protein, 80 aa, Heterodera glycines
MTFYASQQHFTRPMTFYASHDILCPWQGWHSEAPKIFGNRNSVPSLVSWYSIKFLTINFVVKPKVIMTTHTQATRTMAYC

SEQ ID NO: 146658 - protein, 64 aa, Heterodera glycines
FGHFSEMANPIATKKQKVKLSYEGHFYTFAKMSSDGMTKFWRCEFKKSISHYLCFSGEFLATIE

SEQ ID NO: 146659 - protein, 93 aa, Heterodera glycines
LPNDEEQQKASFSNFMHIKRCDGGQVIDFIHSHFVGMTSVYSRVCLSVNCMCDGCVKKLINEDKINIRVQWESEREEERTIMMIKHFFLNFII

SEQ ID NO: 146660 - protein, 102 aa, Heterodera glycines
MIRSLSTGGALFFNPNFFKNPTKSVYLSWAGTIGPQNLFGYFFFVNQIQHFLKIVRLIEHVKSFRIVPTILDYKEKSYSEKACWDPTVPAQLSESEQNGDFS

SEQ ID NO: 146661 - protein, 237 aa, Heterodera glycines
MSGIILTCTRISGIILMYQNKRNDSDACKNKRNYSDAISGIILTRARISGIILRISGIILTCTRISGIILTRARISGIILTCTRISGIILMYQNKRNYSDACKNKWNYTENKRNYSDVYQNKRNYSDACKNKRNYSDVYQNKRNYSDAISGIILTCTRISGIILTCTRMSGIILTCTRISGIILMYQNKRNDSDACKNKRNYSDACKNKRNYSDACKNKRNYSDVYQNKRNYSDVPE

SEQ ID NO: 146662 - protein, 69 aa, Heterodera glycines
ISGIILTCTRISGIILTRARISGIILRISGIILTCTRISGIILTCTRMSGIILTCTRISGIILMYQNKR

SEQ ID NO: 146663 - protein, 945 aa, Heterodera glycines
MKPLWKSKDIVYKQELCVLFTEGDAGQAGHYDPIKSTGRLFGAKTSYCFGTFESRECFEHHAKVIKATIKKGDKEVKIEKSMCKSSRKCVKCGHQDKERGHVCGHKFCRVCLGFHAPRDCYIPYRPKKKTEKRIIFFDFECTTDFQPDPEIARFKHQVNFCYAHVTCTSCIEKGIWNQSLEQKCGICGDYRTYAWAPFDFYNTEVERRFRVDDPLASFTKWLLNFETETLGLDHNERGKKRKRTVKQNNNNNGQACFFDNEAEDDEDSDGNDVENNYMLGYDEGGEKPRSVKTYAYAHAGSRYDHVLIFGEMLRMGVRPDLVRQGNHLLEMKAHKKGAITTTIFRDSYKLIPLKLASFVKTFGLNIDGVENKKYFPHKFNKAVNYGNVLETLPPLEDYSPGSHFPEERIKLEKWHADNINTRFDLREIIADYCKTDVQILVHGVLKMRELFMAETMHDLTDSITIPSACMKYFVALSYQDNERIAIVPHLGYEKRGKQSTIARKYLKWRAGEEMRNNGWTLRFIESPGGEYKYGNYSLDGMMERPGMAKNLAIEVQGCYWHACPNCFPDEEAIVGGGETAGAIRARDAKRIKQIARDFEVEIIWECHLMRMLEEDPAMKAFFDNTPDSGPIEFRDAFFGGRTGPDWLAMGMMKPNGEKLNRSIKIKDFNSLYPSRNMFTKYPIGHPTLLKMDKNVEWTKPEHMIDNDGIPIEGIIKCFVVPPRHCLLDIPVIPFRMNNRTLFMLCRRCSEMYPKGLVDPDYNCPHFEDHERGFSTTITHIELEAALRAGYRVTRVFSAYVWRRACDWSDTLFHSYLFKFLKIKEEASGYPAKCLVDGISEEEREERQQQHIDSCYAKSKVRLEAARIKPNPGLRYIAKLCLNSLWGRFALRNRLTTTEIVDSNADLGKLLNDDKIDSVASTTDPIGSGWSAIRQRIRHVSSMTQA

SEQ ID NO: 146664 - protein, 341 aa, Heterodera glycines
IGLQSSDEPQIWGRCLHGFSAGIRVACLFRLAIQRKAFVQTLTKFTLLTANSSLSEIRPKNVESIKLLIQIGVENGSHLDQSWYDVLKCISQLELVHSIGTGNHADAKPHWMMVPQIPFLKDNLKSMFNIRDKSFSTVQGYLAETSSQDLVVAIDRIFQDSSKLSGEAVIEFVRALCQVLLEELCSPGGPSMYMLQKIVEISFYNMNRIRIEWSMIWSVLGEHFNLAGCSSNQDISHFALDALRQLSMKFLEKGELPNFRFQKEFLHPFEVIMSRNKSLSCREMIVSCVTHMVHSHADKIRSGWKNIFSLFTLAAGEKDERIVEAAFTTTSEIIRKDCYFH

SEQ ID NO: 146665 - protein, 845 aa, Heterodera glycines
LFLLKITIFSEHLNKKRKMKELFSEDNEISKNFLKNIRKYNNSFACASLACNKFSFTSPGPSCFKISGQVYHKYNPIAPDHNSLPTNGQLYFLDSCEAQNVLHSHNLDIFLTEKIEIILRKNPFAKAYEMMRKVDEQKQLTTTNKNNETQEVKMLLSLRKGFDPNQYNLQHTNEVAAIIVCNDEEIPAANIIVVEKGSKKIKKIYPLLYPMGTKGWSFDIKIKTEKISFCDFIKFKLFYRHSYFLPHHFSNQLFQQWIFDQAARVEWDRLNYIRTHQELRACSYKGLEDYLFNKAEQTGVIIGKQVILPSFLGGPRNKYQHFIDSMAIVGENGKRDLFLTYTINPEDPDIKKCLIKNQTEDRPDIVAKIFKLKADEIFGKVIAYCWVVESQKRGLPPLHFLITLHPKDKFKNANDIDKFIRANLPDKEKEPFLRSFREETQIGEDGYALYKRPNNGDFEFVKGHRLTNQNVAPYNPYLLMRFQSHINVEFCSEINAVKYIYKYIYNGYDAATVECVKEEPNGEKIIDEVSQYLEARYLSPVEHVRLFKFEIGKSHSIGRLVHLENEQTIYIDKNSESDNLKEAMQKASKLTAYFNFFKEYPNAPEFKYIEMPIYCTFDHWKWPLKRTDKVIGRIYTITPNRELYYLRYLLLNKHAKSFDDLKIVNGVKSTYAEACLALGLTRDDSEWNKCLDKTSQFKFHKGLRSLFANILINCEQNTHLLWEKYKDNLSDLKKSYTDQIAYQIALSLIEQNLLNHQKCLDDFKDMPKINQNIQNISDDQIMNPQDELNIALKKIFSEQKVIFEHIKTIFECSNELINCFYIDGPGWTKSFVQTAIYHIARGFLK

SEQ ID NO: 146666 - protein, 88 aa, Heterodera glycines
MSSMNDNVPLQAERNGIQTDSEAVNTDKVQPKPNTRSMIKKSRWGNNCAKPVQKDAEEAPAVKKRKVEDNELWVLVKGKYLLGFYLCA

SEQ ID NO: 146667 - protein, 256 aa, Heterodera glycines
MAINMSDKKGLVKQILGEADLTITTSGITVSGPRLSTPRFIPFDESGKCRSCKATEVEVDTMVTKEGITIWCTRVDKAQFVPFDVIYDLPGHCFFRVKNKSRVFNVPYSELPSDTCADLGVSIEEKDLKRKAKVALDLVEAGMVSDAMQGGARWKKAKTAIDVFIPNEPQSRQSSQVKEETTSVSASAAGSPQTHTVEEMKEQNQEDVEKKMPPALPDPPTMSGEKKVDPKKEDLGDIDKTLDEFFESIKAATTNM

SEQ ID NO: 146668 - protein, 184 aa, Heterodera glycines
MAVCKCKVCDECRRKQRLHEISERKKIIESCGGDHHYIKMIELRMRDLELYKRAYRRIKSVIDQVLEGPFHVKCTSKCQEEFTYYLIKWECCTEDYGRGVGCTYSEISDISQNELLAYYDRERVVGEIDPPLADNNAPLAMAGIIAELRGGKLPQGNLAQDDLTQNEDLIAAGEEAAGQDAPVK

SEQ ID NO: 146669 - protein, 25 aa, Heterodera glycines
MKNLLPERAENFLHILPFFVKYFQI

SEQ ID NO: 146670 - protein, 68 aa, Heterodera glycines
MVRLTPTIVFVLALCCAWLLTDAQNYGAMIAKSQNKRETDQEETSATTEATTKETEVTVGEQQDEVIN

SEQ ID NO: 146671 - protein, 73 aa, Heterodera glycines
MTQNCPFLANPLFNQSYEIALRQIDPTVALPYWDSSLEGHLPTPADSILFTENGTRNLKRFVGEMGTLPTDEG

SEQ ID NO: 146672 - protein, 430 aa, Heterodera glycines
VEFTHCRNGPVSKMLENSESLLAMGLRKTLAMGLRKTGVTINKLTQFFLFIQQCASPQHFSAGPMHPFQPWQNIDGLVNKYTDNMYEFAPRPSCSMGPDCGSKYLFCDRSHGKPRCAAKVRPNGNCAGFTNGEDVCLNEDVCLNGECQYGKCVKKVAKISPPPTTPKPPPIVTVSLRVVKKKPRKSPCFNEHECCAKWAADGQCESNSEYMSQFCKASCKKVNKCCSISSECADRHKNCKALSYQMKCDSSWMAENCRKYCNKCVKRMQTCAGGSPNFYNILATLSYGGNNGGCKSNQCYPNFYNILATLSYGGNNGGCKSNQCYNENICCQHWAMNGGCKKNSEWMNCNCKVSCGQCIPRNYKYGTCSDYHPKCFKWAKHGQCKSNGWVLANCRRSCNSCASIWHIKKCCAWRARRRRSRRKRKRRKRK

SEQ ID NO: 146673 - protein, 134 aa, Heterodera glycines
MAATPSRKGEPEHMQRKHCAVLKWKLVNKERQEFKLCRNLQENWSMPMSNLQWKKHSTGDQIRKYRHFAVQKASVIITVDALPQKHVHDDAQDEQKIEIVQKFNAMKNEYKQKGRKYSTKEWSQNYEEICKKIG

SEQ ID NO: 146674 - protein, 221 aa, Heterodera glycines
MKLFLFFFLIVFLICQIEIAAEKKKLEQKTFEEIFGEKWEEKEKENEQKKREIVQKYYQIKERIKQKGRKYSTKEWNKIEWKIAKKLGTNRKKIYQWIKELGLYKYQSKLKTDEQKIEIVQKFNAMKNEYKQKGRKYSKKEWKRNYAVIGKKIGVGHDLIKKWKKQFGMNERINEKEKMEKMKMYWQMKGENPKMSDEKIAKILKINRRTIDKWKKRFGEE

SEQ ID NO: 146675 - protein, 42 aa, Heterodera glycines
MWNCSGKPVPGRVPANMFTEFEPKMLSRNTWLNSSKFLTGLL

SEQ ID NO: 146676 - protein, 87 aa, Heterodera glycines
MKFVTIIAIAKEWHFPSALRKRKIIYASMDNQNTKTNENERVNGVDKKRRANGQMEELWRKRHKKKIVKDGTEWMTQPKHDGIVCQK

SEQ ID NO: 146677 - protein, 158 aa, Heterodera glycines
MAKRTLLRKRQTKNARHTRENKREERKAQTQRARQGRWAKKTATQPNPNAEIALQDEAGPSTSAASTEEAMEPPPPTPGPVPTPEMDEEILEFGFSLPSTSVTPIGDLVPFSTTPTAPMDTGETTPPPLAIDERSERIEQLEKQLKDRDDTIKFLREQ

SEQ ID NO: 146678 - protein, 135 aa, Heterodera glycines
MFTSFIDSKILSAQNPRTKTINVQIFDEKIAALSSTESQKEKTMEAKNSLRLAKLEFPRPRPGSSSVQPRKYGGFLPIPAQSVLEPPAPAVVPNNRNFLANNAGTKNEQQRQGDEEMVEEPFNDEAWPTKPPVNE

SEQ ID NO: 146679 - protein, 353 aa, Heterodera glycines
MGNEAVHLGHGHLHLGISGVEEGKSALWNYIIAYHEWEKKSNREASRKASFTAGGTNGESQSGEEEDEDKVSTTVGTESDDNGTPKAALVDLISSIRRMASAGGADDGDEASLSSAASSGTVAATTPTVPDWSQSLLRAANVICERISGAGGSASSSGGDIGGASDSIGDYSKKSATLPPRPPPPRPSGSSRSRQAATEAEPHPQLQQQQRRSRTPTPNSKKNAQVPAKASATATGTAAIVVEKSAQKEETREKNTETSGGGDGTPSTYRKFIYKGPPLKEMNNNNNGRRSVSSQRRTAATSAHGGGLLTNLITGTVCLLSRLVKGIIVWIRQWCYIYVVQYAVLTLINLRAL

SEQ ID NO: 146680 - protein, 170 aa, Heterodera glycines
MAKCHAFVTSVIQSNPFDDLGKLTNKQRVSGRTSVLTSGKARGTDIEQKQQFLPCGTPCQLGTRGGGNCAVHMDYLTEDGQVEIVMIIRLNLKEQIKSNCCPWCTDHHNLAKLVDADPNRIISHPLATDLTQKLALVIEHLNKYINNYIHPLKRQQKCTDFDGMCPVVTD

SEQ ID NO: 146681 - protein, 91 aa, Heterodera glycines
MSSPSDSKFACSTNKSSFGIPPAAVRSFLFASVLRPFASILIYCYHLPSPFYYRVPTHIHRIPFLCLSPISFIHFLKSYLVLLLFLLSFIQ

SEQ ID NO: 146682 - protein, 415 aa, Heterodera glycines
GSDGLAASIPMLPPPRSQIKRQKMTYHCKFGEFGVIERQKMTYHCKFGEFGVIEGQFTEPSGVAVNAQCDIIVADTNNHRIQVFDREGRFKFQFGECGKRVFDREGRFKFQFGECGKRDGQLLYPNRVSVNRVTGDFVVTERDGQLLYPNRVSVNRVTGDFVVTERSPTHQIQIYNQYGNQYGQFIRKFGASILQHPRGVCVDSQGRIVVVECKVMRVLIFDMFGNILHKFSCSRYLEFPNGVCYLEFPNGVCTTDKEEILISDNRAHSIKVFVFNYEGQFLRQIGGEGVTNYPIGVGINQLGEIVVADNHNNFNLTVADNHNNFNLTVFSQDGTLLSAFESKVKHAQCYDDGTLLSAFESKVKHAQCYDVALIDDSVVLASKDYRLYLKDYRLYLYKYQPGSSDQNRLGMGTER

SEQ ID NO: 146683 - protein, 19 aa, Heterodera glycines
LLQPPPPPPPPMPSLSSVQ

SEQ ID NO: 146684 - protein, 134 aa, Heterodera glycines
MASFVINPGGPGGYVIPKRRNATEEEKKKERHGAAAATAEDDAKSASSSRAVVDNKKDSTASRGTAVPPIRNPLNVWTGSLRFEDQTVESVDLYSPFRDSAKPNGLYVFCIEFFFFCWQSAFWRNIKNRIGYFK

SEQ ID NO: 146685 - protein, 321 aa, Heterodera glycines
MSETHPFSDQLTQHFPNQEKLDDKANLNLAEGSDRRIGEKLDNEANLNLAERSERRIWHKAVNEGHTVGRVERVQTRTKEEWRKWREKKALIRGCASKLGALLGTEIPPDLGINALPNQCQRRLYKFRNFLNDLERVVQKIEDNLGLANEYIGKLSRDNAIRKETEMQELMQELQINEKQRAADVLIPILRDKIEALEERLDITHNTDGDTTSGIVPLSRSVPMRKNLPKTELKRFDGSPSQWIPFWDYFRTIIHEDSHVRKIDKFSYLDSCIEGKASAIIQGIPISESGYDDAIDLLLKTYGETKRLIRTVNRDLCRSQL

SEQ ID NO: 146686 - protein, 77 aa, Heterodera glycines
MTLGNEIPKIWTKWDWTKKNASNVQIVHCVQCPICSARPISNLLVLPISNLFNASNFQFVQCQILFTCKKGKTIMKF

SEQ ID NO: 146687 - protein, 246 aa, Heterodera glycines
MHGETVDQNQYDQQFDHLEVKEEQSEEISRNCDELGGQLPMPTNNGQIYDNFSKAINKKKREIVEKFHKIKEKVKQMGKKYSKKEWQKIERKIATKLGANKMKIYKWKSELGMMTNKNYSVEEKRIMLKQFDQIYGKLKMKLNGKLEGKGRKCQKIIAKHLGTNISSIQRWKKEIKVGKMVKNQKTDDEKREIVEKYLKVKIKFMQNGKHSQKEWKAFNAKIKQMFGNPNFNPVAPVGSSERPHDS

SEQ ID NO: 146688 - protein, 330 aa, Heterodera glycines
MKILLIFLLLCALIFKKAINQIEAGKIIQEKSFAEIFGQRWDDGAEENICQNDQIMHGEIADQNNQFGQNVRQFDQIFDENVEVKEEESEEMSTDYDELGDQLPMPTNNGQSCDKFSNETNKNKRETVEQFHKIKEKVKQMGKKYSKKEWVKIERKIAKKLGTNQTKIYKWKREFGMMKNKNYSVEEKRIMLKQFDQIYAKLKMKLNGKLEGKREKCKKIIAKHLDTNIRTIFYWKKQLKSGKMVKKQKTDDEKREIVEKYFKIKKEFMQIGKHSRKEWKEFRAKIKQKFGVIFQTIEKWDKKIGLNQILSKGQKHYTFAEKTEKIKLIN

SEQ ID NO: 146689 - protein, 57 aa, Heterodera glycines
MSKLDGNPFADPFKDPAVQRVVSPAASVGNNSTSQSVIEEYNPFAPSASAGQVSACF

SEQ ID NO: 146690 - protein, 84 aa, Heterodera glycines
MSEKSPNGSGELRLEDNILRPDEKNVFTEALRIYESVGEQLKEKGQRRKGLVEFEADKCYVIEWEYRIERTGLTNWGGKRPSMV

SEQ ID NO: 146691 - protein, 140 aa, Heterodera glycines
MLFLLAGPAFDPRGAKPLCVGTAREGHRTVRAHSSGSGQRSADAFAHFGRIDRLGGEQCPDALLESSKALAKKIAEAEGLKWTGEVAHLGEDIAKPREWTKAPKMFRFRDNEFWEMNTAHPQANFTFTQKDLRYSWPIHH

SEQ ID NO: 146692 - protein, 214 aa, Heterodera glycines
RFFLRQSPGKAKRMPSMPFFTRFLTNRTTNCYKSPSELLSGQQKTLLGMCWRLIQIYWAKFAPSPSNERKLTEALKEWCLEATASCPDVLINDFTSSFRDGMAINILIKSFDESLIDLREISELRGEDRIENALSLARRHFRVPRLIQPKEFYSEHLDMKSVACYLMMVSTTVISPLAQQTHSQNELLTHQQQQQAIIFHQQMQLQQQQQQQSQ

SEQ ID NO: 146693 - protein, 172 aa, Heterodera glycines
ASTTEQTTTSTTVPAPSSSSSAHHQQQQLQSPPSPTASSFSCKLKLFEAQSRNGGGGAAGYPNATTAAAAKPLVCAQDLEKLKEAAEQEAAMRRRAAAAAANSNNDGKQYQQHNQQQRQNCGGGRLAENAMEMDEDNDFGDDDEEADEHRDTVHELSRLLSSSSVLDQQQNG

SEQ ID NO: 146694 - protein, 85 aa, Heterodera glycines
YAPVTTFRPTTFCPAPLTPTPLPLSLAGQVGLVHLPAGARRCGAFGRLPRGRLSAGGQWERPARPHPPRSHPMHSDGGRPLGAVH

SEQ ID NO: 146695 - protein, 123 aa, Heterodera glycines
MPMPSSALFNSDNSSGVERCAITDWGRRLSTERNGRLSSTGGTVPPGAMAPVIVAFAEKRTRNYGARAFLKTARAFLKTARAFLKTARAFLKTARAFLKTANSYDYNILCWSVHIFGECFKEG

SEQ ID NO: 146696 - protein, 274 aa, Heterodera glycines
MPIVLVDWSDIREQKRLMVLRASVALHGRSVTLYEKAFPLSEQCSKKAHDQFLADLASILPSNTTPLIVSDAGFKVPWYKSVEKLGWYWLSRVRGKVQYADLGAENWKPISNLHDMSSSHSKTLGYKRLTKSNPISCQILLYKSRSKGRKNQRSTRTHCHHPSPKIYSASAKEPWVLATNLPVEIRTPKQLVNIYSKRMQIEETFRDLKSPAYGLGLRHNRTSSSERFDIMLLIALTLPLACSLTPVPGVPAKSRRDPGPVRALIIIYLNTGLT

SEQ ID NO: 146697 - protein, 288 aa, Heterodera glycines
SPNHLSLDSAVQSDWVQQSIHSSAAGHDGARQFAGTFLDVAQCELRLLPPSIVRLERLRVLDLCDNYLTELVAPQNGLSRQPGAARLALQHGRPVAGRTVAVPRAAHVGHQWEPIDGTAAEHWRPAKPGRAGAVREPNPALAQLSRPIEAVGSAEGGQKQFDGADPVNLFMRTAHRFDSVRESTAGNSFQHWQFAAVTIFGPEREQFARLSANNWWMSVVGNSLTAAQPSQRVANGNWQIESTPSAGPSGQQSTVLTVHADRTVQGQNTVRPLALLQPTAAAQADHHA

SEQ ID NO: 146698 - protein, 187 aa, Heterodera glycines
MPRTYKDELNFIERISPVEFKIKKGFVPNMNVEGRFYVNAALEKLMFDELEVSTISSAAGFLPAVKQIGNVASLPAIVKNSIGLPDVHSGYGFAIGNIAAFDSADPQSVVSPGKLLKLLRPYSCIVFLRRCWLRYKLWRTTDQNKSLRKGRSASQGTACADNVRLYSRWDRLKRNYPNQCERLRRMP

SEQ ID NO: 146699 - protein, 31 aa, Heterodera glycines
MTKRRTQQSLLPNALKSIKNIVNQTQKKLLF

SEQ ID NO: 146700 - protein, 63 aa, Heterodera glycines
MILNLMTICPSALSSDEQNEAQKIRNLLSSFKGNEDDLLGYLFEDCLENPKEFVADKGKNHHI

SEQ ID NO: 146701 - protein, 169 aa, Heterodera glycines
MKVTKLESFVSIGFATKEMPLDGAIGQHLNSYGYRSDGSLGCNGISRPYKMGFGTMPMPFNAAVGQQRDRRYVGSANWPFPLEFVPVPMPSDGALAFQSPAFSTGDVVGCGVCLATRQIFLTKNGRRIDDSSFFTTTPINSLFPCVSLWTGDKIEANFGPSFKFNLATL

SEQ ID NO: 146702 - protein, 151 aa, Heterodera glycines
MSSSIGSPDTFFRSETDQEAAAGAEEVGKYEVFSWHGNLSDQLSAELFVTDQQLLKECREKLANSELRETKLLWNNGELNAENRALKAELEKQKRMTEHIELKAKVFNMEQEKQQFEKKYVSVDVFNSLVERIKQLENQQQKKEEGRNGNK

SEQ ID NO: 146703 - protein, 221 aa, Heterodera glycines
MAPGSGSQWQKQTEAVPTADGEGTSTQAAEKGPSTSTPDLRPRSSPRPLSATPIRRHVRVHQKTDEKATNMDFTTTDNATHMDLTMMDKATDVDLAYEDAATQTEQLDKQLKEQEQVISFLRQQVRNRDALITALRRQLEEKMAPPMETPTTSKKDDLLILGLVGTQKAYRRPKNTIRLINAKFDVFPPLEKRRSDQREEHDEFDQPEEETDEISLINVID

SEQ ID NO: 146704 - protein, 25 aa, Heterodera glycines
THRPEKTRCVPINRECQRKTLLFFS

SEQ ID NO: 146705 - protein, 89 aa, Heterodera glycines
MTAKSILNQMIFSRSSQGNAAVPAHCPLQALRQSSQSAQLLLPLFLIQFHHLSVLWRQLGLLTAKPLNCIMLKKCLPRLTMSRGVFNAL

SEQ ID NO: 146706 - protein, 24 aa, Heterodera glycines
KRGDPFVLQNFFKIKNHDNFLSGV

SEQ ID NO: 146707 - protein, 141 aa, Heterodera glycines
MAERKEFRRMFDETKMPKANPHFDQLLISFKSGKYEDSVVLELEQFAKFVQLQPVFTMNQQQIGQHFGREKLLTSMAADGSMGYTENVLPVLRLFTAFLTDINKSELKSTALSEPDVQQVPVRSLRSRPIKRVVSPDNGAN

SEQ ID NO: 146708 - protein, 36 aa, Heterodera glycines; identical to SEQ ID NO: 140203

SEQ ID NO: 146709 - protein, 169 aa, Heterodera glycines
MGYLAAIPMLIKRLRDAAADGHNSHDEGGETRRRDSVSHTSVLLGRHAKTVTCGLHRAERSTLTAQHTNFTEADFYNALQDAYLLTDQQMWDNGYPRWAETSAAADKAMEEEEGQGLDTDDPIAVLSRVCDRCGKEYRLTKEGDYAAGASADQCIFHWGRAWKKRAIFG

SEQ ID NO: 146710 - protein, 85 aa, Heterodera glycines
MAPATANNHGAGSSPAHAVTAASSADQNDTSTASQKGKCKALYEFQALNPGELDFKEHRTDDTNCALGWSTEQVKQTHLNLLIIP

SEQ ID NO: 146711 - protein, 63 aa, Heterodera glycines
MSLSALKKQFNKANQYLNESIGTAEATKLDEEFTEMERVSGEGGHDKRTDHAGHRGYQRIFTA

SEQ ID NO: 146712 - protein, 231 aa, Heterodera glycines
MSKKKLKQKSDVKKPVHKRWDKREEQQKKLERARQAKLAKKTVQQQQIDHGEGEAEMEQQEMDQAEQVEETYDHAMHFDFQLENDVQMSPNLAIDDQQPPTWDATAEAGVQCAIQTMEVSTQTDWNIHALLSADQIADFRATADQFRVHMLEHFRRHCSTSKFHHLVHHAPEFAENHGFWGLLSEQPVEKFHALFNDDLARKANIKDLHDILMFCARESAIRNAIFDSNEL

SEQ ID NO: 146713 - protein, 29 aa, Heterodera glycines
IFCISIEKKILNRLIRKFNAKIRPTLELF

SEQ ID NO: 146714 - protein, 126 aa, Heterodera glycines
MHGKLFGAARAVVGELVFQTGMVGYIESLTDPSYARQLLVLTYPLIGNYGVPDETKKDPKWPQLPSKCFESTQIWPAALVLVLESDDPERFQFVNINEENLVAKVSRKVFSAARLCRSRRPMGFSP

SEQ ID NO: 146715 - protein, 142 aa, Heterodera glycines
MNDDKLINEITDDLNIAMEHVNSAKSKITTVLAIQKEKEGALKRRIDTLYEENGKEKDNSTRLLKEMKKFKSFAEVTIKHGQECFSSSADITLGADLTDISGDIEETLKLTTMDGSNEVQLDQDHRNVKEGELEVEEQQILG

SEQ ID NO: 146716 - protein, 17 aa, Heterodera glycines
MCPKLITKLKMVGPLHM

SEQ ID NO: 146717 - protein, 75 aa, Heterodera glycines
MANGWRRRRRRNIMPMGTTTTIGTTMARMIVPFLVISAVTEAAAAAAAEQTARVPNANAMPIRLLLRRFLREIDG

SEQ ID NO: 146718 - protein, 257 aa, Heterodera glycines
MSRTPLNDITNHRSPGQNQGNAARTRSAMGRENIDPNVPIEGHNLPLFEEEIPLENPWNWRNLTESDSDSVTEIAREFSPMSLDSDPEWTWNPPRSIWPRNGREPLSQWFPRVMGNHWHERERRSAEALLRDFLRNSAFLTTNHLATNREIIFDGLSRSGAERTNIYPGFTVLNHFEGRGITINPLVPLVQECGGFSPRRGEIHMDYFPTEVVDLCYFERETEIPQQINQQLRQDDTDPGGNRNLREFSEPPVARDR

SEQ ID NO: 146719 - protein, 146 aa, Heterodera glycines
MTKSSSSSSEGELSDASFSPNDKIPLCQRGIKGNPLELVDAARADTLPKKAEGRARLPIRGPVSIAPRKPSPPSPKVKATTESSLRRRQHSDLSGMACPDLSGLARISTDGRPGTSGYGGLAGSLRMRDPGLAGMATEPLVPSKVN

SEQ ID NO: 146720 - protein, 272 aa, Heterodera glycines
KVLGLIWDIDKDDIVFEFPSVDSLKIVNRRLVLSFLASLFDPLGLMGPCIQPLKLFFQSLWEEKKGWDDALSEEDSTRWNAFQESWKDKRIRVPRRTMIQGECSLQLHAFVDASIHTFATAIYLRVESSNKIQNWLIFSKNRLKPKSASKALTIPRMELMAILIGIRGLKFIQTQLRRAIEHSYLWSDSQIALNWVASKEAQPKFIERRIKEIRTITKCSFHFVRTAENPADLATRGATPEELSTHSSWWGGPNWLTKDQNHWPHELFFEIK

SEQ ID NO: 146721 - protein, 1574 aa, Heterodera glycines
MSELLRITIAPIVKRLKLYIETAQENLTKDLTEEIRTDLLAERQNLCRAVSLLEKNNDKWEAVFHRVKGPALQEEEQNYKDYKPEGKAFMEWADQARGLVDTIDGALGLSEQGDDVVHPAQVQQPVQNIQPQVVVAPQRHEVMLPPISLPKFSGEPREWPLFWKLFETSVESLQIEDFKKHIYLLGCLPEKSVARRAIDLYPPSDENYPRVVEILKKRFGDEKSIVETLQSELLHLPKPSDSVQSLRQFSESIERICQQLSDFGENEQNKFMASTIKSKLPYHLLTQVVEKEMRSGGTFDCSDLRKAITSIVEVKEEVQRCTQVFRGEEKPRNFPPQMQRNNFQGRGTNFPPNQFRQGHWRPNNRNESVGMMSPQIHRSFNTVNQREQTHFSPRERGTNPLCSLCSDMGHAPSKCPKYPTPGARRRRLADQQRCFNCLMQGHNSQQCSSSKRCPKCGEKHHFMICYSEGDAPRGSTPQQTSKGGAVQKKQSSNRRGEPPRPTQNHFSALNEPLRIRENPSEISIFDGKRTNVLTSVVTKKSHAFLMTRRLRVRSSRDPRRMIKAMFLFDPASQTSYMSDPLIKKLKPHKVTSEEMEVYGFGGERNGPIRFHSPVYSVQIQRSDNKWEEILLNRTEQISTPFKMVEWNSHDYTSEEQDVFQALSFSQDEPEILISARHFWKFFQSKKEVLPGLFVIQTTLGPLVNGESDFGPNVQNPGLSMMTIDESNQEQMPATKEIEYFFNLESLGIKEDPNEDDDQTAMQLFDKSIRRENGGRYSVKWPWKKETPNLPSNYRMAFSRFISLEPEDREVTKFLWLKDTEKPLSSENLIIYRFCRVAFGVISSPFILAATLQYHLKNCRSILAKELAESLYVDNALMECETPEEALTKYKEAKAILKEGCFNLREFITNSKEVMEAIPPEDRLEKAKVKVLGLIWDIDKDDIVFEFPSVDSLKIVNRRLVLSFLASLFDPLGLMGPCIQPLKLFFQSLWEEKKGWDDALSEEDSTRWNAFQESWKDKRIRVPRRTMIQGECSLQLHAFVDASIHTFATAIYLRVESSNKIQNWLIFSKNRLKPKSASKALTIPRMELMAILIGIRGLKFIQTQLRRAIEHSYLWSDSQIALNWVASKEAQPKFIERRIKEIRTITKCSFHFVRTAENPADLATRGATPEELSTHSSWWGGPNWLTKDQNHWPHELFFEIKEEELHDPPKEDEKIFLAHTCAEPKQQLFNAKRHHSWTKLINWETTTEEADPNDKQISSSEKLAALFKATREAHESFWYKWHNEYLLLLRERSKWDHKGAHLLDKGEPKEGMIVLIHEEFTPRNQWTLGKIIELNGRPGAIRSVQLEMPIHGIKSKRYGTMPRKVVITRPVNKIFPLEVGFENLTENGKENLKVNEDETANSSTENTTPHLGNKLPNEEQENEDKNSHLGEPKANQNKHGMITRSKAKVMTVLNCLTIFCIFGLAGAYPTNQCNECKLICSNKGVLAKIPKEIRKVELCCSENCYIDENVHKLTYELPKEILLNDYQCQGHFWMDSKHMFKKDILCPAVDECVLIECYLCMEQLANPTCYPLVSS

SEQ ID NO: 146722 - protein, 84 aa, Heterodera glycines
LNNSPPSTASHKNNKFDDVNKFICIISTMMSMLKNVTHINLHKELTCMDSSGTYRLAFPSAAALLTFIYKNCPNITTFNVSNEE

SEQ ID NO: 146723 - protein, 55 aa, Heterodera glycines
MGMNTMLLNAINVDLPNRSAFVTGGRSKPFVTEERYANRWATLLETGTIQKYHGI

SEQ ID NO: 146724 - protein, 63 aa, Heterodera glycines
MRKFQVTLIGQLLCQRRPVAFGPLWNRKGGISDGLHELNKCQIDRAKMPTNALHSNRANSIYL

SEQ ID NO: 146725 - protein, 67 aa, Heterodera glycines
MPKALKKDAELANCMTILTFSLKMNHTQIRKAFFLGLFMYVCTNQSPTDFFVLPKTNSNDKFNIFDC

SEQ ID NO: 146726 - protein, 38 aa, Heterodera glycines
MLLLLLLLLDMLLLLLLLFLLLVRVPLDLLDKNYPDRP

SEQ ID NO: 146727 - protein, 146 aa, Heterodera glycines
MQWIKFNCTLCPSGLQCFYPRKYAKPVLCAHPSVRNITDFLSTGQLGEAATTTTTTTTFPTTAEVSAAATECAPPPVHLTAWIAVCTALVALLVIAEAAGQRRADGAIEEGDEPVYDEVPLDSDIVVEMRDGENGEEEEEEDDSDF

SEQ ID NO: 146728 - protein, 232 aa, Heterodera glycines
MSDKKALFKRVIAEVDLTISTGGITLSGPRLSVPRFIPFEENGRCRACKGTEAEVDTMVTKEGITLWCTRIEKAQFVPFDVVYELPGHCFFRVKNKARVFSVPYSELPSSDRCTQPLPPPPPPPMTTAKHQRTPDDEEEEKNLRRKAKVALDLVEAGLAADAMMQDGTRWKKAKTAINVLANLLLAESLTDVSSTFDQQQQQQQLSSKEEEKEECINNSSASAQLNLLPMVM

SEQ ID NO: 146729 - protein, 135 aa, Heterodera glycines
MLLILDDLMLSIEERYLSDLFTKKSHHHQFAVVFITQNLFERKIKVARLSAQYLVLMRAPNSLLSIRNIGVQLFPRQLDFFLDAYRKATARPYGYLLIDMHASSDPALRLRTNIFKEEQEEDEGTVVFIPKNGAV

SEQ ID NO: 146730 - protein, 211 aa, Heterodera glycines
MPYRIPKREPKVEEAPQQQQPLPAAAVVVEEMPVVPPPRRGAKRRYPVYEDDEVQIRKRVRQPRRVDLADFQALSRHNRGHRYLLVAVDVLSKRLFVVPLKNKRAEEMLEAFKLLIDQMPMAPHRIFSDKGTEFKNRLLKDFFEQREIEKHEPVHSSVKASVAERAIRNVKQRLYRYFAETETLNWVDAAQKIVDGINRSPSRAHGMRPID

SEQ ID NO: 146731 - protein, 35 aa, Heterodera glycines
MCGYTLMANANSRNWGQQQQQVVIFTNAMPFNDAY

SEQ ID NO: 146732 - protein, 93 aa, Heterodera glycines
MGFSRLILITLISCCLLPLASVVLAQCPYQGWTVSGSCQIMGYCVDPRDKCYYRSSCCRISNQQYAQTTKQNPKTGLMETNYCPLGAYRDGGH

SEQ ID NO: 146733 - protein, 118 aa, Heterodera glycines
MFRGGSTGEEQSNYVALDIQILKVPMLQCRAVDIHTSSPLAGLGQRAIAVMDDGDFGSVDDVQQKYRRTGSAGTNILYRIRREELAQGKHPTNKTDKGRTIRTVGQVEFDGSQLNVGK

SEQ ID NO: 146734 - protein, 90 aa, Heterodera glycines
MCWTPSQVCVNRQDCCVQSNIPVNSNPYGPTNTGPNTNYPGFNAYNPGISGEDTCRQGQGQCPLTMCQDGCEFYFLKIQINNSKQMDIYF

SEQ ID NO: 146735 - protein, 140 aa, Heterodera glycines
MALSALLLLLPLLLNVQNIPEPQRALAKMHWELETIQKEKPEAPPQFDLGLFSEALEVMVEMDEEAKEVKLRKDKLIEWAGGEEAKKLKEKMTEEDTVPEVRVNENGKVEVKDGAGGEGRLEVRRTKDEKGREQVVITLM

SEQ ID NO: 146736 - protein, 110 aa, Heterodera glycines
MKHSEVAVAYLQMLHGHVLAVHLSYCLSKCQRCWPVCHKQGNCCFFFALSTVTMKFMLKYLHIKLKLKWVIFNLTFSKYEEILYTQFGKLCPKYEEGTREIEDWIWGNKE

SEQ ID NO: 146737 - protein, 56 aa, Heterodera glycines
MASDHFWSARIALLMFRVNPQRYNERVKQCVKESNVALESDYRDIPNDGGGRRASI

SEQ ID NO: 146738 - protein, 42 aa, Heterodera glycines
RAKIYANYAIWRYEQFCLTLGLTHSVAADPQNVQPTKCPSLE

SEQ ID NO: 146739 - protein, 15 aa, Heterodera glycines
MSLMRNLNPGNPIPA

SEQ ID NO: 146740 - protein, 56 aa, Heterodera glycines; identical to SEQ ID NO: 146737

SEQ ID NO: 146741 - protein, 48 aa, Heterodera glycines
MALNARQRIVVLCLVRHFSTYVFRAFKMKYNFLKILFHFLSMENIGTN

SEQ ID NO: 146742 - protein, 58 aa, Heterodera glycines
MNLMTTFLTTKRKSWVLISFHFQNCGPEQRLLRQKRGQSDIGHRCDSERSKKGAQIPT

SEQ ID NO: 146743 - protein, 23 aa, Heterodera glycines
MHQSLPLFLPLFIFFVYATDCLN

SEQ ID NO: 146744 - protein, 140 aa, Heterodera glycines
MSSHSSSSSSSSGGSLKPDTLAHSGGWRNDHFCHIYEHQTAIKIRITSYDMLPIAPAPKHHCAVVTFLCKTCAKKTHVTDPKRMVEEYLCPCPCSDKTLIKIEVNKVKNTATRHVITAEVKCPCHGAPTFVTYELTAAGK

SEQ ID NO: 146745 - protein, 182 aa, Heterodera glycines
SSSSSGGSLKPDTLAHSGGWRNDHFCHIYEHQTAIKIRITSYDMLPIAPAPKHHCAVVTFLCKTCAKKLTLGEYGNFIKIVRTKKLRCHQTLNDVYADMPLRGYCVIWYNCQKWADDFFDNVIQKEWLKSTFARAHAQTTLIKIEVNKVKNTATRHVITAEVKCPCHGAPTFVTYELTAAGK

SEQ ID NO: 146746 - protein, 143 aa, Heterodera glycines
MSSHSSSSSSSSGGSLKPDTLAHSGGWRNDHFCHIYEHQTAIKIRITSYDMLPIAPAPKHHCAVVTFLCKTCAKKTHVTSYLVIQKEWLKSTFARAHAQTTLIKIEVNKVKNTATRHVITAEVKCPCHGAPTFVTYELTAAGK

SEQ ID NO: 146747 - protein, 48 aa, Heterodera glycines
MRVRRCSAFVIQTAFFAAFFKKLFLGLGSQGGNMKFGHREVWAPEGGI

SEQ ID NO: 146748 - protein, 143 aa, Heterodera glycines
MSSHSSSSSSSSGGSLKPDTLAHSGGWRNDHFCHIYEHQTAIKIRITSYDMLPIAPAPKHHCVVVTFLCKTCAKKTHVTSYLVIQKEWLKSTFARAHAQTTLIKIEVNKVKNTATRHVITAEVKCPCHGAPTFVTYELTAAGK

SEQ ID NO: 146749 - protein, 119 aa, Heterodera glycines
MHLRLPDIWTVDITTVDIRTVKSFGQKWTFGQWTLRQWTLGQSGHLDSGHYDSEVIWTEVDIWTVDIRTVSHLDRSGHLDSGHYDSEVIWTEVDIWTVDIRTVKSFGQKWTFGQWTLRQ

SEQ ID NO: 146750 - protein, 138 aa, Heterodera glycines
MVIPPLASSAAENALVTQQKRRTKRGFELFRRHDGCAGNWSTGQECAGGASIFVLSIFVIILCAFRLSHEAKLHTMSHPGTIQLIALLSLIAFCVALIIGLYMMLRGCFGAKLDGGLVRSMSAVNNSLIYAQMLDDHS

SEQ ID NO: 146751 - protein, 139 aa, Heterodera glycines
MPAVNKLALSYAKLFERPILKFSLIYCHFHIFMTGVCGLVSILTYMAICVERYIVIICPLHASNWCTRSRILLVINSIWAFAIMYRLPYFDLIGTEKQRKIRQRRKVMKVLIFCFVLYFLCSFGSISLFIIWFFLYFTF

SEQ ID NO: 146752 - protein, 92 aa, Heterodera glycines
MKPIIQLKSPNRIGYRQVQITDSVLRVQVEDRSQLISPEAEINPMLGDQPHAQRMLQNVAPEAHWDSITDLATLWPHLLVSAGREGVIKMWR

SEQ ID NO: 146753 - protein, 109 aa, Heterodera glycines
PPPPPPTDFFNFKICSFLKAFASSLNGTLATLAVLKGVGVGNEQATVTVLAAALTWILKDGVGMLARIAFAWAKGTRLDSDCKRWRLFADLLNDASFFIVTIVSSFPSE

SEQ ID NO: 146754 - protein, 41 aa, Heterodera glycines
MPKSLASQVEAIEQQQQNIVETYNGEPVHEYSFARPRGDGD

SEQ ID NO: 146755 - protein, 40 aa, Heterodera glycines
MLNCELIYWKYIQVDEFSLKEFEFLNFVISAFFSPRKCVS

SEQ ID NO: 146756 - protein, 280 aa, Heterodera glycines
MDNNSPGPSNNVNPENKIGKTNVGGPLSDIDLFKEICGIDEPTASALLRESGGDLEAAIHQFFFTRENPEVLQNQDNEVQELRRRAIGDRARNNQQNQSLPVVSAPPNAPLISWSQWVRGIFLIPFRYLYTTAMDVFFFVFDFFFGGRPPRRPITGNNRQNNANPLARGQQDVLADRIIMREQQQAYEQALAIDKQKAEQLKMEKQRAQAEADKVNNRKAFLARKRGEVAANIGKTAAETNGTGGGTVAEEKGEDLVRIRLVFPSSARMEQNFRHSDSLE

SEQ ID NO: 146757 - protein, 205 aa, Heterodera glycines
MRTLPYFIIFITSREKLLAKMAEPLNFQFLNCFFVLINLNSASSNLDLIMTEKKLLSTAPSVFFQSDEFLFEKWFQNYIFGILCAEESERKITPENYFYNFYEKAQKLRKDFCWTMKNGQSVEKATEKFGKNARKLIKELENDQKIKQSIQKAMKNKNIKKLNEAEIISVIKEFEANSAEENKNQINSLVVQWVYLALNGLWKAI

SEQ ID NO: 146758 - protein, 28 aa, Heterodera glycines
FTSEKCTWRINKERNKGRRGRNSKTTPF

SEQ ID NO: 146759 - protein, 538 aa, Heterodera glycines
NYDNSVIFSPDQKAEIFAKIFSEHYLHNSKSLPFDLSSHSPVINDIEFNVVDVGRVLKSLPNKNNTSPDGINFRLIKKCFLSFAPYVTELFRISFDTGKLPTFWKKSIIIPLFKKGDKSCLTNYRPIALTCSLCKIFEKFVVRAITSFLLKQISVHQFGFVKGRSTVTQLILTLENWFDGIYNGKNIDCVYIDFRKAFDVIPHSLLLYKVHKIGIRGKILNWISDFLANRSFLVRVENSFSSEYKMCSGVPQGSVLGPILFLIYINDLPKKIPKGIFIKLYADDVKLYSIHRTKTDKALRQLSNWSNEWCIDISINKTFVLYLGKNNPREQYKINNNTICEVDTIRDLGILIDNKLKFTEHINTVTRNAYGRMRFLFRIIKSKRISIWKNIFISYIRPLLEYAPEAWNPQLKIHINKIEKCKYFTRIALRKCNLPYNPYGQRLELFKLPTLEKRRKKFDILTTYKIIHFHVGSPSCKSPKVAPRWDQLTGSGYKQNMHTSISSENWNKFSKFVHFRVNVITWTTNRRELKLILIQIKA

SEQ ID NO: 146760 - protein, 221 aa, Heterodera glycines
SARRKISEDYKEIQLPSPVFLDDQDQTLWDKRAAKKRLLFHHSSLDVPAMGSIDTAHDDLAHRYEDMDSEAELAIQEEPPRYINDEEAEDFEEMIKLVARKMPKMEFLQVRNNPILLRDADPLTTRKKLTKRGSGKGSAASGGGGGSTLLRQHSKSRLKKLSEQSDSRTPSADATEMLAELSAMVAKSTAHSGATSPANILQFIEEQKQKASSQAVAGEQP

SEQ ID NO: 146761 - protein, 156 aa, Heterodera glycines
MDDELNTTASREKKTEPITLIEAKEDVISNIENVKAAKLENEDQAKAENEEKGQIGGDKSEDKTAISDGQQQNEGITVKGCAAAAAADEEDDDGTVVTSSNIAAQRSLKWDDTVPDQKEEKPAATEEQKVRTNSCKDENGFTYYKCRFCGLTFNYM

SEQ ID NO: 146762 - protein, 199 aa, Heterodera glycines
MKNDKGLEISEKLEQNQEIVHKFLGIESESLEDESDEYDGTNEYEKDEASYEYENRGILSDILEMDRKKRTTVTTPDARWVKKVEKSKLRKSGGQENKNTNTRVNYALYKLNEDRKRQYDQIFTQACENSKFQLQLAKAILQISPNEGVRRIFNRDDLVAKWKGEKLEVGFCAPIIPEKIIWDKKIGKECFEWVPILPK

SEQ ID NO: 146763 - protein, 901 aa, Heterodera glycines
NIQNPLVLKAGALFESDSIRVEEAMMEYRKRINNLPASTFRVVKRPNISEVIKLIKAEAKETLGIVMGNTGNLLDLMRNIPEKAKEAVNYLKGMSFLLVILPILVLIAIIGFIVTKYWPIIYAGFRAGSVATRVIRRIIGMKRHRTRVAAVPTAPELADLNSVDEEAYVLDYLPPRRIAAITNDPRRLPSIRVHFNGLLTAALVDSCASVSYCRESIARKAGLTINDLNGENANLTAANDSRIQILGKANTKIRIEDQNGKCGEWEITVLVSPDKHCPGPVLLGLPILTDLKGVIAFSERKVRLGEIWANIISVVEAEKPKNVKITLENDEIFEPRTENVITAKVNESFSPDQNFLVKGTINRYPSIIVGRTLVAPGDKNFVTLQIMNAGKMPVKIYGGSHLADLELVRIKALPGDEIHPKDYIPSETRWHEKLPNLPNMAINRLPSERLNLEGTRLSGETQEKLKEIVDKYREAFVADDGKIGLYRGPIAHKIDLMPGSLPFHFRPYRYPPETQKEIERQIKIMLDQNIIRESESEFASPIVMVPKADKKSWRFAIDYRALNKMTKKRVFHLPNIQELLDLMGAKKYYTCMDMQQGFMQIPMAPEDIEKTAFISHLGIYEFIMMPFGLTAAPDTFQRVMNSLRRRLTAAMLIYLDDIIIGTILPLRESDEPLNWEKYVDDPNVEQEEAEMSEDSGKEDKKGKEIKKFSKFGFESSDEEDQSLKIFFVRNNENWDLNENEQIWEQNGEAEEENEIPCTTTEIFLDGEITLAYTSWPEANLISLTSLVPTNLIKDDWEIHTNEFGKRYITAWLFGISFELFLSDEPDRVVLGIQAQFSINDEWHSKTEGERETYWEQLGEIDGQILEIQRIPDITITYSENPLIIDYEFDQNDDQNNSPTIN

SEQ ID NO: 146764 - protein, 160 aa, Heterodera glycines
MPATTFFITIITLVIFSHLHFLANTSSVTNGTSLLNETIVPKLRILILTTRIPITETHYVLHRKMAELLADDAEHVEKVLLLVAKPDCAETSEVPSKFHGRLLVWNRMTFGTNAAQNVEECQEMVNKIMLDMQTRPNLWEKNGTQFLPSADKPYMGNLGK

SEQ ID NO: 146765 - protein, 117 aa, Heterodera glycines
MNGTDRTNNFAEAYHCTLQLSIGQGHPTDLEIHKQFARASENNRRGLRTFPRRKCSAAESKALPCSGQTNFEDSGAYNEEKTQPQIDDDHQYGQNQNNRNLIIEMLRGISSNYQMGK

SEQ ID NO: 146766 - protein, 21 aa, Heterodera glycines
FEPVTPHFLTNSQTTKTKKPT

SEQ ID NO: 146767 - protein, 149 aa, Heterodera glycines
MANDEPTEAAKLAEEFATKNLTTKERMDAILKMISGRSGEEGAEEEEEGEEDEEGEEDEDEKMTGEELEEREEDEEEVELEEREEEDLEVMEELEEVEELEEEEKLKEREEEKEEEEEEEEGELEEKEEEEKRMEEKRREEWQRSNSLV

SEQ ID NO: 146768 - protein, 15 aa, Heterodera glycines
MAFELWLYDVSPPRK

SEQ ID NO: 146769 - protein, 61 aa, Heterodera glycines
GNPTLSAKSRVSARGPPYGCVHHPKHGERHALLIGTDPSHCEHCAFAWHSLAHGRGAIRKR

SEQ ID NO: 146770 - protein, 138 aa, Heterodera glycines
MAQKFHSMIVSITLLVTVMAHHAHSLTTPLTAHVHPVPQYTGFPETVAVPVPPLPCKPLSAAQRAALAPAHPSAADASPQQEMLQFHRMASPAVVAIAVTVVAVAINACASVSAHHAAASAAQAAVDVKMFKFGQTFF

SEQ ID NO: 146771 - protein, 84 aa, Heterodera glycines
PGYGCGCRRRRRRALTAPFGYPMPMFLQQLRTPIYEPRLCRELCQVRVLSERSHSIGEVHTNVNLISADDRQRMAASAAGNEKL

SEQ ID NO: 146772 - protein, 128 aa, Heterodera glycines
VVFHVVGDRQLVEQDISSRHPCINALRNVIRLAHSGINHITFPLLLVEHMTESMTISWCLSRAELVFKCLKGFLMEVCSSGNAGGANAGGAPHFNINFVLPSAISPSLFQQLVEMFSSIFHSVPSLNA

SEQ ID NO: 146773 - protein, 101 aa, Heterodera glycines
MKANRKRRAAAAAVRQRRRRQQQQNDCDSSEKANNEPPPLAGLQASAVEEASLPRLMISTCNNDIVDDNSEFSQGAVYYTRTSSSAPNNQCTTARIYNKVM

SEQ ID NO: 146774 - protein, 31 aa, Heterodera glycines
MKEGRGDYGSKLLKYRGESWNLFHFSAFAPV

SEQ ID NO: 146775 - protein, 43 aa, Heterodera glycines
MHALFACRLSVARALVAHQLAHCAAAAVIKRSVTFLLNSFNPR

SEQ ID NO: 146776 - protein, 83 aa, Heterodera glycines
MELGISKETFIKWKKELTPNYNKTQNSIEEKLQKMKQYFEIKEANPKISDEIIAGKLDIQLLENGKSFLIYNLLMYDYWFIVI

SEQ ID NO: 146777 - protein, 125 aa, Heterodera glycines
MGEEMGTDPNGQMSEYSNQMLSKVIKIREKNQMINKKKNEKYQNKDRAKIELKIAKSLGVNRQKIYKWKKELNLNQNKKMEKSFYVEKKIEFIERFNEFKSFMEKGNRKNLWAFLKTHFGDGKKN

SEQ ID NO: 146778 - protein, 87 aa, Heterodera glycines
MSHLLTQFYRINVDPVVSIGAAGLEFKIFCRTGSGWINNANPAILQILHFPNNAGLRTGILQNPAHDPVLLRALPLSALVHFHGFDF

SEQ ID NO: 146779 - protein, 19 aa, Heterodera glycines
YANYAIWRYEQFCLTLGLT

SEQ ID NO: 146780 - protein, 247 aa, Heterodera glycines
MAILILAIALPLAYCLVDIKELEYLRALDDSISYRVVFKPFDELPEQFLPSEPTTISPTTASPKTTTAAQEPISEHEKVLQQQHEDNDNEIDGSEQQQQSQSSPLSSPSSSFSSSSATAEQPKLVKIVSADAEEYQCVLPVLASSSKKRIKSYHGPSPAELIQSIYREQICSYRIEPYWNYELCHGRYVLQYHEDKESKKRTEYFLGNFVAMNAEVEARHFDQLNPPTRKMGDERLAYYPVTYTHGT

SEQ ID NO: 146781 - protein, 230 aa, Heterodera glycines
MKRTNATNITPPRAKRSMAPALDPITAALAEQERQRTLVFIGLPESNAVRPSERVQEDREATTKILDHLEVEAEPTAVFRLGRYDPQRTTPRPLKVVMPTPTQQHVALGGWKRERARLRSQQNLARLFVRPALTKEQLKEEYEERLRKRQQTPAPLASATKFSQTTNDQTPVVAKGPNKKKTSEDISQPPEVFDKTILVCYETLNSLPPTDKIVHQIQSLKKQHPHLFNK

SEQ ID NO: 146782 - protein, 50 aa, Heterodera glycines
MTVTSTKNNSFPSSFKDITLHDVWASNLEAEFAKLRDLIDDYPFVAMDTE

SEQ ID NO: 146783 - protein, 118 aa, Heterodera glycines
MLVKLPEDEKDFFRYHRKLFPNSFDIKILLRQPGPRDAMLKGGLQELADQLHVPRIGQCHQAGSDSLLTAMTFFKLQELFFSDNWREISAKVQGHMAGLSNSQLNGGTGITTNNNGLG

SEQ ID NO: 146784 - protein, 156 aa, Heterodera glycines
GDFRRRRNPTAFNRLGSVVAPTTVSAQPIWQCPVVGVFLRREQIVDHYELASCGGGRIAFGVQLATECHCPCPLPMPFSKRSFLANTDSAASSSADCSAAFDAASAAPAVELQFGAAHLLTVPGIVREAAAEVFFSAGDEEDVRSVTQMILDSVAK

SEQ ID NO: 146785 - protein, 737 aa, Heterodera glycines
MCAAHHEWLTKQKGQKLGKKMNVLRIGGLMVNILNGSTRLMEVTIWVNDIPIKFVLDSGADLTVLDEVAHKAIGKPRLTHCNEQAVYHDGTSLEEELDRLLEQKVIKPVDHTHWAAPIVVVKKANGSTRICADFSTGLNNALLLHQHPLPLPDDIFAKLNGGRIFSQIDLKDAYLQVELDEKSKEVCTIATHRGNYQFQRLPFGVKSAPGIFQSIMDSMLADCPFATAYLDDVIVVSRSSEDHQKHLEEVFKRFEKFGFRVKPEKCFFCQDQIKYLGFIIDQDGRRPDQTKIQAISEMPVPTNVSEVRSFLGMINHYQQFVKNMRFIRQPLDELLKQDKLCQWSEDCQNAFEKVIKILKSDQLLTHYDPAQEIIVSADASEHGIGAVISHRFSDGSLKAIAHASSSLSAAEKNYSQIEKEGLAIVFAVQKFHKYLFGRHFVLQTDHKPLLSIFGNKKGIKACTSNRLQRWAITLLGYDFEIEYQNTADFGQADVLSRLIAKTPVPDNEVIIANIRESNETGVLNFVAKTLPLDHNDLTNAAKSDQVIKNVKKFVCSHWPTKNKMAADIVPFHRRRDALTIEDECLLYADRVVIPASLQKDVLQLLHRGHPGMKRMKSLARQYVYWPGMDEQIENFVKMCNECTMEAKMPVKTELQSWPKADGPWKRVHLDYAGPFMGKMFLIIVDAYSKWPEVFEIVHRIPQLQSTNCGHSVPVMAFPKFWSRTTAHNSLQKNLRNL

SEQ ID NO: 146786 - protein, 426 aa, Heterodera glycines
MPNLANFDCFGLGDHGESDIEGWLERFALALDCSTPNLQDELKVKLLLTKLSETAYAEYSKHCLPKKPTEFDFGKTSEMLKSLFAKHKSVWINRYECLKAEKQDEEDFRGFINRHKRLLSDFEFKKLNEEQFNCLMLLVALKSPKDAELRKRILSKLAADGDRATYESVVNDLQMFLSTISEAKVMERPSNSNILAVKRRQQPKKDNFGEKGYKQQSCWCCGREHTPLHCPHLKTVCRKCSKVGHVQSMCAAHHEWLAKQKGPKLGKKMNALRIGGLMVNILNGSTRLMEVTIWVNDIPIKFVLDSGADLTVLDEVAHMAIGKPRLTHCNEQAVYHDDTSCTPLGKGTARFSLGGKTVTGQYYVTKKGSLNLLGIDMLDAFGLLDAFRREVDKAMKVNVVKKEAKDSPNPQSKTTLTELQSKHIWL

SEQ ID NO: 146787 - protein, 262 aa, Heterodera glycines
MEEKKGKTQTDVKEKANEREAEKKTETNSTEKEETEEKKETELPKEQPKKVPTEKKTKAEGAKGTKPTEEKATKMQAEGTAAPAEDEAGGSDAAKANLEVPKKEPNAKNAVAQAETVPTFTTAPTATADSKNGQAEGSSHQQHHRGRLLMVNGGGSSNSNISRMMTTPRRTLVEVNGTNSANGNANHRKPPLPARQFSMGAENGTKNKAMKKTSGDIDQIGTELFGRKKREEEEEEEEEEEEEKQKGGAEERRGSRMQIQSQ

SEQ ID NO: 146788 - protein, 174 aa, Heterodera glycines
TMSEREKEAQMEEKQREERPKETEKNGAGGNPLERIERLLTCPICLDRYKQPKLLFCQHTFCLSCLESYVDIARPRIRCPECRGETGSKHRNVQSLPTNVQSLPTNLTLLAFLEIHLEASDVNAAEMQAYVQRFNLERCRVCEEKAFNLERCRVCEEKAELEGCAHCERKCGEC

SEQ ID NO: 146789 - protein, 359 aa, Heterodera glycines
MPRKEEKTTKASQRQAQDRTETKAAAEKEGERREKGGGGKKEKEEKEEEDKEEKEEKEEEDKEEKEEKEEEDKEEKEEKEEEDKEEKEEKEEEDKKEKEEKEEEDKEEKEEKEEEDKEEKEEKEEEDKEEKEEKEEEDKEEKEEKEEEDKEEKEEKEESKGIENSTKERERGEREKEREGRKGKGDEREKEREGEKEREGGKGEKGKEQSSSDQQQCQTICRQLSPPIRLRTQHNRRKPRVLFTPEQVANLEQYFERQKYVNSSEREQLARDLGLTPTQIKARKTLAFCSLIAHSVQIWFQNRRYKCKRIDQDMILHRMTAQLSSVHQQLITGGRIGAMQTQNEFSRITLASIFCNQKF

SEQ ID NO: 146790 - protein, 197 aa, Heterodera glycines
MTFHERRRDEYNLYTEKLRNDERISSIDTHIPVRINAFEMKGRCSVYVHELSFFAKYGEAEINLADGPNNDVAKETRRELHWSLWQILLAKYKKFFGGDNTKEYFCYDCENKLFSTKSIIRPGSFKEFIIDLKQTLILNSRCYDYLHKQNFVALRASLKAIGYERIGEVTITEPGCGEQSHTRKFFELLSSQKLFER

SEQ ID NO: 146791 - protein, 338 aa, Heterodera glycines
MEMGVDSFHDRLYDRLAVQYDSDEQMVNAIRGLARPLVEFHNIAIHMDVNPRNYLYVEKDGHLVVKLIDFEGAKLVSTSNKNECVVIGEEHALSPEYTGPEYYGEQSQASDKVLYQNLNFGNFFQQISTKFDIWSMGIMLIEIAFDQFRAQQRETPLIEDERKSRLFAIGNLYLGFTRNRLGTQPGIFKETQIVYSAGTEWIEQHQSAIETVLHIWMKYPKTALLVTNLLNLERKKRLTAQGILNYIDGLCQIGEFKEVKTSKKLRIFNSLNFGDFLTNLRVTKWKNKFNFLKENRSELDKSYKNLKKILKKVIKKQRKEMKRLKREGTANLNDCETE

SEQ ID NO: 146792 - protein, 30 aa, Heterodera glycines
MTWNGKMHKHQKENLYNQLILVKIDIANEL

SEQ ID NO: 146793 - protein, 403 aa, Heterodera glycines
MSMFCYRRSTSSTSTNTWTALSTSAAAAAADVPVSAAAKANGGAIENWPRKRRRGGVDTLDNGHQNGGGEEFKIKKKFRRNFVLFSFPPLYSPQHRQVITLDSDSSSSSTSDNNARSAAGAIANLRISAATATAAGGVRRSSSSCSSVDGAKSAGVEFAPPPTAPARIGCYQRRRSSGSSRTGSSSSSSAAPFPSSTTTTNSSASFSSNTSLSNICFGTASHGSSNNNHAVVALCARDGDDDDDGLKDVALPPICNDEDEDDDDGELLESVGGEDDDDLDNVIEIDQSAPPTVHRHQPQQQNDASQMMEEDEELDWDWEFELVEHEGFKLQPTAASDLCSAALTVPSSCSVPAASSPCDQSASSMAASSPQNQPATSMAMNSLSPSATSIVAASSSSHLATSM

SEQ ID NO: 146794 - protein, 144 aa, Heterodera glycines
DERAHAKWSGWRRREREGETEREREYAEVVFCILRQIFPKNFCMTKTNAGPLCGQVVNSELFPLCHTRFGSPCGDHPLISVITVLLCYMMSKKTTCLFFVCHFCFYCLTFLTKSFPNSFSNIHSHTFLIHSFPYGNYYYFYCLI

SEQ ID NO: 146795 - protein, 70 aa, Heterodera glycines
LSIGYPIFTLIFNCPTLNFLQFNPLNFLAILIFFIKISIMKYLTPNIFFDCFLIMHSSKFDQSQFFKIKK

SEQ ID NO: 146796 - protein, 67 aa, Heterodera glycines
MLTVHELRIRDMELASERNGSKSHLSIKYGSERISGVFGVADHESDIHCDEFRIPDSNSNKKSKIKI

SEQ ID NO: 146797 - protein, 74 aa, Heterodera glycines
TVSMSLNRFSGRSKFWSNLGYANFDIPKFGDGDQAYLLQIIIWPQICTMAQKKVLTGFFPVPVKILRYSVVRVF

SEQ ID NO: 146798 - protein, 31 aa, Heterodera glycines
MPWVWHSAGQGRRRQQQQQQHYGSIQQNFKK

SEQ ID NO: 146799 - protein, 90 aa, Heterodera glycines
MIRHKLQNEQDVSEILFFLKAFTNNKAQILVVCRNMQKVTFLTLCPKEGENRENLFQLIKQNLLESIGPYSFVRFEEQPLSSDEEVLNLF

SEQ ID NO: 146800 - protein, 179 aa, Heterodera glycines
MDSEANANGGANKPHQNVVGTKLRRRASSAEQLAVIGEASSTTDMDQQRQQQQQHSDSRGQQSSGQQQLPPPSRCVRMMPMPSSFQAQKRAAAAAGKLGASGFGGSASAEAAAPPSSCSECCCCEAADSTAVTGHCCVIGNAATPPIISSVAERFVLQQHGAGGVGVPKKKLPQHRRLR

SEQ ID NO: 146801 - protein, 51 aa, Heterodera glycines
MPKKRRQNSPNLSEGEDILARLDRLEKLLEGSGNPTLNPIIELLEKLERSI

SEQ ID NO: 146802 - protein, 196 aa, Heterodera glycines
MDVYKHTCKCNVKLGHVAEAIQECTEVLKYGDENDLDVLLDRGEAFLQNEQYEKAVEDFQKAVNAHEGSRRAKEQLNRAQKLLKLSKKKDYYKILGVRRKLAQQWHPDLFQDDAEKQRAQDKFIDIANAKDVLTDPEKRRRYDAGEDPLDPQGGGGGQQFHQWRWSGGQGGGFNPFGEGFNPFGENDGGFNFKFNF

SEQ ID NO: 146803 - protein, 43 aa, Heterodera glycines
MSENELGRTLDQCLADTALKILAGGSIGVVTALALFKGKRSWP

SEQ ID NO: 146804 - protein, 122 aa, Heterodera glycines
MVNFNYEWLNPPLGVLGLPLPILQISYLSFISFTLIHFASSQRKEIEKHLEQGKHWLSKGQFQEALQHYHQAVALDPTDYQIYYRRATVFLASGKVNAALPDLDKVVELKPDFVAVIEKRNN

SEQ ID NO: 146805 - protein, 58 aa, Heterodera glycines
MQSLMHTESFVSRLFETLKSGQYLPKTDALTSSEPPKLILQQTKSKIDQKSAAEHDEV

SEQ ID NO: 146806 - protein, 345 aa, Heterodera glycines
MGNPLFAQNQIVEQVVENSHSGIRNEIQHPIGLEIERYGRPIANSSPITRMGSSHNEPHNSFENAEFEEIRQFRARQLYENPRGFREQNFVGEQRERMNEFEQNHAPVPNFERRNVFVGDPHGNQLIFGNFERNMERNFGHFENFPGLARGGNQNLNVGGPRMEQIRDPHRERNQYEERHFMPIPEPNMRQIDGQNQNLAFRQVQGQNFQENMARVMPYTEGIPDIILELHKVTLSNQYANVLREIPTLFGTEGRDKINDFFTTLELCTGDWIPEKKLEILRAKLKGKASKALNLSLRKFGHQVPFEVIKRGDNPERHRTERHHPKRHHPKRHQPKTAPLKNGTT

SEQ ID NO: 146807 - protein, 242 aa, Heterodera glycines
MASFITTQKGAKKLLYDGYAYLKHKDGAGGKIYWRCDQAKSSAKCSGFAIAINDEITVTKQHNHAPSPTRIEVQTIKHSIRVTAAAQPATPPRSIVNGAIQGSSDAAKIQLPELRHMQKTASRIRKANGNFKETPKSLKDVEIPPELRRTRTASQEGFVFGDTGPEDEQRIISLASRTDIIRLSSCSVWMADGNIVDKFGHNNGVPEFLDYFERTWIGRGFATRPHCIVGPNIKSKTNVYSM

SEQ ID NO: 146808 - protein, 47 aa, Heterodera glycines
MALLQQQQQQQQQQQQAKRQQQLQQLQLVQQLAQLRQLQQSAALSSS

SEQ ID NO: 146809 - protein, 127 aa, Heterodera glycines
RQANGGVKTEPAAVTLSPALEHGVEPLQQLNIAADGDGTVGDDANVPSALIGDGIGVRADGDAGAINGTASATLAQQQQQQQALITALAQLIVARQQQQQQQQQQQDVMMAQQQQQMLQQKQREKMA

SEQ ID NO: 146810 - protein, 131 aa, Heterodera glycines
NNACHILRRRASEGADVAHPIALLHHFLSCAARVYALPWQYVSLYSYHGIHPVARLLVRVRRVGPVGLSLWLYQWLPSAAVRAFEDRLSALLGLSANLWRSQHVREAGRIGQDEEDVVIEETTYHCVMSVG

SEQ ID NO: 146811 - protein, 60 aa, Heterodera glycines
GLHSNLEIIYILTTRDGLLEGRRCKAGTGNGLYPLPPPHFISPIGLLPSRGALKRQWITS

SEQ ID NO: 146812 - protein, 17 aa, Heterodera glycines
MDSVYSRWTTRSVGLSG

SEQ ID NO: 146813 - protein, 385 aa, Heterodera glycines
MDEGVRKAKIRKCLERHQDKLNMPKKQLILSVPTRWNSTYHMLAAFKEQKKVLFSMQFERDQRNAGLLCLSKRPRLAEMETIPASLPTIAPNDFEILRHICPVLKIFDTETQKLSREVSTASVILPTLKRLHVFLQEGKFPEIIQPFIDSLVDSLNERVKKLVQNMLIRICSLMDPRFAYDESMFSKANWNLIEEDLIDFANGKINNEDTTNFEEQNETTLSDLESLSDFNGEQSDESIKYDIWKPKSPGCVSVPSTISGTSHSTQTTRIQLQLAAYKAFDRPSVNADLFTWWREIGNQFPDLIILARIVHSIPATSVSSERLFSKAGLIYSNKLRNRLGAEMAENLLLIKANMDRVFLAPSTEPDEEEQEMLDSDNLEVIEEEK

SEQ ID NO: 146814 - protein, 285 aa, Heterodera glycines
MDGLDDDEPMPPTHHQQQQQQALQQQQQQKKKRGPVAGARKGSADGGPGEPGTSASTAPTTGAGGEGATVPKQRGRKRKKALPPEEEQSQADSDNDDAAPKGRRGPGGGPGKRQRVTKSPANPKLYAKLNACLNTLLNYKTSNGKKLAGPFVQLPSRREYPDYYDQIERPMDLQRIRKKIEEDNTQCWPNERRRGFARFNMDGSEIHEDSKLLNMVWRRIAEAIGGQGGKEEEDETTGRGGGAARHTPQQEEAAAAPSTSGHAKAPAEDDDVPVSAAAAGPSTSS

SEQ ID NO: 146815 - protein, 110 aa, Heterodera glycines
PRKESNWSSSIDTIFNKGTFFVWFNAPFAATGEKLELNQEETMLIIRRLHKVLRPFLLRRLKKEVESQLPEKTEYVIKCDMSALQRLLYKHLQKGLLIDSKLSEQLRDLF

SEQ ID NO: 146816 - protein, 120 aa, Heterodera glycines
MLNKWNELKKHLLGHKGIFGSPPKRDKQQKKPNQTIWEFNKEVKEQIKIDLMALIRTKSKANCMCQPCEEMKQLARNFSEKDANGEGLSAKIFKISSQNSRVIPLEIKKKGNEKRTDGKS

SEQ ID NO: 146817 - protein, 220 aa, Heterodera glycines
GGNRQTHGTRRQTYINVRAAFVHVLGDLIQSVGVLFDLIQSVGVLFAGLLIYWKPNWHILDPICTLLFSAIVLPNWHILDPICTLLFSAIVLSTTIYIIRDALVVLLEGRPSTIDFRRPSTIDFRHVFDALEHIEGHVFDALEHIEGVKKVHDLRIWALTMDKVAISVHLEVESAADSQQILRATTLMLRRDFNVHESTIQIEGYQPETANCGQCVVPTK

SEQ ID NO: 146818 - protein, 387 aa, Heterodera glycines
MNVVQFDALGSGRPRCHGSESPSTSVDSQFLPVTKSASTTIASALGSGRSPMPTSESPSTSVDSQFLPVTKSASTTIASALGSGRPPMPTSESPSTSVDSQFLPVTKSASTTIASALGSGRSPMPTSESPSTSVDSQFLPVTKSASTTIASALGSGRPPMPTSESPSTSVDSQFLPVTKSASTTIASALGSGRPPMPTSESPSTSVDSQFLPVTKSASTTIASALGSGRPPMPTSESPSTSVESQFLPVTKSASTTIASNSSDCALTPQQKYCRKRALMEPSQHELAIIRNVLSFDDYSQYRIITVLLHRPQGINEGAVGLLLRTMAERSKPANAPFSILVHQVTGGSIASKNGHLMQGDRVFFIQHQSTVNMSVAEARSLVKSPSP

SEQ ID NO: 146819 - protein, 956 aa, Heterodera glycines
LKVKIRMNRKPAKLYLDTGSDVIIIDEGTHASVGHPPIKECNEIGKTFDGKRVQFIGKGTTTFELNGQSIVEEFYVAKQGSLNLLSRRAMDKFGLLRELRQKISNAAVNACTAGQNWTNYPMAHRKLTETKLKSRYYNIASPMRLLKESLFALIDRLIDRLFRDYMRAITISYHMEWAAPILIAKKADGSARMFIDYSTGLNDTLLDSQHPLPIPEDIFATLNGGKIFSQIDLRDAYLQIELDDESKLLCGLATHKGNYRMERLPFGIKTAPAIFQSIMDKMLAGLNYATAYLDDIIVVSGTIEEHTQHLKEVFTRIQAYGLRVKLEKCSFFRNQIKYLGQIIDRNGRRPDSTKIKAITQMPAPINISTLRSFLGMVNHYQQFVKNMRFIRKPLDDMLKKENEWNWSENCQNAFEKLKETDASEFGIGAVIQHKFPNGQVKAIAHASKSLSPAEKNYSQIEKEGLALIFAVKKFHKMLYGRHFTLQTDHKPLLNIFGSKKGIRQCSANRLLRWSLTLLAYDFAIEYINTKDFGQADALSRLIAKDTSGEDERVIASFCVEKEIELNFDTTIEKLPIKFADLVKASEKDEIIHTSEKFIRNGWPDERQLIESEAIQLFNRRKAELSILKECLIYGERIVVPKIFQGKIMNLLHKGHPGMKRMKQLARQYVYWPKLDAEIEQFVQNCQPCQDAAKAPTKTNLHSWPKSTSPWQRIHVDYAGPFFGKEFRIVVDSFSKYPEVFEMTTKSAAATIDRLRYLFTRHGIPETLVSDNGTQFASTEFAKFMANNGITHLFSAPYNPMSNGQVERFVDTFKRAFKKIKREGTANKEVIETFLITYRTTPTESKSPAEMLLGRKPRTTLDLLKPPTKANGERENGAKFFGPHEKVWARHRLSQNWKERENGAKFFGPHEKVWARHRLSQNWKAGTIFKSAGVIYKVRFGDGTAGRFHANQLRRRQ

SEQ ID NO: 146820 - protein, 196 aa, Heterodera glycines
MAANVNLQDLINLMAQQQQQMQQQQQMVQQQSQQIAQLLNQNAPNAAGLAQPNLITIIPALPDISPFESNDERSRVVEWLDRFKFALDCAAPMANDEIKVKCLMNKLSENAFSEYSRSVLPAAVTDFDFATTIQKLEKLFAKPQSIFIDRPYSEAMRKRPCVVEKDEVKEGYDKQSRSSSHWHGWNNEHPKYGAQG

SEQ ID NO: 146821 - protein, 38 aa, Heterodera glycines
MHSQATSALAHTNNGLEKGLCHHPALSDFICEINESTD

SEQ ID NO: 146822 - protein, 111 aa, Heterodera glycines
MNTAKKKPIELVKSFRMIPILLDLVNKEKSYDALNLAQTQLARFEFWAQYTKLKKQHKYLMNRGKMSLTMEEESNSKLIDQRQYTSNIIFSRRPNCDENKIWNESVKIETE

SEQ ID NO: 146823 - protein, 161 aa, Heterodera glycines
AIDADLLNSRYHMRVLVPRIHQDPQRLAEVFATLFDYTTSSPHALVLFIINCSLLYIINVKTIYAFKSVHTNRTFYVAVAIDPALCIGDQTIIKSRNALAKAISKKVTGISFGSAKFVTLVDKKHYDVLELRYDPPISSDNEFLKHAVHQAMVQLSMSLES

SEQ ID NO: 146824 - protein, 39 aa, Heterodera glycines
FFRQYLSHIFSTKLKKQHKYLMNRGKMSLTMEEESNSKL

SEQ ID NO: 146825 - protein, 257 aa, Heterodera glycines
MIAEVERLLTRKRSAPVHASFGNIDDDDEEEGEILDVSFVEEEEDNTGEAPLNPLSYLTKQSAAQQETLRHEKWAQEERKRREEEQRKQRENERRRREEEERRRKTEEEDRRKTAEKAAKEKKAKEEKEASEKKAREEKLAREKKEEQRIAKEKKGEKETKDKKAEEERVAKERKAEDERVAKERKAEEERVAKAEAERAAKAEAERAAKAEAERAENETKKKQEEEKQLEELKRQQQAIRKQKELELLKEFRPWRG

SEQ ID NO: 146826 - protein, 22 aa, Heterodera glycines
MYGVFTFMCKECRDDNFRQGNS

SEQ ID NO: 146827 - protein, 184 aa, Heterodera glycines
MVCHLGSLSPIFDPAETLCHRRRRRCRFILLLVLHDQICAVKVQRCTVLAKRLGELKALLLAILIDEFESAVPLPEIVITTLFAHEREHSIMVLPLTAALSKLLNCKPENLAEYLNNPEAVNKANAYLAGKKLKTTYQGRDSKTKEVKFGTFSVKAATETYAFEGFLGKFPKIQFRSNTHAFRG

SEQ ID NO: 146828 - protein, 442 aa, Heterodera glycines
MLKKLPKPCLIVYDDLMGDIEAKKLADLYTKKSHHNNFSVIFLTQNLFDKSMRVPRSNAQYIFLMRAPNDMLSIRNLASQMFPREQGFLMDAYRQACALPYGYLLTTRREAFLPPKMVKREQKIGERVVHNYDYFKKLGKTTSEKKRRHLLNSAGCEELLTLVEICLNVLNGSFCLSRKQKQRLAPFAKDIRQLARVRSERARETKNDDDDIAERTNLGFVKRQVTAAVQKRKGNVSERNAMYNQQLRRYLKMRKEHKERPVRVQLSNGAQLLNKTVETGVQVRPGPDEPKDKSVMVTDEDEEEEIEVPKFLTPTSQTLGSSRSPRTNKKAAKQQKLIEKKDHLLAIIMSDPQRFGATDRGKIINPKTGREFIDSDLAWSIERLVDPRPENAPSPSGTKELKRKLAQNPLASSLLNRLFVGSGFVGQVKQTRGFVPSKWTRK

SEQ ID NO: 146829 - protein, 278 aa, Heterodera glycines
MPLSPRIGHNPSYHVVKEVEIIREVITSGGPTIQHDKIIHLLTSPNNAQRQELLHNYRTKYGGADLAQALKEKLPPSEVATNSLYLALLDTPAEHDAKYLAKAMKVTLLLDLVEANRDESYRTDLAKAKTDAEKLYKAGEGKWGTDEDAFIKVLANQNLSQLQLMFNEYEKLGKKHTIEQAIKAEFSGDELSALLAIVSFVRNGPIGEMAEMLHKSLTKGGKDDMLIHLIVSHAELDLGDIAHEYEKRFKTPLEHAVETSGKTTTLKNALVRMIKGNK

SEQ ID NO: 146830 - protein, 153 aa, Heterodera glycines
MSALIIIVYTFCWFFVFKFASTSQNVTENNRKLNKSLMFIIALNLIGVFTKIIIDLILQACSVANVFIHIPYSTVYSFLTIAVYSANAPVLYIMSSEYRARFDQHFPWVVKIYGKIARSTATVMPLATPPRPWIIINNGIGPAMNGGITPRHI

SEQ ID NO: 146831 - protein, 79 aa, Heterodera glycines
MYSCLRSICNILIATESFCALVLNLGYFVSFFVVASGTKFIRYEHCFWALIVPCLFGTLAQPVMVFTGLDRVFAVACPF

SEQ ID NO: 146832 - protein, 137 aa, Heterodera glycines
MLYGLGEFAIFWGTVFFFLEFLNYLDQLNAEPENTDQIWHKKLRSWLKNTGGSNQWDSDIVYTETGTFRAYRLQVAMKNIVEPDQHKLAAKLLREIADRQPFRLEIYHEAFPFADQYLIILPSTYRNKILNIIFLYE

SEQ ID NO: 146833 - protein, 91 aa, Heterodera glycines
MSQDLFGHSKSEEWKDLDETGNDSDKLSQMYVGIRPVDKCLRIAYAKAMDMKHQKVIVMVENDNDFRTYDTKEVPVGEIIKCEFEFVVAKC

SEQ ID NO: 146834 - protein, 146 aa, Heterodera glycines
MKKFMKILRIPCKIPWNYLKWEMMLQVDNGHGFGAWAGVHSGVAQLFAHGILPNSAQKTTKAQRTTKSGGKNEFVGGKWHKKMTILKMALIRGISISAHGGLFFHLLRKGGIIRDWEIMIEGLFFKHLVDWGIIGDCGINRDWAII

SEQ ID NO: 146835 - protein, 390 aa, Heterodera glycines
LSVVCEEHYDYYHPTEKWLLGVVKWLLGVVALPFILCGLCANGMSVAIFSHRQMRQQSVNWYLLVLGFSDLIVLLGAFFVLTLPRLSEILHWWRGTAISYYSTPLYYSTPLMYSLMTMAQTTSVWMTVAVWMTVAMSLHRFVGVCFPYQSGTVLATRFVGVCFPYQSGTVLATRNVKSLIVGILFVAIFFNGCRFFEVFLNQVCRMKPINVELPVLRMTALQVCRMKPINVELPVLRMTALRQNELYRKVFYEWAYTLIMIMFAIPFTILIVVNSMVILAIHKSRKIHAKMNAHNDGIRKQELKSRKIHAKMNAHNDGIRKQELAKEISTSIMLVAIVIAFLLCNTLVAIVIAFLLCNTLTFVVNLMEKFDLNELYVLLVPWSNMLVLCN

SEQ ID NO: 146836 - protein, 276 aa, Heterodera glycines
MTGGTERGMNMQDGQVEEKGRKRAKREGNAMAFQEKMVTEIYLTRLLTMKGTLQRFIEELLEAVFSVSSTPQCPFPPCIKYLFDFLDDQAHELGITDPEVVHAWKSNALPLRFWVNLIKNPDFIFDIQKPTKIEGSLNVVAQTLMDACSTQEQHLTKDSPSSKLLFANEMDKYREWVQRYYATIANMEPISQSDMSMLLADESQEHSQEFMLYSALNELYTYVSQNKQQLPGALQKLLDTIESPPESLAPLNGALLVDAYADSKARLVQPNAQLGN

SEQ ID NO: 146837 - protein, 108 aa, Heterodera glycines
MKRPQRRTRVGRFARVPSGGTAGTAAADKKSAGAMDRRICGGSGSTADSGQSARGGRFVGFVGDQRQIVGGGSGIVRHKCQSRFVFHRKQKKTMPKQTKGVDMPKLTL

SEQ ID NO: 146838 - protein, 250 aa, Heterodera glycines
MPTERRAQLSVERPMRLDFGFDLDGTLTGEKVGEASQRPRGQDPSEWLILAVAVAFLGVFLALALFVLYRRKSTSHNRQLRYLKAQMNSIEMRVAQECKEAFHELQTNINALAGSVPQGTSFIPFLPYADYAARILFPNYPGHTHPALCPLSVDQDRALAIESGLRQLHYLLQNRHFLVSFVRSIDANKYLLVKDRVYVGSLLMVILQEKMAYCTEVLKQLLKELIRRNADGKFHPKNLFRRAESVAERM

SEQ ID NO: 146839 - protein, 122 aa, Heterodera glycines
MGASSSTAAGINGKERRKSTEESGAALLEADKRARRLLLQNGLLRRKSKAGNNTMAEDEAGGNSWQTKAHSMYDLQQMRGKSAEAEEQLQKGDDAAGHEATERQNGAGSTNGKKHRLNKIVI

SEQ ID NO: 146840 - protein, 106 aa, Heterodera glycines
MATNDRQTEGIFGVSGTKGGQHRNGRTFVAQIRRGARTAQMLWLQAGLLGRKECVSHRIAVARAENFRQQQTKHIEATDGAEAGEVGFAKWGERSHCGRGGQAISN

SEQ ID NO: 146841 - protein, 266 aa, Heterodera glycines
MVLNCAMNEMEVNKAKNMSKITNIPIPQKGFIKANFRKDLRGYRCPTPTDGLPKNRGTAPQAWPNWHLSNGLGLWPKTANASFDQTTYAIRTQFGRMRNWFHLIIEHSWRRIFGLFACGFLCSWLTFGLFYFLIVQFLVEYQGLPEENQCIANVQSFASAFLFSLETQHTIGYGTRYMTEGCPLAYAVLSLQCIFGVLLQTLLRGECELIGVQDMNVGYDTGMDRVLLLWPVVIRHIIDPDSPLWEITEDKLNSWPLELIMTLEGM

SEQ ID NO: 146842 - protein, 54 aa, Heterodera glycines
MSYAFLHIKQVNSLWLFAQFPQKHLGSGNLDSGHLYSEFVCIEEDLNSGHYASE

SEQ ID NO: 146843 - protein, 112 aa, Heterodera glycines
MFAIAPAAARVAPLFLWCTTNSAQKMVGSDIYFNQFRTRTRAKDKFILIIGLFSNGEPTTNMSCIRLIVMKNIQLENVEKIFLAMPEDYSLVRMNEKIWANNFMDEIVKLTN

SEQ ID NO: 146844 - protein, 116 aa, Heterodera glycines
MINARRSANSAAVGTDCEIVPLSPLTVIDQYYERLAEQRYSHKTIHELFNQICGTKSEAAAVIAGAEQQHSHRPSLVTVPKDLLSRWMAQFYGDATTLWMARKKLNLTQIVLCPSV

SEQ ID NO: 146845 - protein, 42 aa, Heterodera glycines
MATGMIWTRYCFVIVPKNYYLASVNFFVGCTGLAQILRIAHY

SEQ ID NO: 146846 - protein, 51 aa, Heterodera glycines
SSHFWHRTVHRPSIGCIFRLCPHIPSSPRCCCCFCYCSFSPFRGLSPSSVQ

SEQ ID NO: 146847 - protein, 97 aa, Heterodera glycines
MNEKKKRYSAEDKGKKNLKKRTPTSGKWEKQKISRRAVGEEKGQTEEKKLTNGPSSKDGHRVAISSSNKMRKGAKTPNKKQQQKSECAEGGKRRREN

SEQ ID NO: 146848 - protein, 1101 aa, Heterodera glycines
MLIRFRACQVPVIADVEKAFLMVGIEEADREVCKFLWVRDPFGPLTTSNLVPYRFRRLAFGLTPSPFCLAAVVRHHLRKYGTDFAEQLIRDTYVDNVLIPADTVEEATDKAREAKRMFSEAQMNLREFLTNDRGLNDSFPEADALGKTTAKMLGLEWNAENDSLRIVFPGDTPDGAHRSSRRTVLRTIARLFDPLGLLAPATLNAKQFFQKLWDSTHSWDAPLESDDGREWDRILASWEGQSITIPRGVRAEGGRPVQLHVFTDASESAYAAVAYLRSEGQDGRAHSRLIMAKSRLKPKKAAGTYTIPRMELMGLVVGVRLAAFVRAQLHRPIAEEHMWSDSMIALHWVRNRTPQPQFVANRLAEIRKATALTFGHVPTGDKPADAATRGFSPAQLQQANLWWSGPTWLTKPCEHWPKELTFTVDSEDGGTSLDERGLTTFVARREDTPETSTERTDWLLDRCGRWTKAVRVMAWMRRFITGTHRPRDDGTGDPRCQDTSHGRCPPVLSNEELTRAKWQLIRSAQSECQAREGIRTKVDGNGVTRLISRIGWCAEAEVSRPVILPKHSRAGALIIDDIHGRLHHLGVDGTLAEFLRDWWSPSARQQVRKVLGQCRQCRRLRGMPYPLPTMPQLPMDRVRRRIPFESVGLDYLGPTVTLDANGQRQKTWVLLITCLTTRAIYVDATRDLSAQSFISVLRRFIARRGAPSRILSDNAPTFTVVGKTLSDFGMAGDDPRHFTDSRGIQWRFTPQHTPWAGGIFERAVQLVKRALQKTLGSAVLGYDSFATLLAEVEATVNSRPITYVNSKAGEPLPLRPIDFIQENGRLWVDPPDTTGQAQDERRDPPHKQLARQWRESQQRLEHFWRRWHREYLMTLREKAGWNHAQRRVNAPGTPKVGDMVLVEDKFHPRNLWAMGRIEELRGSDGHVRSVLIRMANGRIWGRPVNKICPLEEAPPKMHDQADQAVHEPCGDDARAVETQSEVRSRNELSAAPKEEENEGNVSEESAEKRGREVEAVQPDGRVNREIRNDNSLGNGPDDPDEKFDDATTTEEMAVFEKAAEVPSAAAGETGILAHPHSAPRHEKKYLGDSSTAPGLLDVPTK

SEQ ID NO: 146849 - protein, 445 aa, Heterodera glycines
MRSTSFWQNSCGLPAPSCLFYRWAAVPSTTTVYEEYSCLEWDMQISAWVELETNSGRVESQRLTIHPGVPEQWGNMTLSVVPTSLPPMPVLSAHFITDGRAVAMGRPLPSDLHCPDEEAARGFDNCQLSISACQKCAPDHDNGTVHCHCRDLTIGRVMNDPEHRLPLDVARLHLHNSGPVVKAEFQYTPVQVHIQLNGLELVSEYSNTKCWVTSPKLSGCYRCVTGAALTASCRTDHGMALAKVKCADGTLFALHCGGNDSTTTEAIPFDRAEVFTECRVKCPAGITNFRLKGELAFLPKQQQFGFNQRDSTGGRVEPGISLSLPDWRIDPFPLLHLLLSGKGLLVAVGATAIGLAALLVFVKFSPHFRVYRSLMAMALITVVIPIVGTNSAGEVTRAKFPGTTTKAAINGLSNGELDGETMRHFQSDMGAYPHRAVAILLFGAA

SEQ ID NO: 146850 - protein, 104 aa, Heterodera glycines
MCRPLLLFVCFTVAFGILSIVAPNQALAEPVIGGPPPAPPIEGVAALAGGVQSDSLANVNNLAVDPADQPVASGVAPPKQPVVVEASQVEQAEVDQLPKSYGRK

SEQ ID NO: 146851 - protein, 35 aa, Heterodera glycines
MLYYVYYFGLTCKPRNFHENLSVKAFARGIHFPAE

SEQ ID NO: 146852 - protein, 69 aa, Heterodera glycines
VVSKLYSFFWCLSVLPPPPPPPKLIGDLIFSDWSDLIWLRQGVKKSIVRINFIFNEILIFIYFTKRKKY

SEQ ID NO: 146853 - protein, 39 aa, Heterodera glycines
MNSVHQLMCKKALKMKCPHNKHNEHEHFSNDQQKGQKLT

SEQ ID NO: 146854 - protein, 110 aa, Heterodera glycines
MVQFLDSFSFTSTCEPGGIRVRVDSRIPYTGALYGLYDFFSCRIEPKESKLFDFLFPYPHISKNCSDSIRIMGQEALLEVVLSTDGVEPLYFITADDLTYQTKCPLPEHS

SEQ ID NO: 146855 - protein, 177 aa, Heterodera glycines
MLRARGEQFEESPELQQIAVVLNSLLGRKGALANMTDYWDVATFFEVSGFKSHFGAVKFTVYSVLAEDYNKACLAAEKMAMLKPPVWFLKSTMENIKLINQCTATLQLSPVERDKKTFLFWTEFFMESIESQHIEITSSRFPVLIQELNKMLTPSYLNVNADDVRKKEGGGGYGGII

SEQ ID NO: 146856 - protein, 143 aa, Heterodera glycines
AADFSGQCLQTVVAFAGQIRRSRLNQRQLAQAEDGAGDGQKGAEMPAGSGDGMPRDRGDGGDAQRQPPSALFCFYNADIALIDFSITQQQPGTFSDRIRQALNNVTIEANAHAREKDTQDYDGIIGLIDDLERIDQKQITHAQ

SEQ ID NO: 146857 - protein, 849 aa, Heterodera glycines
EIQDKISSTNFNFFLIFQALVIIHQHAIQSDLTELHQHVCQWLAYLQMIEMGISFDCLFQWLAYLQMIEMGISFDCLFNVFEQLCAKWKPMELDKDEEHVFADSLIQFIEHCRSTISNHRRRSPSPKRSDLEAFGEIVRCFRRVLEHRRRSPSPKRSDLEAFGEIVRCFRRVLEKLFFQLVAQPQKNFSSELRELLAQSAVLHFDTIQANILQRYKAQIDALQALALLVQALNTTMARCAKFESIFRHYAQCDYADIAYEQFDLLLHEHIISKMMDEQRGALRMIMQICHADPCPTDNELTNVLHVHMTLNEFSTLRHARRCTKMDQLDWSEHFDKAIQRWLELALVKAFARVDFSLALDVQMPITNNDIRQTVSGLDTCHIMEQLLAVWERLSVHEFCLIVYFLRLVRLLCKIAKHFADQLMMRRPFENMAIHQQNQPAAQTVHFICSINSCEQVRRTLACTDRLRLDELTELYERKTKAKPNNKEFRSHNKEFRSHVERPLDACTQNMVEQIELLIDQFVRRQTALIKRAIFAIFHLVWSPAACPTDECLKPLIKLLDEELSLVHRCLMHRNFTRVMQAQNFTRVMQAQMQLLLKLFQCVNENVGLEPSFYRRLTDALAILLDFFHADGKGIAVDVFAASNEYKRFHEQISLYQMPTERLIEHFYALLLKAQDEAVKNEKTLKFCFQFVNECKYGILNLRAYYNPHSELLVIDVLSAKQIIPLDSNGLSDPYVVLELLPRVHFPDQPRLKTKVVNANLNPVFGETFEFHIPPYLPQSALVHFVIMDHDFLKANDFAGEAFLDLSEVPGFAQGGIGGSLKQFNLVLTHPSAQPSNESIVVVLASRKDD

SEQ ID NO: 146858 - protein, 80 aa, Heterodera glycines
MPISLQFLITQPLAFQKLTTNTVPTNFASLMCANIVQNHLATAAALHTDATKKRTPFSPNLEKQRQLHQQMISQQQQQQQ

SEQ ID NO: 146859 - protein, 1010 aa, Heterodera glycines
MPPLPMDRVRRRVPFESVGLDFLGPTATLDDSRQRQKAWVLLITCLTTRAIYIDATRDLSAKSFIALLRRFIARRGAPSRILSDNAPTFTIVGKTLGEFGITGDHPLEFADSRGIQWRFTPQHTPWAGGIFERAVQLVKRALQKTLGSCVLDYEGFSTLLAEVEATVNSRPITYVNGNPGEPLPLRPIDLVQENGRLIVNPPPGSSEPNGQRREPPHEQLTRQWRHSQQRLEHFWRRWHREYLMALREKAGWNHPQKRVNAPGAPRVGDIVLVEDKFHPRNLWAMGRVEELKGSGGHVRSVLLKMANGRIWGRPVNKICPIEAGPETEESDQREAPDRDPGEANEADGADKDKRESNTPFSTDERTKESTPEPEQMLGEEPPVTQRNEQLSEGRAVQGDERRKSQRNRKPRRIWSPEHRKVDKRGSKFPLVALAVMMALICPTLAWGCQPTPSLPPLEQSDPDMRTTMLPCHMECTKRGVKTSSGRRLRKAEICCPDGCWATVPTATVISYELPAEVLIHGYSCSGQCWWGSGPPFNVTQRCPAREECELINCSFCWEQLANPTCHPRWASTLFGFGAALVLAVFGCCCSLVSRFWSGATLFSRAIALGVSYPVKFINWATGRRLPQPTAERIEGKMRKGAKVARAEIRELQRRLQLGRRARAMAQAWQHPERGHGARTGVVAASLLPLLLVFGTTMATKPISVMVRSEDCSRSAEGLKCAGTAATVLTLLPSDQTNSFVIRTQQDELLGAVRLRLASITMICVPKTESWLRSYSISTTAVKRCPSAGSCRGNTCSAIRNRETIPELIALNHRPGHSFCMRSTSFWQNSCGLPSASCLFYRWAAVPTTTTVFEEFTCLEWDMQISAWVELETNNGQIDSQRLTLHPGVSEPWGNMTISVIPTSLPPMLALSAHFVTDGRAVAMGRPMPSDLHCPDEETARGFDKCQLSIGACQKCAPDHDNGTVHCHCRDLDIGRVLNNPEQRLPLDVARLHLHNHGSSIRAEFQYSPVQ

SEQ ID NO: 146860 - protein, 466 aa, Heterodera glycines
MLIRFRACQVPVIADVEKAFLMVGIEEADREVCKFLWVRDPLGPLTTANLVPYRFRRLAFGLTPSPFCLAAVVRHHLRKYGSDFAEQLIRDTYVDNVLIPADTVEEASQKAREAKRMFTEAKMNLREFLTNDQNLNSSFSEADALGKTTAKMLGLEWDAEKDSIRMVFSGVTPAGAGGHSSRRAVLKTIARLFDPLGLLAPATLPAKQFFQRLWESTHSWDAPLDADDAREWNRIVASWDGEFITIPRVARAEGAEYCQLHVFTDASENAYAAAAYLRSEGVDGSILSRLIMAKSRLKPKKASGTFTIPRMELMGLVLGVRLAAFVKTQLHRPISEEHIWSDSTIALHWVKNRTPQPQFVANRLAEIRKSTDATFHYVPTSNNPADSATRGLSPAHLQQFELWWKGPVWLATSCATWPHELEFKVDDDEEEATPAEELTSATLVAQREGTPCQKEEWPNSLLNPLQ

SEQ ID NO: 146861 - protein, 256 aa, Heterodera glycines
MVIAFSLSWVWSVLYNLLRDYECLPLLISRQEFFFGILTHCIAMSSTVWNPILYALLNLQLRAAFLQLIPECAKNVLVELCGREQTQQQQRNSAEKSRLLDINNGIKESEERTKKLLSCFLTSRGSVEVSTSSEFGKMSEGKAKTAQNALKLKTVQQKKKTKKGTEKRKDENNGRGDETKWEGSDRRKGDEAETTETAQWEGSDRRKGEEAETTETAQWEGSDRRKGEEAEEEKRQQGDGHGTAADIKEMDMDEQI

SEQ ID NO: 146862 - protein, 268 aa, Heterodera glycines
MFLNKARDVADLLMPSFNASPFGIPMSLINLRTGRTGNYGWASGGCSILSEFGSLELEFNYLSRLTGNLTYMSKCARVREYVIELQKPDGLYPACFIAGMFALQSLQENDETTRVNTLKLAEQIGHTCHESYRKTVTGIGPEAFRFSSDAEAQATRISEAYYILRPEAVEGWFYLWRATGDEKYREWCWEAAQAIERHCRVEAGYSGIRNVNAQQIEHDDVQQSFFLAETLKYLFLIFSDSTEIPLDQWVFNTEAHPFPIAHSAQQVQ

SEQ ID NO: 146863 - protein, 217 aa, Heterodera glycines
MFKSVGDVFSKIAFPMDENDRWFEQVHSQVDELEEMLTRLQTHVDSLVTHRRDLAFSDDQSSKALSMLASCEENTVLARILSKLAETHENLAIVEKHEAEQDAQQLEEVVNEHLQLLSVLKEVFYERVKGWQNWQNQQQTLTRKRETKARLDLTGKTDKAAQCREELKECENKADQMEKDFLVMSKVIREEYSRLFKQRREDIKANWGMGRNGGKNE

SEQ ID NO: 146864 - protein, 252 aa, Heterodera glycines
MGILGLPNVGKSTFFNVLTKSEAQAENFPFCTIDPNESRVAVEDTRFDWLVEHYKPLSRVPAYLTVVDIAGLVKGDVDPIRDLEIINSELRLKDQAYLVGALDKVEKLAVRANDKTKKLEHDTLLKVKELLETKFVRQHEWNEKKNKWLPKIKAWIDENDPGAVLIPFSGAFELKSVELDPEARAQFFKDTGACSALDKIIKTGYKTLCLEYFFTAGKDEVRAWTIQKGTKAPQGAGRIHTDFEKGFIMVII

SEQ ID NO: 146865 - protein, 73 aa, Heterodera glycines
MVACFNSINQSFIRKSVTPKNKEIIMSKQSIGHFWSWGGKEINKLRSDLSRSLANSFGFSNLVSLVSQNFGKS

SEQ ID NO: 146866 - protein, 364 aa, Heterodera glycines
KSIDVIYFFDTVPHNRLISKLQNIGINNSLLKWIQNYSENRKFFVKIGSDFSDEYPCLSGVPQGSILGPLLFLIYIYDLPKFCETDVKIKLFADDLKAYHVLSNISFSPLQNFINKFNQYCKLNGLKIASNKCLTLHLGHKNQKINYFIDDFQIPKNPGNEPVRDLGIYFTNDLKWAEHIDIISKKALRSAFAILKSIKTRDTKILVNLFNIYCRPILEFGSPIFNPYLKKDIEKLENVQKIFLRVIFRRNNYAAANYAELLNIYDQKSLESRRLKIDLKLFHEIILGKINLQNNESFSFSKNPVKNEYTIRTAYCSTNARYNSFFIRTSRLYRLLPKETRLLNPNEFAKLLERSDLNLLISLP

SEQ ID NO: 146867 - protein, 113 aa, Heterodera glycines
MAISGSTTTMATTTTTTSSTTKTTIAKLATTMAMPQTEMPTTTMTSTEMPTTEMPTTTTKGMGQQCQYFGPNGADIDSVFGTGQISAVLSCTTAGQWAVGNVTNIVELECISG

SEQ ID NO: 146868 - protein, 54 aa, Heterodera glycines
MPKISTHLIRTDKHEKRVFRLVSISRFFVPKNGVPNYNQSNAIGWIPLRVAIHP

SEQ ID NO: 146869 - protein, 369 aa, Heterodera glycines
MPSDTAIYVPLLKEFPTRPPYYYRTPMSLMYRITVTTFSKLQNCAGFLTGILFGLILAASVVHFVDNFDHFVLMPKMSKELKEFREQFRKIEKTYKYTYKSKRKEVENEQSKANKNTKTENGTVAVELAKKVRVFCWIFTYEKFHESRASTAQFNLTSFVPLRHVRATWAQHCTRYLFFSSKDDPTLPAIDVGMPLGRKYIWRRTRWILKYIYDNFMNDFDWVFRIDDDAYVIMENLRLMLLPHSPDELIYFGHKLHTTIFKDHLFPQGGAGYVLSRSTLKLLVERGLNDSTKCWDGDDSEEDQGPEYCSDYAISFHYTDARMLYLLEYFIYHFDAYGARTLATDRPNYFEEAMRKAFDNVGPGDILSK

SEQ ID NO: 146870 - protein, 49 aa, Heterodera glycines
MPSKVTVRGPTTRKLLVFTTIAAFSSSAGKKTNNYEQLAVTLDRQTLLS

SEQ ID NO: 146871 - protein, 376 aa, Heterodera glycines
MSTLGSAATWSSGLPTAPQDPIFFMHHCYMDYIWEQWRLRWQTRAQRETQFPSDQQVVAVARSKDSSSPEVAEHSGEKAERGAPRKAYGHSSERGGQSAEKRGQSGEQRGQSGEKRGQSGEKGGQSGEKAGGNKRKGYGYGGNNSPTTAEPPKPTTVPADEYTTLAPMYTPPKERVCYDNHECCAVWATKGACKSAPRYMNTWCPGACRYDGCLPQAVKRAAENYLFIKFIMFIKRGHFFAIFFLTTFSISKAMFMPFKVSVRLLVYDNANDIFWDLSKGTLHEESVPTLIRSAEIEIGNDRTTVREIVEKVANEFCKQQQQLLDEEGDEKPYRIMTIFEDKQLNMQIQREMDAEPNTEYTAILLLKNGQKDSVGK

SEQ ID NO: 146872 - protein, 48 aa, Heterodera glycines
MHQSLAFKIIAILAGILALFGPIDCRATHGTCVHQGRQYREGEEWYKA

SEQ ID NO: 146873 - protein, 95 aa, Heterodera glycines
MDWVKFSCNTTETQRNSPAANIAKDEKCLVEFIDKFAAANNSYVTWEQVVAFCSNIHEGLQRMALDTIITRLTANLTKLTRQMEALREEAPPRDK

SEQ ID NO: 146874 - protein, 196 aa, Heterodera glycines
HQHSNQRDSIHLHFKSLGLNPPTFQSTGLNPPAFQSLGLNPPTFQSLGLNSSAFQSLVLNPPTFQSLGLNPLTFQSLGLNSSAFQTLGLNPPTFQSTGLNPPAFQSLGLNPPTFQSLGLITGTQPSNIPINGTQFTRISITGTQFSRIHITGLNLINPSATQLPGLSSPTFQSSELNLSNGIQNYLKGIQKLKYNP

SEQ ID NO: 146875 - protein, 40 aa, Heterodera glycines
MKKMNEASRSGSKLNSGPDEKYFYLSWGKNCTDYESELKL

SEQ ID NO: 146876 - protein, 22 aa, Heterodera glycines
MGVWVRKEKGIASVHLHKWSSG

SEQ ID NO: 146877 - protein, 126 aa, Heterodera glycines
MDQRIWSSKNAKSYKSKTDEEKIEIVKKFIELTNEYKQKRKYSHIEWQQNYAEICKKVGVSHRTIKNWKKQFGISSKLTEKEKMEKMKKYWQIKIENPKMSEKEIAKILKIDRKSITNWKKQLVLK

SEQ ID NO: 146878 - protein, 70 aa, Heterodera glycines
MGVWVRKEKGIALSLRNMKLHLFAFLFLIVEITKVGTKEKKLQQKSFAEIFGEKWKKKKKKKEMRRKKEK

SEQ ID NO: 146879 - protein, 96 aa, Heterodera glycines
MAKEYKQKRKYSRKEWNQNYKEICKKIGVSRETLRKWKKQFGIRSIKLTEKEKMEKMKIYWQTKKENPKMTDKEIAKIVNTSQQNISNWKKQFVAE

SEQ ID NO: 146880 - protein, 74 aa, Heterodera glycines
MWHIPFPSQFRIPIPNASTTTALGRATGSTGWFTFVNFSSTWAEQEQRKGDRFIIWTVGNHNNDGSLLRKNYLQ

SEQ ID NO: 146881 - protein, 103 aa, Heterodera glycines
MSNEYKQKGKYSPNEWYQNYAEICKKIGVGYDTIRKWKIQFGISCKRITKKEKMEKMKKYWKIKRENPKMSDKETAKILQIDRRTISKWKKQFGGEILEDLNG

SEQ ID NO: 146882 - protein, 94 aa, Heterodera glycines
MDMEMRLLKLEQENRAIKAKLKEQKADNKLALEHQKNEFELRMVKMEAGLNERLMKMEGEHQAFQARLVIEKLTMENHQLRMEEAKKLPLQFKY

SEQ ID NO: 146883 - protein, 164 aa, Heterodera glycines
MWCHWMANGKGLLIQRWAVFANYQREPYIPFMEKACRLCGSAVTMLFFIFLVIALLFDIIVYRMFLIRVFMPAHFQCLFRDCLSRQRNKNANGFAKNGVKQLNVSTRTSNSDYMCSWTSLSFPAIQSEAQQMPNSVAATPCAHNPFNNNHFPQSDAEKYNNKQC

SEQ ID NO: 146884 - protein, 105 aa, Heterodera glycines
MTNSNYNNNNCDDNKQRDNSRSSPNDTHKNSCFSAPSECPFLSRSSCLDFSQNFFRFLPFGIFDGLDELQALLGLASLQWVNLEWCPILAEAEQIEIEANGNEMF

SEQ ID NO: 146885 - protein, 57 aa, Heterodera glycines
MFTKNVKYNSFFGFYTIKREVAISSKYHEIMKNEFPCVKFLLCSNNHKPPVVVVSVS

SEQ ID NO: 146886 - protein, 289 aa, Heterodera glycines
MASINTSSTDPFYLAYRFAGPSADLIVPAVALNLVALVGIVLNGTVLVVTVKSNSLRGSANFLMALICLCELVHQIGHTFFLVVVISGTNFVSLLTADLIMTPMLFASNCGLMAMFCAAFDRLFAVALPFKHSSIFAHYKFTYLLGHLLICVIYGAFTLNYVLAYAFENAGNPTTGVVAETLLGPVGYKFFAGTFIISFCSTCCYVSIFVIIRCKNGVTQQTNTRVLRSLVIILSINIGGYLTNLAMYQLLYAFGSILGIFLSSEYRRVFKKAFRALKGYFGNKNGIFN

SEQ ID NO: 146887 - protein, 46 aa, Heterodera glycines
NFFIWTSLFVTRNHYFGEFVTKIVKIHYFGVLSLFFHYFGIFWKIP

SEQ ID NO: 146888 - protein, 179 aa, Heterodera glycines
PWGVNPVPITADNVAERAQLLADQYRKKAQLYGHNTLLVPLGDDFRFDEDSEWTDQYANYKLLFEFMNAKKDGALSADSPSSAASLSLLPLLSGDFFTYADRDDHYWSGFFTSRPFYKHMDRTLQHLLRAADIFYTMARWESKGNSEKGEEDGEIIPQQLSQQATSTCFSTHWFGLGGH

SEQ ID NO: 146889 - protein, 141 aa, Heterodera glycines
GVEDNLLTESRFHLLLEHFDRFSSPPPSSSAEGTIAFHSLAAHHSSLRLHYPPISLAGQMDDAKEFKARRPFGSVLRHSFPCNFHPVTLRTLSHPTVYSPNSSSTRPRDEAALILHRFGIECRLGTSLGESSCPAGMATAE

SEQ ID NO: 146890 - protein, 191 aa, Heterodera glycines
MTFCQALSCARTISACLGSHLHLILPPILSVLDDRKTEEKKWTQFSVYKENVNAALVRCRVEPMLCHEYQEQLALLQAPSYARQQQQQQQNAIGSGGGVYQQQQGTFSASTSSPLFARQVSFLPPPPTQNGGATTDTSPLPDAHNGIVGFLPGPGGSSADMSRVHRMSSGNYSMPLLCPFGLNCRSGNRTN

SEQ ID NO: 146891 - protein, 30 aa, Heterodera glycines
DPFLLTNSQTLRRKIQLNCTWSPKLKRRVK

SEQ ID NO: 146892 - protein, 622 aa, Heterodera glycines
VDRFPSMYFNEVQNDSRQMKMVAYLYRKKNRNVKIEGSSNFTEHEFVINSEAIKRILDDPRYADKKVCVVSVAGAFRTGKSFILNFFLRYLRWHSAPVADRTGDWLEMELTLGGFSWRGGDDRDTNGILIWPEPFLLEDRNGEQVAVVAVLLMDTQGIFDSVSTFKNCATVFALSTMVSSVQIFNIFNINKTIQEDHLQHLQLFTEYARLALDDNNSNPFQSLLFLVRDWSFPSLLFLVRDWSFPYDAEYGQIGGQRILDKRLEVTPRQHPELQQLRHHIRSSFDNIGCFLLPHPGLDVATNPHFRGELDRMELDFKAQLRMELDFKAQLRSLVPHLFYPNNLVVKQIGGQPITCRELAVYINAYFEVFSKAELPEAYFEVFSKAELPEPKTILNATAEANHLAAVVSAKATAEANHLAAVVSAKAVYMREMEESCGGDAPFMSGAELRSEHARCRAEAMRTFQTAKKMGGPELAEQFAQKLEQDITEAFESFERVNNSKNLFKSMRTPAVLVASMIALYCCQEFFQLLGLDTIASIFSLFHMLIFVALGIWTYSRYSGQFRHAQVFIDGRVHALLHNVLAPNSARVQQIGHDARHGRFSSSSRRRTSCSPPPQPLHLKLRS

SEQ ID NO: 146893 - protein, 285 aa, Heterodera glycines
MATVLRSSAELSVESIVALFNCYVHSIFTFFCSDFDAQQQQQMFGTNFVTFRLRQFVQSIEKKMNGPGATEGGQDSVENAELSLFCRRSSLCHALDRNDSDKLFLLVERIVGVESVYVFLSVLLIFMHQNLDAFRSVFLAKQMELLRPFLEALLPKSGGGSDSNLSLDSFYRSILKQISATDWTTGEIHSQHSPYVDTIVQECSQFKQKFVRLFPYVHISDELYAAIWSMLLLCIFRILVQGYADVKKCSIEGRALQLLDVEQLCGELEEITGLRQFHNHPFILL

SEQ ID NO: 146894 - protein, 109 aa, Heterodera glycines
MEEVKMFLESETFTLCPVPVQFTLFDLPEFFFLKELQQKQQNDEQTEEETEQNSVETFVHGKSIRFSVFRHSSEMDTEIFPYSPEQFDESVRRKAQKMDMKNFFAKRKH

SEQ ID NO: 146895 - protein, 113 aa, Heterodera glycines
MTPPIGAWPLQGAPVFRIPQTFPPRALGTNQQFSQPTNQAMANYPFMLSASVPLPQTQTFPLPNALPFAMNSNGGSLTYPTQMNYAQMPAPAQNTHSEQVPKKKKNTSKKQTK

SEQ ID NO: 146896 - protein, 210 aa, Heterodera glycines
MAANEFLETGKMLLDELPGNKQAENKSDDGLKPQKANGKALEAKSDNFQQKAFEFLCGIEMKAKNDEKGNDKTKKDDNLLAFKELEEKRLNFCQNWKNGKSIWKGWKEAGISIVTSVNNLKLNQQIYGESLRTLAKMEIFNSKNKEEFGNFAKLGIDLLKKMRELVHWLWLISLIMTNGKATTHHDEGKGLFMGFFAESLAWKSVFCTCC

SEQ ID NO: 146897 - protein, 128 aa, Heterodera glycines
MSPLSFSSSVSMGRMNNSSSWATIGICPKQSSELGERICNRTGTYAYESDGTFWLSGSLKIRNAEYIYGADDVVGFGVDLANLKLIFTKNGQHLGFKFLKILYFTTLKHHPFVRFVFRSPIISFRFFE

SEQ ID NO: 146898 - protein, 155 aa, Heterodera glycines
MKDWATIGFAPKRNAKLDERIYSRIDTYAYESGGTFWISRKRQNPYEFFGNGDVVGCGIYSEKRQIFFTKNGQLLETPDFFIPPSDNDDDYDDNPLFPFVTLSKFGAKIEANFGPEFKFDLDTLKVKTAQRIFSYRTVNCKKYNKCPFFWCTVLD

SEQ ID NO: 146899 - protein, 51 aa, Heterodera glycines
MNLKFHVFKSAQNCWDANACHDDLTITGPKCLAVIFKEFGNEKHCFSQLNN

SEQ ID NO: 146900 - protein, 31 aa, Heterodera glycines
MLDLMDNEQNYGPKNLPVTFRLDPPRFLGGP

SEQ ID NO: 146901 - protein, 280 aa, Heterodera glycines
FLCPKVRTQCKQQYKQNANSRNKNSNAKIIVAKRTPISNLLPFPIGAVLLLTISTQFYINFCAANSIAMPIGSGEAADLDEFVASSSTAPLYAPPMLASDTGSSTECQNYGDFATKIGPSPMSGVDGGPPMMISEMMYEENESDQQCVLGQAEKHATRILSDILKRYDRNLVPSIKGVDVEIELLIQKQEEGAQCLTNLSLSYRMVSYIKGVDWFMMGCVTYIFFSIVELAMVGILEKEAASDHEEDDESESHHKPSYGGGGGGGAVGNFARRTFRRNFT

SEQ ID NO: 146902 - protein, 69 aa, Heterodera glycines
MTSTVPQIVLRLLLFAVLILNCFDCCHGRVHSKSSTVPTTTTKSPPAPKKGSILDKLPIWATIVIAVLI

SEQ ID NO: 146903 - protein, 213 aa, Heterodera glycines
MTTTTTTTTTTTSSTPTTPKGTTTENWSESLAAAVGGKTTLVLIIVGALIAIIVLLVVVVCCCCCKKRKRRRRHTSADDDNDKEDNKKRKRRHHTSADDKKEEDHHHIDQHNKEEEQHGKEDNKSPIQSELKVSTISAVPSDYNTNKRLGATDLDVEAEEVPKTKPVPKKPKSEGGTKRKLSNFFWSTGTTEKRPSAAEHGVEVPETIRDDED

SEQ ID NO: 146904 - protein, 58 aa, Heterodera glycines
MEGYCDAVKQYTDKDGRLAAEKKRLLSRIDAVKERIFTLLLRIRKGGTHYDCLYVLGR

SEQ ID NO: 146905 - protein, 246 aa, Heterodera glycines
MEQIGTFTDQIWLDTLAWLGREEIGWYFALVNARFAALVDTQLQQRRWYLTELHINKRRSRGSGAEVMVLNSEGAFFSLPLATTPMPDSVVGFNGTFNIWYLDVQVIKFLRRNRRLFSTNISLQFNHLITEFRAWQAMARHIWPLLRNGLRTLVSLKRKQLALMRKHVSPTVLFDCPNLVEILTPILPERPTVDNTNYAADTSARDLYMWLHMPRPDGRPKVFKLTKCNNGWDQFVNQLLSVGIVG

SEQ ID NO: 146906 - protein, 111 aa, Heterodera glycines
MPQLLRLVAGVAPLALLLFVAAVCQLSALPSESLLLLLLPMMLLIVQCPVLFVTSPSTTGSTGSTMTTTTTTTTTTTSSTPTTPKGTTTENWSESLAAAVGGKTTLVLIIV

SEQ ID NO: 146907 - protein, 121 aa, Heterodera glycines
FLQIVGKITRYGDAAIRRAVPLALALLNTSNPQLTIIETLSKYSHDADTETARNAIFALGLVGAGTNNARILAILRQLALHIQTQNTMMLLRITHGLMHLGKGTQTLNPFHSDRQLMCPAI

SEQ ID NO: 146908 - protein, 113 aa, Heterodera glycines
MTNSSSKNAEKEGGTKQARERHLHRSNVEEAEAAVVEAEAEEEEDDDDDIHYSKFADDAKLLPALLKPAFQVEQFTLKTFFELHLEVMGRRDSRAGCLRTFNMTVGDFEPDAT

SEQ ID NO: 146909 - protein, 42 aa, Heterodera glycines
MELLYTLKGGGGSRLELFAFGRLIEHVKSFRMIPRLMDLDNK

SEQ ID NO: 146910 - protein, 601 aa, Heterodera glycines
MVSRINIILANEDGESLAESVKSIRIGQREKIETEGNGDNENLLNANTNFFRINNQGQRNGNGSDNVNYPKAPWPHFEGDPLMWPAFWQQFSANAGDKNIPDVQKCSYLLMSLRGRAERAVKGYLATGENYPLIVSTLKRQFGDLKVIRESLQNELLNLPTANESVMSLRPCFEELERICRQLHNSGLNEGEDSEFMLMTLKNKFPRAIVLEILKKEKDSGKKWKLGEWRRNLNDAISLREEAARCTRSLNLNPSEFRRVFSIQTSGRRPGQNSENPRTGTIPNCFLCGKTHWAANCKQVIGREARLRIITEQGRCHKCLRKGHSKNQCTGKNCIICNHNHHKVICPKGQNNHRTGANAIELGNQNNFRQSSRMSTEMRNGNIIAFTNVKNGKEILLMTRRSGEIELIDEKPDILIGMAEFWKFFKSVSPITDKLFRVNTTVGPIVCGQLDYNSETPQFGGVVATEKCEEEPNQFWNLETIGVWDNPEEKDDEIALKMFNETVERKNNRYVVSWPWKRPKGELPTNFSVAYRRLINLLNKLKLTPNELKALNDAFQENLKEEIVEESKILGFNEHFLPHHCVFASGKNRGLCMTHPPKSEE

SEQ ID NO: 146911 - protein, 31 aa, Heterodera glycines
MTASTRGQSPAAPDRFGEKAGPARMVLNRVR

SEQ ID NO: 146912 - protein, 53 aa, Heterodera glycines
MNVGKSAASPRPWSSHTHSSILVHWAPRVVPLAQRHSSHCEWCRPRRVGTARA

SEQ ID NO: 146913 - protein, 89 aa, Heterodera glycines
MDVGFIINYSENQVIKVFICKVKKNTKKIWGLNGIHILKICTYGAKLCHEDSIKNGTLELNAFIWHPPLLCTKHPIDFLYRKLTKYGKA

SEQ ID NO: 146914 - protein, 104 aa, Heterodera glycines
KWPTSPIRESIAPCRTVDNSNVQFPICPLCQQTVPIKRGEKPDLRVNEHIERDCRSELAKKGRWAPKCGVKNCFRREPKNVSSKSAAEQMDALFAAQLQREEYE

SEQ ID NO: 146915 - protein, 49 aa, Heterodera glycines
QWALMSPGLRTVHSPDQQKYFKVRFTRSSVKSNIFSGFIMHISQKLNHF

SEQ ID NO: 146916 - protein, 105 aa, Heterodera glycines
MFAHCSTKTTTKPTPFSRTDKALSFVPRRPRPFRHSSRTVHTPAERTNAHKKCAGRRRFCRPSAGDSTAEGNGNETEPSQTEGLLQSDQNEVAKSMTKQQQNGQI

SEQ ID NO: 146917 - protein, 33 aa, Heterodera glycines
MRPTECDADDGGFSAAFRLGTSGAKAPPPPYRI

SEQ ID NO: 146918 - protein, 41 aa, Heterodera glycines; identical to SEQ ID NO: 139690

SEQ ID NO: 146919 - protein, 117 aa, Heterodera glycines
PAVVVMGSCNNSRCTMYSQGRLVGTQLSLAFSVTCRGPLLGPGCDLACNSSAANPSTAICQSRRTGFFSLCRWINGGQVSDCKNCPWGIKENAYCADGEGGVLEPNHAVRKFRDFHF

SEQ ID NO: 146920 - protein, 84 aa, Heterodera glycines
MPPPPPPFIHRHNEKKPVRRLWQIAVDGLAAELLHAKSQPGPKSGPRQVTENANDSLFGEINGWYKKCHGMSKKKRKMPMNNGT

SEQ ID NO: 146921 - protein, 22 aa, Heterodera glycines
MAISFFEKFSMQQTLSNMKRSA

SEQ ID NO: 146922 - protein, 29 aa, Heterodera glycines
MAISFFEKFSMQQTLSNMKRSAKNGYLFF

SEQ ID NO: 146923 - protein, 29 aa, Heterodera glycines
MAISFFEKFSMQQTLSNMKRSAKNGYLFF

SEQ ID NO: 146924 - protein, 29 aa, Heterodera glycines
MAISFFEKFSMQQTLSNMKRSAKNGYLFF

SEQ ID NO: 146925 - protein, 69 aa, Heterodera glycines
MWHGTAAAGQQRLDKSVHNSDSVRLVQRAVHVDLWAQIMHNDGDGTLFLPTKLDNLVIIRKPLIRRSLF

SEQ ID NO: 146926 - protein, 206 aa, Heterodera glycines
MDKNLKELQNEFCKSFKTGNFQNAMEMFQTTKIEKKEFDKSQMDTVLAKDQILNENNKRMFAKFVNFSSKMIEILQNLIESIKLPTFQQKPNFFMARRKKRASVFGGCFFGLLLALIATVPFYGYNSTFVIFYNNGYSKLVIEGNNLRSNEFTVYSDHYPDHNNINPWHTLFVIFALLLTIGAIFALMFCSCFYCIYRVGSRIFSA

SEQ ID NO: 146927 - protein, 99 aa, Heterodera glycines
MPIAFSCIHSMAELAPKFPFFIWLNKLVAWSTSLLASLSWSKTDKSSDAIKSNMSIRAARKWIYNYGNPQSAIAGVQKPRNFRNPQSAIACSPDEYRMS

SEQ ID NO: 146928 - protein, 82 aa, Heterodera glycines
MSFPLPLRSFEMGICKDWSTRATFQHAYFGPRFAIPILALLLLCQFWLKDRYNNERVGKWRGREKHKSKTKIMQILGGTPPE

SEQ ID NO: 146929 - protein, 135 aa, Heterodera glycines
MGDASIQRLTDILQQLLNAHQQNAPPAENASQLPTLPDVECFDASQHSGCEIEDWLKRFKFALDCAALNLQDELKVKLLMTKLFGPTFSEYCKSVLPREVTDFNFVETAEKLKALFSRPQSVWIDRYECLCVSAR

SEQ ID NO: 146930 - protein, 307 aa, Heterodera glycines
MSTGTRSSNRSQRECWRCGGKHSSRECRHQETVCRKCKRNGHLERMCAKHQAWLKKNGGKKEKAVNNIRVGGVFLVKDENQRKKGMIEVPIDVDGTNVDFIADFGTEGTILREDTVRKIGALKLSRCEERALYHDGTTRPFVGKGNATFSFGNRSAFGHFFVSKDGSKNLLGMDMMDRLGLSDSIGLKDKFQTETAKMNGVSKKKVKKFFGKHGRGKKQNFAVGANVIASLGDEPWRAGRVISQKGGTYDVQFSDGTTGEFPAKSVQPYMPDEDENFNFLLDGFGLKSASSGGSVGKHQIGSDGRRD

SEQ ID NO: 146931 - protein, 318 aa, Heterodera glycines
MLAQVYGTHLGLLHRMRKQWQSANANTKIHQNKNERCQFQKCLDALYEYLFREHIGHNGAVKPIFLYSTYDNSDRCFATVFDDIKCMARVSKIHFNWPFGEDNEERMAMMFDTWESFDEPPLILNESALMGYFKATNAKRSQQKVQQTEQSQHRDGPRAIARAKFEKTMEKMYRKAVENKEKMEQNETNEKIFLLGNGQLLDMEMGQPSSSSLLASSTSSSLASKSADKKSKSADKNLGKKKDAAILHLLVYKVESVIDDEAFLMFVKGQSNFMYVLEYAFDTVTRHNLRQTVDETNKIFYTQKYVKHLGSLHLMRRD

SEQ ID NO: 146932 - protein, 20 aa, Heterodera glycines
MFWAPPACPTRLDSGELKYE

SEQ ID NO: 146933 - protein, 22 aa, Heterodera glycines
MNTMPSYCIIFFGVLLLAVHFY

SEQ ID NO: 146934 - protein, 286 aa, Heterodera glycines
MCDFGLFPSISSSNVIPMETSALPDMDELLDRLENEPLQLVVELPAQSVAIKNEFSPNSNSNSDQQNSIIEQEQQQREKQVGVTTCDNNEESDRNLQNIVPKREEKGACLEAHGQIVPEQDKETPIQFQCLRLVHDGQSENRIHTAEECILAFKDGYETNKKNDEDIFDQIDQMAAQINAEELDQEIEETRDEEIVKKSDLESSYYHDTFPMKSQCLEKFVEEMVDSVLQRVLEEAIDVNEKNGQNPTEIKEEMEQCDGETDRGQRKADEAQEARETEAEKGANFE

SEQ ID NO: 146935 - protein, 145 aa, Heterodera glycines
MSRRSREKRMEEEAQSLLILKADTNQTQNECRIWSVELRSDGFEELVRRELAEVARELCDTEKERREWTIALRRNFHLRIERGRICAEDQFPTLAVSTRGLASLGVDELFLAFHFDPSIFAPNEMRFSDDSALSIVHKGSVNIWP

SEQ ID NO: 146936 - protein, 104 aa, Heterodera glycines
MARLSGCIVAIRETTTVIILSSWALDDIRQIVAGNRNMVGWALDQLSAAADADEEDGVTEVSGGMDVIGVSFLIFDGALRGSEQLSVSLVEDGLVVRLNADLME

SEQ ID NO: 146937 - protein, 111 aa, Heterodera glycines
KHVTAVRDNEKGKRNDLNLLASSYLVQLAKRNVKLWELNEFADTKMTKTQSLVKANGTASGGGGGTTRKAVLNDPRQRHIHREELPTMPLHRPRQPPLNGVDRPYAVVEVE

SEQ ID NO: 146938 - protein, 81 aa, Heterodera glycines
  unsure (1)..(81): unsure at all Xaa locations
FLCYESPGLSGTVRAGSGRVDTINVCNSTKKTLGNQEHSPYRKGISCSSSVTVHPRCCSGNXTHFSVCEESLRRRYGLAKQ

SEQ ID NO: 146939 - protein, 104 aa, Heterodera glycines
MHLGNCPWDRLGCSKCIVVAMSKDDESSVDEPTPPPAVVPIVVPAELLVDETFVWCRWLEKRRRRMTADGITSQANSEAAAVARLPTALSWEESWESEQLPPPK

SEQ ID NO: 146940 - protein, 41 aa, Heterodera glycines
MALNTSNLMFLIATGFVGEQCCTKWMLNLGTFEHPFSDRTI

SEQ ID NO: 146941 - protein, 195 aa, Heterodera glycines
MSELVAECLQFDFSEIPNIFAVFSECLKLKGPNAIRWAQNQCQEKEDEQNASALDLRRMMGDALYKIRFPIIAERDFSDYIFPTGVLDADDALSVFVSYSNSGHTNAKFSIHPRVMQNTGGSRGRLTLDIENFEDFLMEDEGKRESVVKVIRGLPWQFTVTAKGFPEVVVKYLDISIQCNAQNGDFCVLGLIQNF

SEQ ID NO: 146942 - protein, 37 aa, Heterodera glycines
MSKKGCSSGGMFCTPTPLRLYYNNYFGRDEIVNVKKI

SEQ ID NO: 146943 - protein, 168 aa, Heterodera glycines
MPNFDLAALILTDKKHSFDRCIDQKVVEFLRFNHQIFDEKGTELSLKIYSSQNANVTPIWSVFVREIWPIFATNIRHFAFPNSDHLSKLLFLTSPTILTDLNQLNSIQSVDLFPDVLGDDDGPNAAYCARQALFKWLHTPRKDEKPKRLSCIIYFTSQIKNRINNFKE

SEQ ID NO: 146944 - protein, 152 aa, Heterodera glycines
MEQELSTAVISSAIRENQQQQQPLCSFVKTSFGRRRHCWICSDVLMDIFPFFDHAQLGLKLALISPRFDVLVDTHFNGKNELKIWRPIAIHNMGTTTKIEKLGIFTKFVQFPIPQRPLHNKIRFELLEIDKCKNYFGAKIIVERENAKMREC

SEQ ID NO: 146945 - protein, 127 aa, Heterodera glycines
MEHRPHADEQKRQRARDSTIQRLRCRLQREQVHARRVAGAWTAACNYDGHGTNQGDVNFECARNRPRGRSWGSWQLEMGTFATFVPPENYAFPPPMVNGCQRAGAAMVRSQRTSAPKSTALKRSKTM

SEQ ID NO: 146946 - protein, 128 aa, Heterodera glycines
MARCPFLYIILIPLLLLVLINFPPILAWILKRDDVLLAYSPNELTTDETKIIGEKQLCPAREWSLEKTFGLPIEPNSEFGKMLPGLSTEFNHALPGIGKSLEYILCTFDKMHCRQVKLASFLETATNK

SEQ ID NO: 146947 - protein, 24 aa, Heterodera glycines
MPFWAESVDGGVVTKIERTPCAIE

SEQ ID NO: 146948 - protein, 41 aa, Heterodera glycines
WGQRCSCCGRSCGCGRKHCLNLLPIVDTCVLKMIHAAWHAS

SEQ ID NO: 146949 - protein, 263 aa, Heterodera glycines
FAMRHYAGTVRYNVSNWLEKNKDPLNDTLVSVSNMKNAKNNLLIVELWQNYQTQEEAAVAAKSGGGGKKKGKSGSFMTVSMLYRESLNKLMSMLHKTHPHFIRCIIPNEKKQAGMIDAALVLNQLTCNGVLEGIRICRKGFPNRTLHNDFKVRYGILAAEEARSSTDPKVASGNILNKLVDNKELEVEMFRVGHTKVFFKAGVLAHIEELRDKKMNELITGLQCAIRGYLTKRDAARRKRQWNSYDIIQRNVKSWCAVGSLIM

SEQ ID NO: 146950 - protein, 155 aa, Heterodera glycines
MKETLAKQEQTRKAVEAEHAKVAEERKKLQEDLERTRKGGSAIESEVMNLNTAKVQLERQLEDAKDRLEEQRQRAEETQRNLKRAEKEKDSLNEQIGSLEHNLKRVEEDKKKMDDRIKENHEAIAQQDEAIAAANKERRRAEEENRRMGEELQAN

SEQ ID NO: 146951 - protein, 96 aa, Heterodera glycines
MEKNKKKLESEVHLVEEHIAEMQKQKGDTEMRQQRVEGEIMDLNGKLEEQNGIVGKLQRHLKDRQTRLVELEEELEQERNRQVPTVNYLFLLAFFD

SEQ ID NO: 146952 - protein, 36 aa, Heterodera glycines
MKLIWLTFLPYFCFAAVEVQYKCELFGDDTALPKSE

SEQ ID NO: 146953 - protein, 35 aa, Heterodera glycines
MEMPICAFLRARKRTISLCGCTSHIQAERKFSSFS

SEQ ID NO: 146954 - protein, 346 aa, Heterodera glycines
MTEIKNKFKHQKIWASVDETTDSRGRYVANLIIGILDGKLHKPHLVAAKFLDKTNHETIARFINDNLRELISADDLLLLVTDAARYMVKAAQGLKIFYPNLIHLTCLCHGLHRVCEEIRGLFPNVDKLIASTKKTFSKAPSRLAKFRERCDLPLPPRPIITRWGTWLNAADYYCQNLNQIGAIIRDFNPSDSDAIRQSQIAFDCSGIRGDLAFIKSHFDILPGAIEKLESRNLTLIESLDLVSDVGNELQLVPGNVGKLVREKFNTVLRNNPGFDRILEIGMVLRGEDVQTRLPPDVIAMFKYAPIQSCEVERSFSAYKNILADNRMSFTPENLEKFLICNTHKKK

SEQ ID NO: 146955 - protein, 119 aa, Heterodera glycines
MCGEWMRTGMGRDGKGAINEQKAKVQNNHKDNRLRANIINYQICKKIVLNKLINVISMASLNLNLIFLKESETKVREHSKIEARECRDGWMRGGMPHCDQWSQCSVGLRRVIYFSHQYK

SEQ ID NO: 146956 - protein, 37 aa, Heterodera glycines
MSNNLSLYLRDRSCAAANNEAVLWDGDVDIYKYHNLL

SEQ ID NO: 146957 - protein, 167 aa, Heterodera glycines
MVEKGTEIQTYRNELKSFQDEVDKAKNTTLEHVEKNDLKEAKKSADVAKGIAKQAKSKYSSTLEEYNDKSEKGYIGIVNRLNEALGEHIKRKDIENRQVSEAEKGPQKRERLANEDVQFQYDSIDQKFIVYLSAAVSHIDLSKHLAYVLGFKNTGYFMRKRRIICQI

SEQ ID NO: 146958 - protein, 120 aa, Heterodera glycines
MAANPTIDELTKLLAKQQKLVEQLLIAQQTNAAPAQSTQLPALSNVECFDLDDQSGKNIESWIDRFVLALDCSSPNIQDQLKVKLVLTELSEGAYNEYSKFCLAKKATEFDFSETSAQLK

SEQ ID NO: 146959 - protein, 1378 aa, Heterodera glycines
MAANPTIDELTKLVEQLLNAQQTNAAPAQSTQLPALSNVECFDLDDQSGKNIESWIDRFVLALDCSSPNIQDQLKVKLMLTKLGEGAYNEYSKFCLPKKPTEFDFSETSAQLKSLFAKPQSVWIDRYECLRASKQDDEDFRSFVNRHKRLLRDFDFKKLNEEQFNCLMLLIALKSPKDAELRKRILGKLTADGDKAKYENVVSDLQMFLSTIAEAKAIERPSHSNVLAINRRPFQKREPNKSPTQPTCWRCGGGHEPRCCPHAKATCRKCSKVGHLQNMCARHREWLSKHSRKPTQGKQMNALQLGGISVNALNQPSRLVEAPVDVNGKPINFVFDPGAEITVIDEEAHLQIGRPRLILCSESAKYHDGTECTLLGKGFATFTFGGHTHQGQFYVTKKGSLNLLGIDILDAFGLLDTFRAKVKMAMKVNVVKAGGKDRMKSQIPMKKDTTLLDLQSNFPHVFAEGLGHCTKAKAHLELKADAVPVYCRPRPVPFNTRLIVEAELDRLLAQKVIRPIDHTRWAAPIVVVKKANGAARVCADFSTGLNNALLLNQHPLPLPEDIFSKLNGGRIFSQIDLKDAYLQVELDEKSKELCTIATHKGNFQYLRLPFGVKSAPGIFQSIMDSILADCQFAFAYLDDMIVVSRSHEEHRKHLNEVFKRIGNFGFRIKPDKCFFNQRQIKYLGFVIDKNGRRPDPSKIKAISEMPVPTNVSELRSFLGMINHYQQFVKNMRFLRQPLDELLKQDVAWVWSTECQNAFDKIIEVLKSDQLLTHYDPEKDIIVSADASDYGIGAVISHRFPDGSLKAIAHASCSLSPAEMNYSQIEKEGLALVFAVQKFHKYLFGRHFVLQTDHKPLLTIFGNKKGIKACTANRLQRWALILLAYDFEIEYQNTADFGQADALSRLIAKTPGPEDEFIVATITESPNLATVNAFTAQFPIVHEDIVNATKADNLLQEVKGFILNQWPNKANMSEDILQFHRRREALSFENGCIMYADRIVVPASLQTEVLKMLHRGHPGMKRMKSLARQHVYWPGIDHQIEEVVRKCEPCATEAKAPRKTELNSWPKAEGPWKRVHMDYAGPFFGKMYLIIVDAHSKWPEVFEMRSTGSAATIEQLRSLCARFGLPETLVTDNGTQFSSNEFKEFVKENGINHLFSAPYNPMSNGQAERFVDTFKRACRKLKKEGAQNVVNTFLTSYRTTPNDALPDGKNPAELFLLRKPRTTLDLLRAKPSAPLIRDEAMEKQFNRRFGAKPRKFCLGDKVFARHRQSQSWRAGIVSQCQGVIYEVKFPNDTSNRFHANQMTARHTDDDDHGNEALNIFNDAFGLPLAPPDGPNETALPADQQAAPAQETDEANAERGHVRVDRPQRNRRPPQRYSPS

SEQ ID NO: 146960 - protein, 54 aa, Heterodera glycines
MTNWAPLTMPFRDEGQRFSHHMLYMPLSNLQRRIRLFPVMWPLLSLTMPFELDR

SEQ ID NO: 146961 - protein, 72 aa, Heterodera glycines
GSLALNNFERHKSNSTIKQDEITYRNRIFVNEKRLKILRMCNWPNCAVRDECKARFDEIATQNGVFGITRAA

SEQ ID NO: 146962 - protein, 207 aa, Heterodera glycines
MCLSRLGQIIYGGLALVTIVLICVSMFTDGWRKLNSSSNATGTVMDFVENPTVNMGLMFCKGPTMGVNGSASADGASVAHNEKELVDVCKEWFLVSSVDQLPAQFVPSPQNKPDWEKFVVGAMVVSLVLACLAFIWNLVTFCACFCHSHVMKPLPGLAGLTAMCLAVALTVFYMKNQQYIRNSRCLNLGIKQCFGFSDDEGQTVRQH

SEQ ID NO: 146963 - protein, 145 aa, Heterodera glycines
MVMCTSSDISGKGLFYTISFNRSVIMHILLIIIYIAIVLVLKFKNVESEEMRVGRRSDQRQINYLLIIHLFAHLIRHNKRAIRTIGPFGLLGDQGPIPKIKTLQSWDNPSPPIPLWHGSSRLTETTNSKNFILEFIELTPNEIAF

SEQ ID NO: 146964 - protein, 44 aa, Heterodera glycines
MKKCMKIRQKCHGIRKSYKKIHQMLKKRKIEMKNLKHSSQIVIP

SEQ ID NO: 146965 - protein, 104 aa, Heterodera glycines
MSEAKKAELDADNEPTNEKTALSEELNDQEILLISTREALHCFYCQKSEVATPTEVLIRKDGTGIEIVEALARRISKSKNWTMSEEEIKTFFENPMADKKQTGR

SEQ ID NO: 146966 - protein, 225 aa, Heterodera glycines
MGSQSHSSAVASSNSGAASSDSGGEKAETEDDELSGGGAAGDDEEDDASPCECVQCEVFGIFVLFGSPRKNSNFGGFDCFLVNPQQGFDVPSNASSAGLDLIGSAATLILSQQQQQQMIRQGDAAEPSADDLLRADFSMPKLREFFECQKAMGVPNFPEDFDEFWLLVVKARLFNVFKYRGPEAYNRIVLKIRDIAHQFRAQVEENEHSDGTENPKRGKKVKKEI

SEQ ID NO: 146967 - protein, 27 aa, Heterodera glycines
EAKECTGSLSNREILTEYSAKNGFDHF

SEQ ID NO: 146968 - protein, 208 aa, Heterodera glycines
MPSSLSFPSTFATLPLFSFVRAQLVQPCRPRFRFRCPTSPGLGNGEIGPKRGVFRTPSDRKLPTRKVLENGSWASDGAKYPHFCEPIRKTEVLGVEERRKVQAELALGSRENIASAKVRIECIVEENYKLLPTQEKAEIRDSACGNAVATKKELQQEISKPLWLTYRGRIAHEESDHFQELFLLECTDVMALFSSPRQLALFKRTETI

SEQ ID NO: 146969 - protein, 150 aa, Heterodera glycines
MKLFPLLLLIILFLIVKIGSEKKKLQQKSFGEIFGEKWQEKEEEKRNELKKREIIGKFYKIKEKIKQKGRKHSAKEWNKIDGKIAKKMGTNRKYIYKWIKEFGLQKNKSYKSKTDEEKIKIVQKFIEMSNEYKQKGKYSPKEWEKNLCGN

SEQ ID NO: 146970 - protein, 189 aa, Heterodera glycines
KWEEKEGKQRNEKNKREIIEKYYKIKEKIKEKGRKYSEIEWRKIEVKIAKKLGANRQKIYKWIKEFGLQKIKCDEEKRQIIQKFIKMTNEFKQKRKYSRKEWDQNYEEIGKKIGVGYRTMTNWKKQFGISNKRLTEEEKIEKMKIYWQIKKQNPKMSEKEIAKIMKIDRTTISKWKKQLGGEILEDLNG

SEQ ID NO: 146971 - protein, 70 aa, Heterodera glycines
NARKWTGNGTCEVHEGRLWHLITLISFSETIVGNSRFILLLYVLHNLCMLFYLYKFCTFSIFINLFIRSL

SEQ ID NO: 146972 - protein, 258 aa, Heterodera glycines
TAGEQRICGERTENNENHTKETYFSHKERMFPELDGTDKRLIPTEQFLMACQGIAEFVGFLGMAFVPVKNDIAGNVHKVRTKFVGFLGMAFVPVKNDIAGNVHKVRTKFETDRKSMEVLQDLVDIDLMENGGKIGTATEGLLWLKRGLEFMLELLKALVRDYKKARTDAKTENLADILNEAYEKTLKRHHNFISKQLFKVVLYAAPRRRTLLLAVAYGHEGLEEICVEHIAELLTNFEANVSALVDYYHSKKLEIPPP

SEQ ID NO: 146973 - protein, 84 aa, Heterodera glycines
KNAQAAKTEIEKMQGREKLSKEELAKKAMHALLAVRDEGAAGQRVEMAWVGEDSDGLFTVVPKESIDKWEVTVLAEINSMEQDD

SEQ ID NO: 146974 - protein, 66 aa, Heterodera glycines
SAASPHVKSYVALDAAGECQWLLLTSANLSHSAWGKLEKGGTQLFIRSFELGVLICAKDHLRRQSP

SEQ ID NO: 146975 - protein, 53 aa, Heterodera glycines
MDSDLLNPEPWTQIGILNLILTRPNLQKKHALMFFKIDENTLSAFSIHIEYIF

SEQ ID NO: 146976 - protein, 130 aa, Heterodera glycines
MQITGTQISGISIIGTQPTSITITCTQTQQSIDFYRITSLGLNSTTFQSLRLKPRHLNHWTQISGISITGTQISGISITGTQTTSIPITGTQISSISITGLNSPAFHLRDSISPYECKIEKMQMTNFLLI

SEQ ID NO: 146977 - protein, 110 aa, Heterodera glycines
MPRANDFAFAVLACDSLLITAQTSTFSWWIAYLMPDDATILYNSDFIQSLVMGVEAMAFLAAVVPIGHIQSQLRRQCYHWHFPLDVVRCGAYLEHFHEEWTTNEQFFFTK

SEQ ID NO: 146978 - protein, 97 aa, Heterodera glycines
MDVSLCYCIKHDKNELFRANLVSNRTNTLKVGGPKFVKFFSLEKAFVKELRHSKMNYLEMIIRTNFACTFEWETLSISVGNRKRILRRKELNLDLNI

SEQ ID NO: 146979 - protein, 46 aa, Heterodera glycines
NRLVDQAFQLVDKFCHVQHALQLFDARGHRPTPFTAQRRSGHFMRI

SEQ ID NO: 146980 - protein, 69 aa, Heterodera glycines
MGDVKEYIKLFNTIAEPSGDFGDAMHKIGRISEKAAGLIGLSAPVANLLASIAHTELFSELFKHSYVQI

SEQ ID NO: 146981 - protein, 27 aa, Heterodera glycines
ESFDALQRTRTIYPPIELTMRISPFSS

SEQ ID NO: 146982 - protein, 61 aa, Heterodera glycines
MIVLSPAFLVHEKLVLPHEEVLLALSEFRRDIFKRLDYLEMKNFHLMRDFKLSQYLTQYTF

SEQ ID NO: 146983 - protein, 123 aa, Heterodera glycines
MFWPIVAKLYVNETLKKQQMPIQISNFNSTAQIIKQALDQRGSYSFFNNILIGENWSGDEWIFTDFDGSRGFTIINEYGINVYVFRCKSDYVRLLKAKQWLLDHRKQIVSVIDIFKIEQLRII

SEQ ID NO: 146984 - protein, 103 aa, Heterodera glycines
MTSSPAEQLREATDAAFDSVAKAVEAKYHQREEQKVKQYQEEREEWERRMAETRRKFETERHNFEQKMRMKREQQTEELAQMEQQMDEQRHKHCREREQQQQR

SEQ ID NO: 146985 - protein, 172 aa, Heterodera glycines
DPFSFDILRNKEETNLSKSFPISQRIMRTDSTVHKSTDTLGFGIFEISFLRFGPFHKIQILKDKARKNKNNWQLPWKIFNILFLRCDEPVQKMPSIKSLAERRLKFQHELRWSFDVHENKKLSYEDRIVGRKPQTANSTPTTNSSYSFSGYATAVKKTLPTDGSADSGLNIR

SEQ ID NO: 146986 - protein, 72 aa, Heterodera glycines
MWHYCLNSAYLLFLITLNTISGSVLTRQRRQNAKITAYNEQYAKTMAALSAGAYALSPNECIRRQFRIEMNI

SEQ ID NO: 146987 - protein, 60 aa, Heterodera glycines
TFPVTFTGHSLGGALAAIAAAKCVALGLRMSNQVTLYTFGEPRVGNAAFASRFDQLVPNR

SEQ ID NO: 146988 - protein, 113 aa, Heterodera glycines
MYKKNKINRSQQYKDECIHLAYADKLDPNKCVADVQKYCEQCARICKERVEEVKHKKRENCEGGGPVKLTNAVNCICKWESVLFVHYCVAPEAVRMALNAAHKYGKIGDNNSR

SEQ ID NO: 146989 - protein, 248 aa, Heterodera glycines
MLGSNRRSRTEQVRNHTHCFPVHHRLLLSPILPYLCAAFNAIRTASDAIYGICQFDRSATFAIFPFLMLYFFNPFFAYSGTLLTIFLNISNTLVWIKLIRGKLGFMELDELLVEEINHPVPPVGLSQFGTALRVSPDRKCNGGASPQEPCLCDRRNSPASFISGDCWLAVYDLLPPSQLGLGIATISLRYDYYVDENFKTRKWALKFMRIQSKIGANGMEMQIVNSVGEELPIPQFDVPPKVTGFECI

SEQ ID NO: 146990 - protein, 43 aa, Heterodera glycines
MLERKKESDNGGGGGGGMHGPLSLGGDVCEETDNFGSGVGGED

SEQ ID NO: 146991 - protein, 80 aa, Heterodera glycines
VLTKWIVQNGTKDEWAVVFYVSAVVAALPVVVFSMWGSDQPQLWARSSSMKRTQNSIASTITTATTISVKRKECPDTAKI

SEQ ID NO: 146992 - protein, 189 aa, Heterodera glycines
QIIFKIIKYICSAVAIGCITGGRQLGTLFILPVAGALCGNFHFFQNWPLIFHLSSLVAALAAFLWLPIGADKPSKQCCMPNKERLYIESRIACEHIGKRTQSRRVPWHKMARSVPLWVNVFSLICHEYPLVIMLQFLPNYMRDVLELAPTQNGLLSALPILFLLASKWVSSSLSSWISSRLRNPRDFLC

SEQ ID NO: 146993 - protein, 174 aa, Heterodera glycines
MQFHQNETSDKAHRMEQPQKQEGLQIGALEFVLTMERFPELKGTEGPNEIRKFFKKISSATGGWPENRRISALESKMSGKAQRAFDAAMKHRPKNFNEICRGMEGILSEWDCTEMRAFNELWNEMKRRSDESLDEFAERLYGIVECAYPGLPSNFVDDFAVKHLIRAMENPEIS

SEQ ID NO: 146994 - protein, 59 aa, Heterodera glycines
MDKLNSVETVGMNKTKKRHLGTFYYKKSDIQRSAGLKILVRLLNIFLSSIVLLSCCVKH

SEQ ID NO: 146995 - protein, 144 aa, Heterodera glycines
MNYYFIYKIFALIALHFTFAIPNVVKAALKSDDKFVTFVMSLPHMPKYHDEWKKEILDEIYRTPVAENSYDFEAHLGILFLMKEHWHCVELRKEDGEICRKYRRQALVLYEYFLRVYHQGQRKLQGPRCNSARDEIARDSRARL

SEQ ID NO: 146996 - protein, 77 aa, Heterodera glycines
PCTSSAGQQPRPRTTSSAIGGGGGTADELQQEKKPKMISSDTPIPRKVRRALATDDGGGDKNGAAERQRERRTKFDF

SEQ ID NO: 146997 - protein, 88 aa, Heterodera glycines
METFGLFCVPFYGCTPFFGQKSLRTTESQCQPMEEAIADMPMDDDEKEDEDDDDIDVESVLVHQKLQQQQQPIASPPPPLICRQLHRL

SEQ ID NO: 146998 - protein, 24 aa, Heterodera glycines
KKLLGVFSPHRGSRRALCARFLNL

SEQ ID NO: 146999 - protein, 98 aa, Heterodera glycines
MQKVQIQFFKTREKGEKLKVRGQMYFKARPLANGSISWRCTEYKTAKCNGSLQTNDNKKTIAFFKDHTHGPSNVHFVLSHRVVNLIFGPKRHKVGIFW

SEQ ID NO: 147000 - protein, 39 aa, Heterodera glycines
LFNEYCSKIINECEREVGHQIKDLKYKNSLIVCNCNHLI

SEQ ID NO: 147001 - protein, 18 aa, Heterodera glycines
PYRDRDLSFSKSGTGNRD

SEQ ID NO: 147002 - protein, 158 aa, Heterodera glycines
MCAKHQAWLKKNDDRIKDGKATNFVRIGSLMLENGTQPKKLIEAAIGVNGKDVEFVMDMGTEVTVLCKESHRQIGSPKLGHCKEKAILNDGSTRRFLGKGFAKFSFGGQIKKGQFFVSENGSKNLFGTDMMEKFGLLDGFKKNLKGEVHRNISLSERK

SEQ ID NO: 147003 - protein, 45 aa, Heterodera glycines; identical to SEQ ID NO: 124527

SEQ ID NO: 147004 - protein, 53 aa, Heterodera glycines
MTIVTPLWVGAMDGHFEVCQALVKHRADVDLGAPQFGITPLMAACENTARLDT

SEQ ID NO: 147005 - protein, 84 aa, Heterodera glycines
MLLALFLLRTTSRFNSRLQLCLDGRLTYKVIFQKVSASRSSLSPILNCTHSKRQFVKTVQRLDSSRGEGDKHRVERQFQMVSQG

SEQ ID NO: 147006 - protein, 32 aa, Heterodera glycines
LKLSPLLRMINQTKYIFKINGSFGRTSFHAIT

SEQ ID NO: 147007 - protein, 32 aa, Heterodera glycines; identical to SEQ ID NO: 125154

SEQ ID NO: 147008 - protein, 51 aa, Heterodera glycines
MNDIIHFMKRIHRNENYKIIEVVRDAHCAPQTNRTVYPGWNMGGNRESHDQ

SEQ ID NO: 147009 - protein, 131 aa, Heterodera glycines
MDFHVILFPSHKKFLSILKNSKYLICLLSTLNDPFCVLYAARAKGQSDLRIPCRPASNGTLIDKRGTTARLFELTFNKHNANEGIASVKTLNKFCAKIYSGSIPRDWREMVGRDPDSGSEEIPLLIIPDEI

SEQ ID NO: 147010 - protein, 147 aa, Heterodera glycines
MASSANHSSTVQILIIPLDAEKSLGIDIDLDGTPIRDRDSVGIPLTSVVRVLTLAIPSLALCLLKVNSKSRAVVPRLSMRVPLDAGRHGMRKSDCPLARGLSPGRFPQCAFGGRLSCPIPLQIGQGLRFAMLLHGNGARVGEAIHSQ

SEQ ID NO: 147011 - protein, 201 aa, Heterodera glycines
MLTNPQKRIQKFFSMEIRPNNNDCLKERFIRLTRYVAYLLFDLMEANETTSLRLSAFSALLSQQHIFDDDETDANGWLAPSRANATRRRKRTGKLVAQLVGIVSTFLDAQFELAYLSDVNDYVIRLREWSASCSESQLSAEGRADPTNAWSHCQAILFLNRIGMHLIDEKTSDELSAAIGRNGAEENEVQCPFEQLDEDDE

SEQ ID NO: 147012 - protein, 245 aa, Heterodera glycines
MPKQAEETKMLLERKMRETEMAAQRMAALQHQQQQKQQQQNGITTPGTATVAQQQQQQQQMQQPPPYQEVVENRQQTQQQQMPLANGVGAAAVPLNRPTTAQSPKNNGGTTTPNNNNNNNLRSKFVKFIFSQIVVTSPQQMAPLYFGGCQYEMATTMSDSRTSVAAELQHIFAELEMSRSEYNERNQSLRDRLANFRAELDSLKREGTDTENDRLFAQKVMAGDAFDKFSTLRKVGSLCAIKSSD

SEQ ID NO: 147013 - protein, 84 aa, Heterodera glycines
MFQSLLDLCVGTHNLYLRRRQPDLLEVQQMKQQADEQRRRRMEEQVRLHREREQRAQAEQERDRYRAELNHLSEQLSAMQVIEL

SEQ ID NO: 147014 - protein, 284 aa, Heterodera glycines
QNQNFAILFLHSTSWVICCSRTKISRDSRPRLDPETRDPKNPRLETKTWPRDSRPKKPKTRERLGPETRDPKNPRLETKTPRTRDPKNPRLETKTPRTRDPKNPRLETKTPRTRDPKNPRLETKTPRTRDPKNPRLETKTWPRTRDPKNPRLETKTPRDSRPKKRDSRPRLDPETRDPKNPRLETKTPRDSRPKKPETRDPKNPRLKTTTWPRTRDPKNPRLETKTPTRDPKNPRLETKTPRTRDHKNPRLETQTCPQTQHHLNPRLETQTPQYSRPLEPETRD

SEQ ID NO: 147015 - protein, 127 aa, Heterodera glycines
IPGTTGHLGESGYPGQPGFPGEKGIQGLPGLPGLEGMPGSSGPPGLPGLPGPAGPSFRDGFIIVTHSQTAQVPQCPQDTTKLWDGYSLLYLEGNEKAHNQDLGHAGSCLARFSTMPFLFCDFNDVCK

SEQ ID NO: 147016 - protein, 143 aa, Heterodera glycines
MVYCEPGDMVQGEVYLLATLIVVIFTLATTVIYIIMAIMLKVIRSDQNNSNNSSQSQIEITRRIFKSLAVIMAVIFCLWFTSCLVVNIVGRGLITSDPSSQFLITRLVDIFQQLPFPCSFPQSSRPQGIPSTDNSSTFFSDKN

SEQ ID NO: 147017 - protein, 105 aa, Heterodera glycines
ILFTKFSSPGSRLEDFRTTPFIECNGARGSCHFFANKFSFWLTTIEHFFANKFSFWLTTIEDQQQFTIPQSQTLKIPQSQTLKAGNQRSRISRCQVCTKTTDKRR

SEQ ID NO: 147018 - protein, 47 aa, Heterodera glycines
LIFLRKRIPLLTCVYAQFFAPLSSLNSALNLFWISIDRFVALAFPVL

SEQ ID NO: 147019 - protein, 218 aa, Heterodera glycines
MRLLICDEELSLFNLNNSLTVALLDTLWRVSTLYNKVHCWLGLFICVFGSLANCVHIFVLSRPAMQKCAVNRLLAIIALCDIATMASYTVFVVRFEFAVDNEEPPLGYDFFWIVFLLAHVVCSIALHTITVYLTVITALIRYKTLKRVSSLWNHENIACPIFVAVAVLTVFLCIPTFLIHSIIPVSAADPITHQNLTLYTVGLAEFKQFDTCLFFKLN

SEQ ID NO: 147020 - protein, 176 aa, Heterodera glycines
VGLAEFKQFDTCLFFKLNLWLTGIIFKVIPCVLLLLFTLALLYELEKNSRKRKSMCSGTTLAYRRHSAQSDRTTKILLILLIVFFCTEFPQGILAILNGLFPNDIHQFVYLSFGELLDLLSLINCNTCFIVYPLISSQYRATLRNLADCIRQLRRAGDGKRRPQISGSKFNNCSRY

SEQ ID NO: 147021 - protein, 75 aa, Heterodera glycines
MKLISMFIFAVLLVGVMVEVSEAQFYGGYWPSLYGGLYGYGSYGSSWSWPYYGYGFYGKRSAGFGPDELKNEKPQ

SEQ ID NO: 147022 - protein, 62 aa, Heterodera glycines
MMLNYPFNRRIGPIGKEKLHLLIKHMFIHRIYLGKCTYDALLFQDRLGNFDEFVTRIGILPH

SEQ ID NO: 147023 - protein, 74 aa, Heterodera glycines
MKFAVVSLLFVMAFFVGIAVIEQCEAQMYGYGMYGGWPYSSYMYPYYMYGGIGKREAGFGGPSGRLPLLARKPN

SEQ ID NO: 147024 - protein, 124 aa, Heterodera glycines
MAIWIVHEHLRQTVRTRRKKPFGLGLVIQCIGTFVGWKFGKRKYRKKAERWTIGQNGRGKSTQIAYFNYHHIPNVVVEHWPNIEQNELHKMLSFDTNKVGIGQVRKKLWPKKLKIRLIKVDWTL

SEQ ID NO: 147025 - protein, 85 aa, Heterodera glycines
MIEGIQAPFLSASSPVNFIITFCVIVQPFVALTVPYELINEFTGERLELIKLNEHGSHMVMIRSPISRDKPNGRNGKRRPLNGNL

SEQ ID NO: 147026 - protein, 163 aa, Heterodera glycines
MSSVHLLLVLLLLQAVLSLPSFTYGKKKKKIEKIITKFNFDGAVIGATNQFEVQIDYDDGIPKAKETVTRGEDGSFTVELPLERSDTVEKLTVTVTSTDKLGGLKRRKKWEINWPDPSKHFVFFMGEFEPENRAPLFLRALFTRELPNKGESIVYLLRCAFVA

SEQ ID NO: 147027 - protein, 194 aa, Heterodera glycines
ISSNANCVMNRFVGQFSENKTKIGCCVEAFAESVANVRVLSWILLGTLHAPNQCLPVPIACSGQMADYIHFVLAAPNQCLPVPIACSGQMADYIHFVLAGFADQSKQSVVHMSALFHAFHLCQQSVVHMSALFHAFHLCQLWTIYCEQTAATCRSEAMQILDFWARVTPILQLLSHSKVVSFLLLITSDHLFRS

SEQ ID NO: 147028 - protein, 42 aa, Heterodera glycines
MRKSDFLTVQFGLTKDVADLSMRRLSTIGFIWLSQLLFLDTL

SEQ ID NO: 147029 - protein, 360 aa, Heterodera glycines
MSIELEGRNSAYRFVAYAAVCFSVVEAINECVTLPMEYNYGHHVRRTMQEEINYCKSSARDIWMEVNQIRNIPSAFNGNRTARASGYASGGGGGGGGYASSGGSGGGGGGGYASSGGSGGGAGGYASATSGTSGGGGGGCQPCCNPGPPGPPGTSGRPGRPGKPGSNGMPGGPGKPPSQPCESVTPPPCKPCPGGPPGPPGPPGPPGDGGGPGQPGQPGSDSGAGSPGPKGPPGPPGQPGQPGSPGEPGQPAQSQPIIPGPPGPPGNQTIFFESFILNALLGDSGPPGPPGPPGNPGTDGGAGQPGPKGPPGPPGPPGNDGQPGSPGQPGQPGGQGEKGICPKYCANDGGVFFEDGTRRA

SEQ ID NO: 147030 - protein, 18 aa, Heterodera glycines
MFRTRTFAVWNCFTQENY

SEQ ID NO: 147031 - protein, 22 aa, Heterodera glycines
IMTLESKNFNAEMRFLSSFLQN

SEQ ID NO: 147032 - protein, 90 aa, Heterodera glycines
MGMLQNVNHIEFDKTLARLSTNGDYRKAFPSAADLLAFITVNCPNIKAIKVSKQDVALLWSERSDELVSLLLQHVGKVILKKSVGKAYDY

SEQ ID NO: 147033 - protein, 68 aa, Heterodera glycines
EEEYDEEEEEEGPMMMMTQKKEGEEDNDGELDDGAHHHDTTSPEELQDEETEQFYQQLSVLPAVQIML

SEQ ID NO: 147034 - protein, 278 aa, Heterodera glycines
CTSSNHSCTSSSRCTSSNHCTSSTLSCTSSNHCTSSNHSCTSSNHSCTSPNHCTSSNHSCTSSNHCTSSNHSCTSSNHCTSSNHSCTSSNHSCTSSNHSCTSSNHCTSSNHSCTSSNHRCTSSNHCTSSNHSCTSSNHCTSSNHFCTSSNHICTFLISCTSSNICCSSFNHCCTSSNICCTSSNHFCTSFNHRCTSNHSCTSSNHNHSCTSSNHCTSSNHCTSSNHSCTSSNHCTSSNHFCTSSNHICTFNHRCTSSNICCSSFNHCCTSSNICCTSS

SEQ ID NO: 147035 - protein, 233 aa, Heterodera glycines
MKLCLLIFSIVFLIVKIEIGAEKKKAEQKTFDKIFGEKWEEKEEKRNDQNENDQKKRETVTKFNKIKEKILQKGRKYSKNEWNKLEEKIGKKLGTNRDKIYQWIKEFGLQKNKCYKSKTDEQKIEIVQKFIAMKNEYKEKGRKYSTKEWKKNYAEIGKKIGVSHRVIGQWKKQFGLSGKRISEKEKMKKMKKYWQIKGENPKMSDEKIAKILKINQSTFSKWKKRFGEELNEH

SEQ ID NO: 147036 - protein, 103 aa, Heterodera glycines
MEEAIFGIYEKLTEKEKIEKYWQMKGENQKMSDAKIAALDSQKRFDQIFGEKWEEKRNDQNGIGIGYGTIQKWKKQFGMSQRIMKQIHCKLKEKIQAIKRRIK

SEQ ID NO: 147037 - protein, 68 aa, Heterodera glycines
MISSSKFCTNFDQLFNHLRLLCSNDAGAAHYGTELMPIIKENPFFGALCSVMAEEKQKISNFIYKMKL

SEQ ID NO: 147038 - protein, 145 aa, Heterodera glycines
MNDSRIIRGKKFNCSLTWLLERYKLSDKYAIKEKIEVCFLIYFYYIFINFNHFYVKYHGHPKFVFVTAANDFYYPSLRTVIANVKETFGCKQKIIAYDLGTITKNKEWFCSYISKFKKANKRARGKPFLSAHRYFEALRKEIFTI

SEQ ID NO: 147039 - protein, 89 aa, Heterodera glycines
MNWIRCAISNGEFSISVKWWKDGFATPKVTRGKFLCGRMFYWSMTLSFGLTLQWFSIKMISNDFLNRCKTAKLALCKSQAVSDKNGAQH

SEQ ID NO: 147040 - protein, 61 aa, Heterodera glycines
MFYWSMTLSFGLTLQWFSIKMISNDFLNRCKTAKLALCKSQAECTNFCPCTPILSLTEHTH

SEQ ID NO: 147041 - protein, 79 aa, Heterodera glycines
EGIFKFILYPRKMAISFYEKFYTSQKRLRMRRRAVHNRHFISQRIFIFRGYPRKMAISFFDKFYTHTNALEHDREGGAQ

SEQ ID NO: 147042 - protein, 270 aa, Heterodera glycines
NPANTNAINCAKYAASKIPAKNFSAMTRLDHNRAMAMTRLDHNRAMAQVAQKCADGTTVGMVKNVIIWGNHSSTQFPDIRHAKIAKGGSETLAYDAVKDTAWIQDGSETLAYDAVKDTAWIQDQFIKTVQKRGAVIIEKRKLSSAMSAQFIKTVQKRGAVIIEKRKLSSAMSASKAACDHMRDWFFDHMRDWFFGTPSDGRWVSMAVPSDGSYGIPEGLVFSFPVTIEQKEWKIVQGLDLDDFAKQKIDITKKELLAERDEALAACKWKR

SEQ ID NO: 147043 - protein, 223 aa, Heterodera glycines
SANRQRGCFWQRSGVLLLVSSAVIVFPFSPIVLVLLDIPPLTEVLTGVHYELVDCALPNLFGVEAVTTEEAAFKDIDYAFLVGAMPRKEGMERKDLLAANVRIFKSQGEALAKFSKPTVKVLVVGNPANTNALICAKYAASKIPAKNFSAMTRLDHNRAMAQVAQKCADGTTVGMVKNVIIWGNHSSTQFPDIRHAKIAKGGSETLAYDAVKDTAWIQDQFIK

SEQ ID NO: 147044 - protein, 57 aa, Heterodera glycines
MFDAMNISLSVRKVMNKKCRHKNYCHFVSITGLILKAVYSRGTSIIKWSFFIETNIK

SEQ ID NO: 147045 - protein, 136 aa, Heterodera glycines
MYGIGKPFGRKPIFKENQNCEKTKAIHESEGNDEIEKLFPVYASQIKYIGAAFQSFKYFETRRTEIRQIFRIGQKLCKTVDEYKKELFGHDQSHKYCVYTRRGDFANSAWGSNKDFTEQGIEFGFKYLMVIKSFKY

SEQ ID NO: 147046 - protein, 71 aa, Heterodera glycines
KKNKIIYLIVTNQYNFHHMTSISIDASSSSVICSFWPATPPPSLPFPRTHSSPSPISARQLRPPSDRRCFY

SEQ ID NO: 147047 - protein, 64 aa, Heterodera glycines
MMSNILSSKIPWEKIKYFFAALIFILIFYIINKNEEFSYAGSALFRLSHSESCKANLTDEEYER

SEQ ID NO: 147048 - protein, 1506 aa, Heterodera glycines
KIIDRDNGLLRECFDHIKLLGDPFLKQAEEDLLAALPTFDDEQADPNVEEWPVITLLSKAQLILDGLQVYIEARFDTTDAISSRSSSRVSDHGADDENRIHRQRQSTDPPTQAQPANAHQPSNSARADQNLFNQRTPAFPLNLTFPRASNRPTHRSEPHHGHFRQSTSDDDALRVSRIEIPRFSGSAEEWVTFWAAFDFAVHSRQYPAFQKHLLLLQYLEKGSPPRRMVEGYPPSDANYSTVVSILRDRYGDVGNRRDQLNAQLLHLKPARNNLKELRQLQQEIEQICTQLCSLEPEGELSPIANSSLVTNLIKSKLPPPVLLELIRMERESYTSWTARNWREGFATIVTDKEQVDLCVRTFQDMDIQPRERPPERAPPRPGGRSSRPTPPPAPERRYLENTRAFPALAQPVSANGISCSLCEQEGHRPSACQRYTTVIQRRRRLEEQGRCLRCLRQDHVTRDCSRQDRCSKCQANDHHFLLCPSIDPPGRTNLRRENQERNGNASRNVSRATGANAEPVRPRTTPTTTALLVCDEGENIPEALCAAAFDPLPVDSGSFPVPKSTRVAHLMTQTLKASCQGGPPDGIPAFVFHDPGSQSGYISRAMTEKLRPPRLSEHLLRIHTFGDSRPKTVRSAKFAIQLQRLDGGWETLELNVIDEITTKIKALQWDTTDGPLPPNAVLKVVEKAPDILIGIREFWQFFIGRSTLHSGLHLIQTIFGPMVGGEAEFPETPRHTPTIAMLTSHPSNVESFPSSRTVNDFWSLEAIGITDDPNQNDDQVAMQQFSNTVRQLPSGRYSVRLTWREPRPPLPSNWAIAYRRLLSTTKRLQCSPELLDRYSAELTRQMDADIIELTGRDNDEHFLPHHAVINPKKLRIVIDASAHAKGTPSLNDCLHRGPVLLPDLCGILLRFRSATIPVLADVQGAFHAIEVEPEDRRFCKMLWLKNPARPVSGDNLLIYRYKRLVFGATCSPFILAAVLLQHFDKHEHPFAQALAANMYVDNLLIECETEEEAIDKSSIAKQILKDADMNLREFLSHSPNVMGRIPEDDRLDKTPAKVLGLTWDTPSDCITFSLPKDTDITATRRSVLSIIASTFDPLGLVGPCLLPAKRLFQRLWGEGTAWDTPLPETEAETWNQTLSLWQNQTIVVPRHSILGEQSRLQLHVFCDASEHTFAAAVYIRSETADGSEANLIFAKNRLRPRTANQRFTIPRLELLAILVGIRAMRFAEKELRRPIDERHLWSDSQIALSWVKSDEPKAQFEQRRLVEIRQGPPTTFHFIRTDQNPADVATRGCTPAELRTRHIWWKGPEWLTSPETEWPDELTFATPADSPSADPPFEKSETKTLMAKQSPLPPPLIDPARFGTMLTLLGTTILVLQFIGRRRPKWLKIGTSSIPRSGPPTGDSFRAARTFLIRQDQRSSLDGYDKHPTVFNEDGLLCLKTRLLHANGPPTLASPVLLDRHSSLTRLIVQEIHADLRHAGVDWTLTEFLGRYWMPQARRTIRVSLR

SEQ ID NO: 147049 - protein, 172 aa, Heterodera glycines
ETEWPDELTFATPADSPSADPPFEKSETKTLMAKQSPLPPPLIDPARFGTMLTLLGTTILVLQFIGRRRPKWLKIGTSSIPRSGPPTGDSFRAARTFLIRQDQRSSLDGYDKHPTVFNEDGLLCLKTRLLHANGPPTLASPVLLDRHSSLTRLIVQEIHADLRHAGVDWTLT

SEQ ID NO: 147050 - protein, 1071 aa, Heterodera glycines
MPRRNFCYYINCQNGRRLEDVFGLMSGANIRTDLREYDAVVYVPIVVDYWNRKYATANQRFKVFIFGATGTYRPKFQYGPDNFNIEIPLYHHNDHFDGIRCGVGKAVFGRDYYCFSCECPYDNANDHTLQCKAKCINCGRIGVGRPCRADDNNYYRECTACGKDFMSQDCFNHHLSSNVCRQFNKCKQCGIVWNIRQNRRKGRSGHVCGEKFCYTCKCYHKPERGCFIQQLKTRRPTKYRLIAFDCETTQNTRIEGSGDRRLHSVNFISCHVACTKCITENSWRNSLQAPCGICGRQRTVTFSHRAYERTQTDAQFITPCPMAAFAQWLLSEFDPRYPTMLFAHFGGRFDNIMLFRQFFLNGFCPQMIRRGNKLYEMKIARGEKNPEIIVRDSWNLMPVPLGALPGAFGLNVQDKEFFPHLANVEANYGHILQSLPPKADYLYGGMTPDRQRRFDQWYAEHHHQQFDLCEQLAAYCTNDTHILIEALVAFRTEFLAISDPLERHGCLDDEDDDEEEEEEDNDNAFEVIGGGIDITWEPMTIASASMRHFRLNHLKRDQLAIVPECGYDTTNTQSLVALKFMDWYAKKNGVSIQTAHSPGGEKKIGQYTVDGYIAATDTVIEVNGCHWHAHDHPRHRFQPQTVMANGKTAQRIREDDARRMAFITSQVQQVLVFWECEINAEKRDNDEMKRTFAQYKDSGPIRLKDCYHGGRVGPQRLHYEVPEGWRMKYYDVRSLYPHTNAVTAYPVGHPTRVNIIGEAEQAVDWRRADQVPVRGILKVFVVPPHHIDVPVLPVKFDQRLLFPLCRTCALQHPHGAVNEDYECTHREDDERGWVSTVTSIELEEALRNGYRCTAYYRSVEWDDTQWSDRVFRGYVAEFMAMKTHASGFPDEIGQTEEDQQQFIEECEEKFGIRIEREKMVHNKAKRTIAKLCNNSLWGRFSLRNGLSKTIVTDSPAELRALLDNPAVEVSSIDQLTDECVLVTYAAGNEWVEEHECSNIVLSLWTTSVARLHLLRLMQKVVRAPNSVLIYTDTDSVCFAHREADGCPLETGPHLGDLSDEWPDHELVEFVS

SEQ ID NO: 147051 - protein, 444 aa, Heterodera glycines
MKVFFDDLANERGPLDPRLAYSGGRTGPLRLFAEPSADEKISVFDIVSLYPWVNYDTAYPIGVPTIVRPSAEEMIVNWTKPEHLSYRGLYRVRVIPPRGLRIPVLPMKIDERLLFSCCHRCAALFRKSVTRCAHKCEHSEQQRAFTGNFTHIELEKALEMGYVIDRFWRAWHYDEWSDQVFKGYVRQFIRLKVNRSRKYFIPNYFDRGKFSMRNQLGSNKVITRPQEFYDLVLNHRMEISSIIPISDAAIRVLYKPKKNFIVEHTSSNIVLSLWTTSRARLKLLDYMLQCYNTPGTELLYTDTDSVIVRHKRDLVPVHTGEYLGQMSEEYADYDILTFACGGAKQYAMKMVHKQTKAVKFVQKIRGITFDVNNSQELQFDHFVRKVINYGKEEEQENAATFNYNKIQPTKDNRIITRKQNKKYLPICQKGIISQTLEVLPFGYE

SEQ ID NO: 147052 - protein, 964 aa, Heterodera glycines
MDLAKRVTEQSWKETVKLAANAADIAEKAKTALNRAEQARKRAPNAPHVKKWFDSLSNMENNLRELVEKISQESKKAAEAKRKLDVHYDSKNLNECRKHADMSKQALKNSKNYIAQLTPMYFSTVPEDQLGVNELANRVVTAVNNFLNAELTVPRPVEDPQLPAGQPKQQQEKQMEKLKPTVEKEVGSIIKPPVPKLSDETETKREPTKPTVEKEMEREPVKPPEKELEPESPKKADKELEPMVKQQSTQEDNLLEKAKKEIDQTAQNAALKAEYIRTLVANSKHNRGVAEGRLNTYSGVPQFYDWLDQIVELDKKIDELAKKVGNEPSKVINAKQQFDKPYRMKNLTEARKLIEAAKNAFEVILNYSLEIKQLNNKMHELNDKFTVAVKEKEEEEAKKGAAINIQQEKKLVKEIPQVLKELEREKSQHDINTTAENTETEFPSSEYEIDDSSEKQPERTEQQAEVSYVLKKKEGKLEEEKIETKDDTAINEFPSTEYGIEESETEETEKWSPDQAKQKILKGNEEPFEQPDGQKDEETILVIVTDKKGEVFPSNQYEIEDNYSSSSSSSSFIAQNEPSVTTKGEEGLLTVQIKKLPMTGDNEQKTIQMVPSDFPSYNDDDSRDTIVNELSEEQLASTVLEEDMPKSEPYDVDELPDLPDPQALSAKGRGGDKKGVTSVSDRMKMLMGHQKQQRKAVEFLFNEITQRFYINIGSGVQHVDASSHLAYVLGFENTRLYYNHPAKYLPDLSGGVRQLYVYAPKLVEDTIIGDRMAPLLRVVNVSGTVPLDVPEVIYTNEFFKPIQNKRISEIKIEIQTAFGRYIKFNWASQQEGRGEQQYFVGTRYQRGGGLLQNVARFLMPVASNLLSSASKEGIAAGTRVLGDLSQGKALKESLETHAKQGFENLAGKLQQCGKGGNYGADGRRGQRVSKVKKASGISSSDSIIGRIGTVKRRRNKIMDQLSSP

SEQ ID NO: 147053 - protein, 742 aa, Heterodera glycines
MENNLRELVEKIFTESKKAAEAKRKLDVHYDSKNLNECRKHADMSKQALKNSKNYIAQLTPMYFSTVPEDQLGVNELANRVVTAVNNFLNAELTVPRPVEDPQLPAGQPKQQQEKQMEKLKPTVEKEVGSIIKPPVPKLSDEKETKREPTKPTVEKEMEREPVKPPEKELERESPKKADKELEPMVKQQSTQEDNLLEKAKKEIDQTAQNAALKAEYIRTLVANSKHNRGVAEGRLNTYSGVPQFNEWLDQIVELDKKIDELAKKVGNEPSKVINAKQQFDKPYRMKNLTEARKLIEAAKNAFEVILNYSLEIKQLNNKMHELNDKFTVAVKEKEEEAKEGAAINIQQEKKLEKEIPQVLKELEREKSQHDINTTAENTETEFPSSEYEIDDSSEKQPERAEQQAEVSYVLKKKEGKLEEEKIETKDDTTINEFPTTEYGIEESETEETEKWSPDQAKQKILKGKEEPFEQPDDQKDEETILVIGTDKKGEEFPSNQYEIEDNYPSSSSSSSFIAQNEASGIMSKKTIQMVPSDFPSYNDDDSRDTTVNELSEEQLAYTVPEEDMPKSEPYDVDELPDLPDPQALSAKGRGGDKKGVTSVSDRVKMLMGHQKQQRKAVEFLFNEITQRFYINIGSGVQHVDASSHLAYVLGFENTRLYYNHPAKYLPDLSGGVRQLYVYAPKLVEDTIIGDRMAPLLRVVNVSGTVPLDVPEVIYTNEFFKPIQNKRISENKIEIQTALDVP

SEQ ID NO: 147054 - protein, 689 aa, Heterodera glycines
MKHTKKMVMVPETEYIALMNIVKSMGSRGDPIQDEKTSLDSNIHKNLNDKTIGADIKMKRHSWLYKRRRQLKELMENKPQKVIIEGNPSSAIPNVAPYMGIHKIPKIETAVEQENKRQPLRLIRASRKKKSENVFESSADYSSATEGSSSTPIRSQDVKLSQKNFSKIMNIIGKNPDKFGIDMQSGQVLTNFNKPVTGSNYTESLKLLSESQLEQVYYNLNSPASYAGMQKVLAEARKRIPNLKLHDVQKFLHKQRTYTLFKPKRNKFPRLKTVPSGLHTDWQCDLCIMDSLKEHNDGYRYILVCIDVLSRQIYVAEAESKKSEHMIEAFEKVFKKAQVLPNKMYSDSGLEFQAKRMNEYWLSKDIIKHVMYSPHLHAGVVERANRTIKERLYRYFSEKNTHRWVDIIDKIVKNLNNSVNRTTGMRPVDVNFRNATELRNRLYKDMEQQKRIQKFKIGDIVRITKEKGDFSKGYFPNFTDELFKIVRVNPTNPPSYRISDLEGENIKGIQFHSVEHMQKSLNSIIQSAYDVKFPKEKRVKRAAAASADKELEPETRREPDKELSREVPSSKTLDKELIREAPLPATHDIELPRGDEPKPSEKELGRETGPAQLSDKQLGELEGEKPQKEQLPPTPIVDHGEISTIYQERMDLAKRVTEQSWKETVKLAANAADIAEKAKTALNRAEQAR

SEQ ID NO: 147055 - protein, 115 aa, Heterodera glycines
MERSIQVAVDKELEHETSPAPDKQLEREQPLKLPKTELSGEDFTQEKPPPIPTHTYENELTGEKSKTYTKISESDPQTLLKKAILTTECSWKETVELSGNSTDLTQWIEYVMKAE

SEQ ID NO: 147056 - protein, 123 aa, Heterodera glycines
MPSMNTSAENALYLAYRSVGPSADLIVPAVALNLVALVGIMLNGTVLVVTARSNSLRGSANFLMALICFCELVHQIGHSFFLVVVISGTNFVSLLTADLIMTPMIFALNCGLMAMLCAAIDRL

SEQ ID NO: 147057 - protein, 27 aa, Heterodera glycines
MMLKLKLALFYDSVIKIVTFKVETEIV

SEQ ID NO: 147058 - protein, 18 aa, Heterodera glycines
IAGVVGSSPTERVTFYVL

SEQ ID NO: 147059 - protein, 144 aa, Heterodera glycines
FYFLGSITNNLSFSCQFVSHIVSWYFPIFFIFEYFAQNFRESSRYGDQFIWLDLGTECWGRGFESHRDELPFMFYLALLGGSPPHCRDHWSKESPSPSVKGQGEPEGPVFRGRRNVMPEGTECGRKWDKGPERTSKRGARSSVG

SEQ ID NO: 147060 - protein, 91 aa, Heterodera glycines
MQPKRLANITPPQTKKQHLSDKLAAAQTIIGGLQPGQSDGAPQWANSLLGFCAEMVGICRELLSMVKEQQNDNMDTRETWRKNADSTLSWS

SEQ ID NO: 147061 - protein, 105 aa, Heterodera glycines
LFPLHLILRMFVSNSVFLPVSRFFHCRALSAVNLVVHPFVARKCAFLSTPSLSFPFRRQYSSLASATTTGASNDKLNVDKLFEKINFEVRGHDFTVLKSYSLFVM

SEQ ID NO: 147062 - protein, 641 aa, Heterodera glycines
MRSLNNKLNEFTAIIALKDFELVFVTETWAKEKIPFQPFITNNYKIYEASRSGKNGGGVMILTKTSVNSFSVLSCSKFNCEIQIIQINGAKKLRIVLLYRPPNTSANFTKKILNLIGNYFEENFILMGDFNLNAKDITWTSGTPYAKSEKGNIFCEFFNKYGLFLMTNGPTRGSAWLDLILSSKPDFVNNVLIEDIFSSDHLSTNFSLSFPQNKNVPQISSCPSNPNGPSISDVEFNADEISKILKNLPNRESTSPDEISFRILRNCHLTLSPVISELFRISMDTGKIPEIWKKSIVIPLFKKGDRNDPHNYRPISLTCCLCRVMEKIIAKSIYNFLHLNNLISEHQFGFVKHRSTNTQLITVLEDWYDSIYGKKNIDCIYVDFRKAFDSLPINILINKLHNIGIRGKLLSWLSEFLKDRFYRVKINNKFSNLYPIQSGVPQGSVLGPLLFLIYINDLPQDSQYCQNFKNPLYTYLDQSIQDIHSSYLEYAPEIWNPTYKKDINKLERCQKYFTKIALFKCRLPYIPYEQRLDLFKLQTLEERRKTIDLVQAFKIINGLTHLKKDIFPQFSGHIPYNLRRKVVLKPQSSKTSNSFINRTALIWSKLNKDITDAPSVDSFKKRINKWIELNKNLVCKRAPWT

SEQ ID NO: 147063 - protein, 59 aa, Heterodera glycines
GHNLLADQFGRIGLTQNNAQTEQLPVTEKSSQMVTGGAMAVKEQPRRNGTMAISQEKVQ

SEQ ID NO: 147064 - protein, 153 aa, Heterodera glycines
MRQIRDRVVHLLVQNGLERRESLNVVEKAIHGTSEGPFAERTNAMVIGDTPADLGMGRSAKLGSIVGVLSGIGEHKELNEADHLVNQTLRMTIWTTFGASIPRQPMNNCTTCRRRKNAIFTPIFGAALPNACRAIAAETAASRHWPRHFWAWI

SEQ ID NO: 147065 - protein, 127 aa, Heterodera glycines
FEDPILANVKQSQMLIRQKSKGTMDLEMDEFLKLHKQIQGPRQKLVRMEREKMIKEATEKAKVDRRNRMLEREKMWSMKKAGVAAHQPASPAIRGRTQQQQQQKLQPKSIRKNNKNEKIHDNFIGLS

SEQ ID NO: 147066 - protein, 74 aa, Heterodera glycines
MESRSRSRLFSKYRALLVRAEDGSALAEYWSCPFAECSAKSAHNVNTVFAEIVREINYVQSAKAKQRHGCCSVI

SEQ ID NO: 147067 - protein, 268 aa, Heterodera glycines
MRKSIQLPILISMISVFDFVIGMDELKQPLLKKDATDQQSQFELFVEDGTTEEEDMEKAMKTGKTFFWREMVTNWHCKNGKLKKPEEIGFKKSYKELIEFCEHWKMMTTAANAFVKSWERCRNGQKNRQKIDTSSSRSSRKTSKFENPLECLCLKPHFRVGDRELQMSSAMGAIKAVYRDLFKWGDGKSMEIEFKLANENPWKVIQFLVDNSNIEEIKASLTELEKSTAVGTKKFDAFMAKNFPKINLNVRSRDIFSSKFFFNNFASY

SEQ ID NO: 147068 - protein, 102 aa, Heterodera glycines
MRGIWDSAFDKIDNSSYAKCKACNYKVDRGPRKRTSDLERHLKSKHPEHYKQRDEALRKKKEKIEKSDNSQVRHREVLSRNAFSAAQDLFLMIFEKTYRMKI

SEQ ID NO: 147069 - protein, 136 aa, Heterodera glycines
MFSSSNLSALFLASSVLAVLIIGIKMDGPTEAKGAAPPNAAGPMGLLLLLNGKQSAANEKGKAPSGESKPNPGQKPSGERRKRDVLGHAGGYVGGWDHPIDSTLDWAKSQWNDANWLADVVNRNGWENTGTPTGGR

SEQ ID NO: 147070 - protein, 66 aa, Heterodera glycines
MLLRRHELRKPRFSSSEAAPVNMHKKNIGKSQLSKMSKNNGETVEGDKMPKIFTVKRKVIGRTMLI

SEQ ID NO: 147071 - protein, 152 aa, Heterodera glycines
TDHSDGLIDQGFRDGTSLMVLAQRQQQFPSPQGYFDQNVLTFVRRFYRFFASCSTTLFIRTENVRISEFIVLNIWPMFKDTTIVLDFDGRNFPSNAPIGPVNAQRMSIPSYYWFQLSILPGFSSDDSANASNDQGSSWKGRLSRRAAPHSNA

SEQ ID NO: 147072 - protein, 443 aa, Heterodera glycines
MALGTTTAKIIRTDQNYAVVERAVAHFDPKKPLYLATDASDYGVGAILFHKDGNTGKFGVIAYASRTLSPAERNYAQIEKEGRAVIFGVEKFNQYLYGRKFILQTDHEPLKRIFGPKGELPVVTARRLHRWSLKLMNYEFEIEYCSTKNFGYADGLSRLPSPEIDQHEKEVQNLSNECAGNEERIVSDNGPQFASKEFEEFCSKRGIERTLTAPYHPQSNGEAERFVQTFKKGMLLVKKETNWDNELAMNQFLLKYRVTPHSATGRSPAKMMFGRKLRTLLDLVRPSESTKIEGGEEKAKENAEKHGQKYLARAKKNFDRRTWKRSFKTGQRIFARNYRDGSKWMAGQIMSQISPSLFLVRTARVVWKRHLDQLKSDETKPDLESNTDVDSTSSIGDQTEDEKDGGQQTDVEEEPNDPPNLHDPPLRRSVRERRPRQIFDPSA

SEQ ID NO: 147073 - protein, 60 aa, Heterodera glycines
KTVASRPFLMLLRTFGRFAAQTGASRPFFKFSWGQTGASRPFFKFCWAWAGASRPFFKFV

SEQ ID NO: 147074 - protein, 518 aa, Heterodera glycines
MVQNNPDVVLESFYHIQQSFAEIDLLNEEITIIITTYSAPTGSGYNLNVFNFFPPKENGRLSVQNTDNYCLFYSIILSKFYQIIGAEEQFRISYAQFRKIYNNQKRQKNYVDELIQNTKIDPNKTSYGVEDLSIVQDFFDREFPGNFLVAAFSKENGLKPIFKGQGPKKYIICIFLENGHWDGTKFPCKNEKIQPKECLICNRYFFNDFCYQNHFKLACKYYRRCIQCDNDYCIRDMHICGSKFCRVCKIRHPKTECCYIKKIIIPKSLPKYRIISYDIECSADNLVDNQKTEFYEHKVVFLSARFTCSDCEGKIENCDICGPGGIRHHTWCTVNRVNPVFEFLKWVLSLKNYETYCYAHFAGKLLPTLPPMEDYCPESMKDDEFERFKEWYYKISELLKKFNLEEQLQIYCGQDTEILLKSILSMRKIFIEITKDSETPNGYDVFKECEVLRKLNPRDNENYDIEMKKYFDSIPDKGGVNYFTPYPVKTPKIIIPKSQDVLWQCPEDIPYDGIHNRM

SEQ ID NO: 147075 - protein, 142 aa, Heterodera glycines
MAPVAPQHFVAGIGPGAPQHFAVGMPPAAPPPLVVGMAPGEHQHFAVGMPPMAPQGAPRPLMGEVNYRPLRGVFEAHRAHPQQRNGRWPVRPPTPGVALRDPRLRRRRQLLEVVPEEDEPAAHRFQNWDHDPPQPPPPGVGA

SEQ ID NO: 147076 - protein, 42 aa, Heterodera glycines
AWRRDFIGQNVVAESPDVKIEPPDEELVHADHPMPGNRLKMF

SEQ ID NO: 147077 - protein, 265 aa, Heterodera glycines
MMLIQKLAKIRHSGNPWQQQHANVDSVHGYLPVNETWYSMSEAHEYSARIMPGFSTFKAPRDTPLPTFLRGGHIIPRQEPDLTTTASRKKPFQLLIGLKPLACPCKLVAAGEMFWDDGETIVDDFGNHSYYRFEFSTTATHNWTTIVVNRTHNSSEDPLPSLDQIVILGHNFTPNLDTATLNGIPIKLSADFVPEKGALRVESARLIRLDDANTAVWTLSWQNGHKDDDGGHAEGSGANRELSFMIAIYLAATFTTALALIGHWQ

SEQ ID NO: 147078 - protein, 113 aa, Heterodera glycines
MPKMMLQNAAVASDLNEDKNDTTKAKQQQVPRPFISPDLHLNYGIALYYAQFYAKALAQFRRALAIEPHFGQAKHQLDSARQFLFALRDGLHKKGKNCEKFKISHSNFPRDRL

SEQ ID NO: 147079 - protein, 103 aa, Heterodera glycines
MKECSRSKDGGGAGVDKPAVVVVVSVDGDDVEAKSAAAVANKTAENHQKNDDDAEQCLLMIRVINPSRQLLKNGKPLSSLDCAFAAMSIETQQMQMGSRARAE

SEQ ID NO: 147080 - protein, 92 aa, Heterodera glycines
MPPNENSDRPFQQPDNVQPNQQPHQQQPDEDTELRAQIEDAEEDLLLNWWREDPTIIRFLFGHRRAPAIEAALRQRAEREAEILRQYAENQQ

SEQ ID NO: 147081 - protein, 187 aa, Heterodera glycines
MVLVSVFCGQLLKCPVKLLRDRLNHPEDRALVLKHLIGRKVRTTYNDRNGLTKTFFIAGISAQGAAFLPAYGHLRNPFNINVAAHFYARHRIKLHLPYVPCIVERFSGGGEDRHYPMELLELIDDNMDIDNNNWLGNLFTEIDNNDKQSASNSSSHHTSLRLILEDDDMDIGRNECSQDAAPSSSYW

SEQ ID NO: 147082 - protein, 479 aa, Heterodera glycines
MAKLLCEELTAERFYPIAFPGGSELILQFDEHVISNTYKFGAIYQKFGQTTEEELFSNDSSNCAAFDEFLSIIGHRVQLRHFDGYRGGLDTVHGQTGTEVPCVHPFAVYHWRRATIAAQAAHWQRHRGHCFPRAEHTLLSGHDREQVQKRATFRTHSGIAAGWTVLKFERAGPILRHGIFGFGGQRDETAATGEAPPPMAKQRAKPSPAQPTAATDEWIGERRNEPNGTVPFGEESIQCETDQPITHSPAGRIMSLVAPMEDCRLSSSASTSSSSGHHFDRPSAVAHPSQMPSHNYHQHHHLLRWRSNAGKMAKTAAERNIKVILDGFRPSSSTFSSTSAMLEASFGCIDQHNHHHRSTPSSPYAAHHQLPPGTVIPFRSSIQHLRHWHGGSDAEDDDDLDDVEIEVEEVLNEADDALRGGAGGGHDSDTGMESMSSADIQPNGAPSVGRRCLNNGAGDAKNGKNAAGALQKRERIAKK

SEQ ID NO: 147083 - protein, 528 aa, Heterodera glycines
MAVSVELVRLRRISELPSDLGGVRLVPSQRLSVRPLTMFSEETKRWEAEIGEQCPPQQRRSVVAKTVPLSHVPCQCALPPSCPTTAVPPLPSILRRRVAVPYHRMAKEETKIINGGKETKKTNWENIQSNEATTETKATAEKCEKGEGEKRHQREEQRNVPNCQQLCSWEEFEERVQAVRLRPRGRRTSGTNCWGATGGATGNGCPGAIERKRQHEKAHGEDGRTTNGRKMGDREGREAQNEVLKQQKCWKCHQMGRKCVNCILTIGTGDQQQQRLINQIGRRMPMSDTEDHLAETNAAKREESKKRRRHSVLSIKPILRKLTSTASTSGNADAAATITATEPTTARRRSFFRKNAGDKSHSPEAQRRKNKEGQQAEGGRAPLPWSSSSSSSSSSLLASLAQWADSSPLNEHTLHPTSSLPIDQQRPPRMKSLLGRLLRRNRRQKQTDDEANGVGIGTSETEPKQRNQQQQQLTRPESPARSSSSKAEFVEWQSKYLRLSWMAPKGTKNNDSYHRYKCDQLGASTEEK

SEQ ID NO: 147084 - protein, 27 aa, Heterodera glycines
MDNKWEGSSDILYTLKSNIKTKENGKQ

SEQ ID NO: 147085 - protein, 447 aa, Heterodera glycines
MAPLNAIPSGDASPSHSAGPAANHLAHATNDRRRRRTNARRTQRKFLVYPSDQLKMLNNGTERGAKDGKTNKNGTWGRTNHDREEDGIGKNGLMRTEADGAENSWTRETERNGISRIGFDRTEMNGLRTKLNGTEQNGTKTESDGMSFNGKRTEQNRREMNGRRSELEELMTNGTGKLGGQEKRHGNGAEEKQFWGMRMKTKWEDEEEQRNGINNAINGIDEVSTDGQSTAQTETEMKQNGTGWGPHSVTDGLLTEEDAVESATGGQSSQLLLNGQQSQHFGHVAKLHSFWEEMPISSSSLLCMDEEQETEQKQQQHHRRPTTLSPRAVLAAHLPKTVPKSNDYEEESHAIKRQRCTLREQLVGVPSVAAPWEAIAAERLGTRRSKVIMLGDSGERWKENQQRMDDFPMLKVLARRALCSATNTGRTPRCSIRRPMRPSALLTPILT

SEQ ID NO: 147086 - protein, 56 aa, Heterodera glycines
LDFGTEVLRCPTALEEPIFVLIGNKADQQDENREVAEGEGVQKGGHLANDWCDQWQ

SEQ ID NO: 147087 - protein, 79 aa, Heterodera glycines
MKSPKWKNNTAQTVEANGNLKRNGKSGANDGKKLNGEAKAEGNVVEAEEEDEEFEGEAEQQEGGGEGVQSDQNIAMGME

SEQ ID NO: 147088 - protein, 70 aa, Heterodera glycines
MAQQMGEATNSLALAPSKGATKPMKRTYALITKETKCNWHILMTFNRGKWTSYSFMRFTMAPVLCREKWP

SEQ ID NO: 147089 - protein, 103 aa, Heterodera glycines
MSREKGQFEKGYLPNYGDEILEVDEVLKAIRPVRYKLRDERGEKFKGSFYEQELARVRKDAETSYRIEKVYRKRKRADGSTEMLVKFIGYPEREWVHESQFVV

SEQ ID NO: 147090 - protein, 416 aa, Heterodera glycines
GNLLRGPRALKELQLDGNRLSAGQLNQLLAEVGTLKRLEANHCGLNDAEVLALNLSKVPQLERIGLAGNNLSEVPSSTLRALALLRTVDLSHNLLRSLGPCAFCGSNISRVFLSHNLLGIGGDLRPIHREAFAETRILELDLSFNQLDGFSSEMLQDAQESLEVLHISGNGRVALEPQLIGTLPRLRALHVADSALGTVPYSLPKAYGQLTLLNLSGNGLDHLPPNLGSMLPHLQVIDLSRNHFSSFPHCPWDCQCAAQPLQLHMLRRLDHKEMLRYDETLCAEPPMLRGQPLHRVQKINDCAILFGANYGISQNTELLLILGALLLAALFLSAFLALLLYFGRESTQKGTYVTGEQNGTPATTATTAKSSLAALAVQNPTAPLFAPSASLATDRLKEPLLLPNSPLSYSSSNTGS

SEQ ID NO: 147091 - protein, 75 aa, Heterodera glycines
MREKLIFSPDILILIVLDRHFEKSLDLDSMLDLDLDFLDKNLGKSRSRKNPGSSRPGSRHGPGFFKICFKKQTNA

SEQ ID NO: 147092 - protein, 313 aa, Heterodera glycines
RIEICRKNSVTAAEAAPELSVFIDAANSMPFPLPDRPLPSKIRFKRLRVDYIDHSVIAFLRSNHKIFDKSGTKLRMGMLYSDMADDRQPIWDVFVREIWPIFASNIRHLDFIDADHLDNLRRRTSPTILTDLNQLSSIDSVLLLPDAIGDDFDGPNATAGQALNKWLHSPRKDGQPKRFRFIDINEQVSLHLVNTFKEEFMRATTISSVSYEIHFSVHVPTMTIVPFELVNERTQEKLTLAKANELDNIWIMKRCKIGEAAAVQQQKKDENWNYVYFWLYSGTNCIGVETVKKALSTDESEKEREGRSTFGLV

SEQ ID NO: 147093 - protein, 60 aa, Heterodera glycines
METVGLTSTRTYGFSQHEKKTKFIQMHLRIPCRTRAYRTIKKILFLAINYFEHVLEKSGF

SEQ ID NO: 147094 - protein, 548 aa, Heterodera glycines
PLFSVVFMFFACFVPAISFGGLMGKYTNEHIGTIEALFAQCICGIIWGLFSAQPLMISGATGPVLIFEGSLYTATGPVLIFEGSLYTFCETLQLDFLTIRFYAGLFIMLIAICIAAVDGSRLLVFVTRFTEDIFAGLISAIFIAESLYSSVAEPNTALLTAIIVFSTFILALLLKKLRESFYLGRHLRRAIGDFGVLISISVVTLIDHLRRAIGDFGVLISISVVTLIDWLVPWLVPDPYLQRLDMPDHINFTNPTSHGLIVTPTCPFPIGMAFVSFIAALLVFILLFVETEITELLLSRKERGCKKGGGMHLLLSRKERGCKKGGGMHWDLVLMGICAFLCSVFGVFGLPWMCAAAVQSLAHCSSLTVMKKTAPGARPEVDCVIEQRITTIGVALLIGLIAFGGSYLRLPLASLFGVFLYLGVMNLCGVQLIQRVVLFFIPEKYFPVTPYTEQMSIWRMSIWRMHLYTWIQLICVFIVYTASVCPGKAKMNAVLMLFIFFRQIILPRIFTAKELQAIDGDDHIDGDDHSDTDEWTSRDYFDNPPITV

SEQ ID NO: 147095 - protein, 154 aa, Heterodera glycines
MSTGPVALTLKAKGMSYTRHIYWANSPTDHQRLCREKAPNDAANALGKQRLDGADVLVGVFAHQSAEGNGRHETGEEHENDAKQWKEEPVRSKPSSKWWSIFKTPLLSGTSRQAAMSAASVHEHRFGEETRDDKSGEYCKCCTMCGYEMRYEKM

SEQ ID NO: 147096 - protein, 42 aa, Heterodera glycines
KGVNFLDNVRSEDVVDEEVTVNRLFISFLFIFSPGEPIHVHF

SEQ ID NO: 147097 - protein, 280 aa, Heterodera glycines
MSNDVKAKELKTEKNEFEKNLKNATAEMETLRFETDKIMKEKKEQNDRHLIFEQTLKEENKKLVEMLEQTNAKFAQTDHQFTQKLGMINHELIKAREECAKHKNYTDAVTAEAMKTKQETEEALRKAHINFEGTLKALQAELNKEREQRKAQDKECQMAKNMVDQMMSDVSNSQNQLKDAMVSKSAYDDRIQTLQNELNREKDHHMKVMVNAQKQVGELSQELEKALVAYGNLAKQQSNDSAKCVELNARNQKMGEEIRQKHSFGTTAQCLGFGIIWTAN

SEQ ID NO: 147098 - protein, 101 aa, Heterodera glycines
MGTQEQMMREINIGASSAATVAFWCSVFLRLLSSASKLHLISRRFDHIVDEHFKICKNGIEQQIANSIGHLKKMAPTKCKLPIPQNPLPNKFIGFGGVQIM

SEQ ID NO: 147099 - protein, 289 aa, Heterodera glycines
MALLSDRFDVLVDTHFDGKSELTIWKAIAIRKDKGPKAKLSEWIDGKRVEFPLPDRPLPTKIRFKSLWISYIDHSVLTFLRSNKPIWDRSGIKLELSIWSNKTEDDQRIWDVFTREIWPLFATNIRHLSFHNADALDNLRRRISQTILTDLDQLISIDSGALLREGIADDGPNATAGQALSKWLHTPTKNGQPKQLYRYNYFDPRNPEWVNDFKETFRRATTSVSYHIQFYLRVEPMPIEPFELVNEVTNEKLTLKQSKEYNLVNWLLQRPLSPPAEENEEEADQSNEK

SEQ ID NO: 147100 - protein, 126 aa, Heterodera glycines
LDRFKEPPAFGPMCDLLWSDPLEDFGNERNSESFSHNSVRGCSYFYSAPNYLDVYNNKAAILKYENNVMNIRQFNCSPHPYWLPNFMDVFTWSLPFVGEKVTEMLVHILNICSDDELMAEGDDTFE

SEQ ID NO: 147101 - protein, 95 aa, Heterodera glycines
MGKKVAIWRENNSSIDQAAHMNEQKAAMKNSCHSQPDSRNRPFPPEHGPMGTKSAREWRQHQAMHVNVLPQMKEVTAKKEEKEEKKTAHLISPFL

SEQ ID NO: 147102 - protein, 225 aa, Heterodera glycines
MFDMVLNRWPTFSPTNASMDFEQAMVNALRAKHPQCSINFCLFHLVRNMKARLTDEQTHVLINYVGRLRNNGTRTRPLFRPEEWSVYERTMSGTNRTNNFAEAYHRTLQDAIGHGHPTIWKFINILREHQKVIDVDFEHFLAGNAPPPKAKRYRDTDKRILRILQRYNEEKAQPQIENDHQYGQNQNNPNSIIEMLFEQLSNGLLILFVNFICYYILDKTEIFKN

SEQ ID NO: 147103 - protein, 164 aa, Heterodera glycines
PLGAFSLLHCASRAPTKATVGQIHGIGNPSAGWLPIWERRKRIGTIATEVKEKAGQIGGRKSKVIGLSIQTKCQRDEAERRKKQFVYTNSRKANKEARMEQGPREYETYFTLSDYLEYRTIIEMQLKFEPAPFPAATICNLNAFKLSEVRKFEEIEQGIKLWEK

SEQ ID NO: 147104 - protein, 335 aa, Heterodera glycines
FEFPFHLSFQSLCLCQPISHFCLRIKPGQEIHWRNPNNYTIYPRNPNNYTIYPSTVKPPTSEMEKAFGLEDDLKDRGAITTKTKENLIFLVAGMSTEVRKSLSYGLEEFVLRCSFNSRDCDLKRDFQIQIDPVYGNCDFQIQIDPVYGNCWTFNFNDSVELKNSRAGPMYGLRLLLNVNQSDYMPTTEAAGVRIVVHEQDQEPFPDTFGVRIVVHEQDQEPFPDTFGYSAPVGYSAPVGFVSSFGLKTKILNRLDAPYGKCSDTKILNRLDAPYGKCSDTFRPHGYIYAEHYSPEGCYRNCGCYRNCFQHIILERCGCGDPSEISKGEKNGPINK

SEQ ID NO: 147105 - protein, 49 aa, Heterodera glycines
GAAKIQVAEKWPGPGPGSRKNPGLDPGPGRALDGSVPPREKFEYLTESC

SEQ ID NO: 147106 - protein, 46 aa, Heterodera glycines
LKITILAFCHYFFTISTFFGKFFNKNAIKPKNTPLRIDKKNFKKHS

SEQ ID NO: 147107 - protein, 50 aa, Heterodera glycines
MFWRLNCLAAILFALCCTSSTFWLGSATTDEHNKAPHVDHHKLTETQQYE

SEQ ID NO: 147108 - protein, 54 aa, Heterodera glycines
ELLVLFDSSMCLLLICKISKILVKFQKSYGQKELKNPVIQTFFALIFLCINKNF

SEQ ID NO: 147109 - protein, 63 aa, Heterodera glycines
MGENVQAKIFLRKGPSFGGLAGKDECEKAKANEIIDFQKDANTDLAPYLYVKMGFRQGDLVNK

SEQ ID NO: 147110 - protein, 93 aa, Heterodera glycines
MKERNIERERKEELERERVRDEERVRTKDSEKQRKKRDWKKKRRRVKTEKSEKLFINDQNFQFFSQRRLSAPPRPQNSYLFLENGPKSQNLVI

SEQ ID NO: 147111 - protein, 63 aa, Heterodera glycines
QQGWAEVSLFAFRLSHYSHFLAFRISLFAFRFLARNATFTPLRIGLKSHKIFQNFTYKLANFQ

SEQ ID NO: 147112 - protein, 70 aa, Heterodera glycines
MKSERKGGLVPSLSSKRQQQSVPSHSVPSTEPSPLASPSLFLASQNVGDKGHQPPQKHVYSELALRNNYQ

SEQ ID NO: 147113 - protein, 171 aa, Heterodera glycines
MKSERKGGLVPSLSSKRQQQSVPSHSVPSTEPSPLASPSLFLASQNVGDKGHQPPQKHVYSELALRNNYQKQLRADLADSKEAFEKAMTEHGMVLAELQQQYTKEKKHGELLEKQVTEMSQRLAEKDAQIKQTEGRLKQIGNLEKETEMLRKKAQLTPTVRVIKDELANVK

SEQ ID NO: 147114 - protein, 77 aa, Heterodera glycines
MEVQPAENDIKLPPKIVNDHEIRGIAPVGVLLNAFELNLSAVPDKVFQHDLRFVAEYTNTKEGQAKLQELARGPRNE

SEQ ID NO: 147115 - protein, 89 aa, Heterodera glycines
MRHHHSRGTRKFGRKIEDAELTCRNSCRILQKLSASTADIGTIMSTISLGTYTLLKLEISICSFVVSAVHIATEANKESEELSNDNKNF

SEQ ID NO: 147116 - protein, 49 aa, Heterodera glycines
MADSMFKYDQEEQRMIRNVKPWEQDPHYFKGRVDANTIIVLDAFALPVE

SEQ ID NO: 147117 - protein, 97 aa, Heterodera glycines
MGGNIGGALAVLLIVLVEGDAGLDAVPTRDIVIPDQLVDRVIYNQNLQGSRMIIFCSQFGINTLRAYRDEVAVDGTFEVVRKVGCQINVDLDESTWF

SEQ ID NO: 147118 - protein, 78 aa, Heterodera glycines
MSHNPNEAEREMEKAIFISADCWLEVFGLLPRSQLGLGIAMISRRFDRRVDEHFKTRKWTLENQIVQRLSIPSCRQFL

SEQ ID NO: 147119 - protein, 60 aa, Heterodera glycines
MPTNLVELRERICEEIGYENGTMKLIHKASLDFVLSNDTKKIGFVRTWKKLLYKNPGIVN

SEQ ID NO: 147120 - protein, 51 aa, Heterodera glycines
MGEKFEFGDVITIIFGKKFKRINKRNFTNAFVARGAVFANALVYKVCNNYH

SEQ ID NO: 147121 - protein, 93 aa, Heterodera glycines
MVLLLFEGCVVCKNAKMTASLSLRQYMPQGLLKETCAAFVKRPTKALVGVTADSFAYGITLMERLCAEKKTTESEPKENATTPAPVYDMEMLK

SEQ ID NO: 147122 - protein, 416 aa, Heterodera glycines
MNKWSALVLLIALISALDSAVVRQQRAADADASKPEPNNEKPGILDSDKAKPDKSQGTDTEGNNPEKPTESQKVEEDGPNPKKPKESQEVEEDEPNPKKPKESQEVEEDGPNPKKPKESQEVEEDEPNPKKPKESQEVEEDGPNPKKPKESQEVEEDGPNPDEDQLTESQETDEEGQEKPEPNDVEESAPEGPEPPLLKHKTDALAKGEPNSRQKRQGGNPAGGGGGEKTAGGGGGEKTAGGGGGEKTAGGGGGGKTAGGGGGGKTAGGGGGGKTAGGGGGGKTAGGGGGGNETVPGPASVNGTGTETIKPDVPVAPSGQPGVAPSGQPGVAPSGQPGVATGEPIPEPTGEPKKDLPIPDKFDLTLPEVDPSNSSANATRYVTQIEGRKNVSDAKFNGKTAACTPAGVGKNKFYFK

SEQ ID NO: 147123 - protein, 183 aa, Heterodera glycines
PVSLPPPPPPAVFPPPPPPAVFPPPPPPAVFPPPPPPAVFPPPPPPAVFSPPPPPAVFSPPPPPAVFSPPPPPAGFPPLPVPILQHPPASPVLPHPFPGFQAGPRPDLVHPLPLPGFPLASSDLVHPLPLPGFPLASSDLVHPLPLPGFPLASSDLVHPLPLPGSSSDLVHPLPLPFLWLLRI

SEQ ID NO: 147124 - protein, 330 aa, Heterodera glycines
KIDNYKCPKNAIFFSFCCLYLQYLGACEVFESRGMSVCESALQHLRVARKRVTKALLYISGDGIRVVDQEHNRGLIVDQTIEKVSFCAPDRSNTIEKVSFCAPDRSNEKGFSYICRDGATRRWMCHGFHATKDSGERLSHAVGCAFTVCLEKKRKRDAETAAYRTAQALAHTVELTRALRTIVAEVEENLRGGKFKKFISIYRTNQAYGSFRQLSISERRSDPQKAILPSIPTMPTVTSVLNASTPRPSGNPSLFERSGSLRAPNSSSTVVVVAAANANDNAVAVESQQQQCQQQIVGMSLHNEPIWMSLHNEPIWEGDVEEEIGIGTTT

SEQ ID NO: 147125 - protein, 33 aa, Heterodera glycines
MGNRGGRKSWKYYKTVLKFIFSITDDNPSISDN

SEQ ID NO: 147126 - protein, 201 aa, Heterodera glycines
NIQMKCIDSTEKENSFGGGAEFGHSLFVSGIEQRFSVFVSPGTASLTAPSLLKLSLVQSSDGSIEFLNFDGNWTTEAQFLIPPLDVEEKHRILVRMCKGIDRLETYQSEQKNEGQIEEKCELKFEWFAASDCKSLLSDDFLIIRRSFPITFRPIMLLSWRTSFLSDRTLFHVDISRKDCVSAAFAVDVFPTFVSLLSLKTD

SEQ ID NO: 147127 - protein, 20 aa, Heterodera glycines
MFGHYATLYFVFCVDSSEKF

SEQ ID NO: 147128 - protein, 165 aa, Heterodera glycines
MVKYEPTEDPKHPGFGDQQYIARRAELNALANGFRHGDSLPFICYTDEENFACSDGPGHELFVAELAAQRSYVDSDYQPVYFVAESIRKAMESIRAYALSMRPQRINIYHPLPRSIQSVPSHALIGKRMGQLQKECTELSQLMDKMKTEEEKGIIPAEERRAVID

SEQ ID NO: 147129 - protein, 162 aa, Heterodera glycines
MSRLALYSINGELLGMHSERQRTITRYSLHDTKNKGKLLSIAITDLPEGTAVNCVAIGLQSGMIRLIEMWTMTVVRDISFQSFHFPVLRWSFTSQFGICLFSLLFANESRRLYAAFANSNVVLCWQVPSLYGAASEEPMTVSRERPCFKVLNPFKCSDSFPL

SEQ ID NO: 147130 - protein, 74 aa, Heterodera glycines
MSPQRQTQMDEGPDILALFVGFGISYNKTLPNGDLHEDTKVELEHGQLGPQIAELPIPTRRHFVAFHRGKRTQG

SEQ ID NO: 147131 - protein, 872 aa, Heterodera glycines
MSMLMELNLDFQYALKIGLHELCLLHFTSIGDFDTDLDLLIKFMHSINIRSPLANLTLEEIGSLTADEILLLQQFSEIKSQFYGKMTERANAAWDRECNLLKFTSDQAITLTCEVAELQNVPRRLLVNWKKESQREWSRANRTLAHLVKELCHPEAPFFSPFFWPIGRVLNTTEGPSRERRRFSDAHYLFPLKFLKSERSKAVESLHNAPMPLDNLLNSGDIQQSHANGLRDMEDPIRMSISATLLQTAFECSGDLVISDQRLYFLGESAKSTQKGVVHAPVTYSWDYDQIKEMHIRFYQLKDTALELFTTTGDAFLVVFASEEDRAVILRMFRTFHLDKLFVDHKAQLKSATQMWRRGTLTNFEYLMVLNKLAGRTFNDLMQYPVFPFVLSDYCSDALDIANPNSYRSSKFYTIYSHIFLPFVNSLVQWEPVLLLKRSLLKLFLSEACQQFRNLTKPMAIQDAHMEKVYAQNYQSLAEEYDRFNQSADSVGSSPKSGFSTVRFGPYHYGSHYSNTGIVAHYLVRVPPYTSVALEYQDNNFDIPDRLFSSMDTTWRLSSSESTTDFKELIPEFFYLYEMLRNGDELELGVRQSGDRVDHVQVPPWCPRGDHRLVFCLIHRHALENRHVTTNLHHWIDLIFGFKQNGENAVRAMNVFHPAIRTYGQMPLQLFDSPHLPHLNPPKCQNQQTTPKCPDPRPSVSVSAGSFREQFHSVVGVKWGDFVGSPEHDGFYFSTPSRFFTSGTKRSLRLSLVHCDQTTAICYGIPESTELIVCYRPDRKGVMLWPLCLFFRFFQDPLRLNNELALCAVVAWGPSNFTDNVLRIKLVYAGHSSKRHFQLSPSSIDVPQQFWERLIDLQSLELVSGCLFVRSQ

SEQ ID NO: 147132 - protein, 96 aa, Heterodera glycines
MCADVLYHCLTVGIVPRLSVSFLGQQNLADSRTFLVALKRPNSRNCSASEIGQKVWNEESQSNRREVGKELDEATDWKKRQPMGRNKAKTLINNVN

SEQ ID NO: 147133 - protein, 57 aa, Heterodera glycines
MPSSTTVMQAVPTTTTRRTMTMTELTTLIETSGSDDTDYEGELTIIATACAMAILLI

SEQ ID NO: 147134 - protein, 59 aa, Heterodera glycines
MVGHLFGFRFHDQNSNKIQKLKIYFYVCICIFDRFDQLKNKVPYPGSGYLLAHNFLIVS

SEQ ID NO: 147135 - protein, 287 aa, Heterodera glycines
MTEDETEDTSTFGSSRIDGYLYKASFEALEQRPFVGQIRRKYWFVLPRDTPVLYWYKSPTDFNCAGRILLTGAAFLYNPREQGIFEIHVDNKCYLLEAPNSRARLDWLSAMQQSRRRHYRREKEDTKEKSSEREGEGADRTNANENDDGDQIQGNLPSTSAAESVPDEELTESLEQLRNRCYELTDDLVVHQQLVKCLKRGVVAAHNQRDALKRCCVDSSTDAEKVEFILERESALAKAQFAISELSRDNETLKEENRRLEAENSSLNITVDAYQESVRTKDELIMK

SEQ ID NO: 147136 - protein, 77 aa, Heterodera glycines
CLLPVEEPLHYGRKCKIRPNLKHISNLVAQPFPTVNGPPKTAARGTVDDPRTDRRGHQTSLSDAYTQCQFPGGGDGQ

SEQ ID NO: 147137 - protein, 175 aa, Heterodera glycines
MPTDEAVGPAESAGSVPTEATAVSGSPSISHFVPSSSFAAFTSPSSYENAGDALKQDDWLLRLAADHQKRSDDIFASIELSNNQNLVEWLQRWDAYLVNHVLQPMSPNPQLKMLVRCGIPNTYRARVWSSLVDFLVGSTKSETGKGYYDCLLRKAQRIQEQSASGTADEDAALKQ

SEQ ID NO: 147138 - protein, 23 aa, Heterodera glycines
MTIRRVKRIPPGLKQASVTTRGA

SEQ ID NO: 147139 - protein, 144 aa, Heterodera glycines
MIGSDQKDAPAAQVLSKWLHTPSANGQSKALYCCNYNGGITNVAEWVNKFKQAFLSATAASSYEINLQLDDPTQLKKFELVNERTREKLLLKKVAPSPDYQHDDCWEMRRRPIVKAAAGKAENCDEWDDLSTIDFELLDNDCIG

SEQ ID NO: 147140 - protein, 102 aa, Heterodera glycines
MHGQGRFRTAIFVPPFSYRRFRQTRSHLIISENTSEKIVKVFGIDIGIGIIVIILRDNIVIDIVVALDETKNPCVGIEILLFLCTNLSLFSFVLITCCWFIL

SEQ ID NO: 147141 - protein, 48 aa, Heterodera glycines
MSPVRKRRYENVPGTKTAVRKRRYENGGTKTAQRTSESNDELMNSRFH

SEQ ID NO: 147142 - protein, 27 aa, Heterodera glycines
GLHTCTCGVVVKLSTFHNFRLGSIPHL

SEQ ID NO: 147143 - protein, 17 aa, Heterodera glycines
HKHLFDLFYHVHNLIKI

SEQ ID NO: 147144 - protein, 179 aa, Heterodera glycines
MAWKAGMPDCRRLLPLPIAKMNRRWICGDVWMDILPSFEHAQLDLKMALLSDRFDILVDKHFDGKTTKLTIRRTIELKRRKGQKRKYMPMTFRHATTSVTYKICFGVFLSLIEPFELVNEVTNEKLTLTKDGTGEFNWLLERCPIIGETAAVQKQQQKKDENSDANLNKVFFRLYDDIG

SEQ ID NO: 147145 - protein, 53 aa, Heterodera glycines; identical to SEQ ID NO: 143092

SEQ ID NO: 147146 - protein, 188 aa, Heterodera glycines
MRVQRTVKSFICSDCWLLVFDFLAPSQLGLEIALISRRFDFYVDEHFKTRKWTLGEIRICYKIEENGTKQMHIHHADANPLPIPQNPLPNKIIGFRGIKIVYIDQNVVAFLRRFHRFFSIVQRNWALSRAEVTVEKLTLQQEDEDVWLTRCPIGWDEMKWGNVQDELLNDDPLNAILFLIREDRFDDG

SEQ ID NO: 147147 - protein, 89 aa, Heterodera glycines
MAFLSRTMTTFNTTTMLLNLALFCQCVHSLVIHPRLRSTSAAVAARQIGSGPETTAAEDEQLQHLIDISRSSDKCKRMRWYGAEAKQML

SEQ ID NO: 147148 - protein, 114 aa, Heterodera glycines
MALLQIRCWWWGWFRALLECRAVVSPLLPIVAARCLAANSFRRSSAVMRTRRTPGMFRAGFTGQLKAEKKQSCLGPSSSGLSVNSANSLSSSDTLPTLDTAFRCAASVRSLISS

SEQ ID NO: 147149 - protein, 34 aa, Heterodera glycines
LHLFEQLSFGFILQIGKRRQRKQFDQFKFVDQSK

SEQ ID NO: 147150 - protein, 17 aa, Heterodera glycines
HKHLFDLFYHIHNLIKI

SEQ ID NO: 147151 - protein, 304 aa, Heterodera glycines
MSGKASRMTRNVKTLIPEAQKAADEKTKKEAKALEDTHGKSINIVKLLDKGVLVAPDNSRLNFMVLEFCELTVKKYLSYRPAGPPRRARICQVLLGALKAIYDMHNQGLLHRDLKPENMGILSRADPVTVLYDLGMSRMFTNQLGQVREPRTVVPFKGTVEWASGHALKGREQTRWDDLIAWLYIAVELFDPDVNTESPYPWDNHRINNTKAVRYLKSSYSPAKVLLKNCPRQFYSIHTYLYCGNRLLVPDYAFLADKVGQAMEEIQEQIKSGPVTTQGKQPQQSAASVAISKSSVAQSMVSKR

SEQ ID NO: 147152 - protein, 44 aa, Heterodera glycines
MASFVINPGGPGGYVIPKRRNATEEEKKKERHGAAAATAEDDAK

SEQ ID NO: 147153 - protein, 101 aa, Heterodera glycines
MALPQFLVRLSSRLSARPPTWRTSPTHCNCDNFDCMQAKTAYRIFQIKQFLSYFINLIPAEDLGEMNSANAFANYFNGILQNAIKEKQSQESVEEKAMASV

SEQ ID NO: 147154 - protein, 20 aa, Heterodera glycines
MDVQIYSNCAEFRIGLRTFK

SEQ ID NO: 147155 - protein, 395 aa, Heterodera glycines
MECIGCLAFRTSFSVLLRPFSSANFGQGARDIGSCHNVSSRHSALLEKALAPFVPRTAKELAEYLAKNVLYHSVGDVLVVHKPYGVGSLGYVQKEFGIFPTTQYKFKDRMDLFNGVKKDDSVTLEDAIPHLKEIFHEPKLHFCTGLKRLFQGESISHSNEHWTAQHMHRALAICISRPPRDEGAVDGYATFQDTSRANEYIFVPSVKIRRRARYGKFAVQGELFYRVLDSQCGLSLLDIHFSKFSRHFPRLILSHLGCPIFGDWIYEQRLLNVDGHPICAEPKDVWRAEAKKFEPSAFLNKIGIGSFGELRPPPPLFFAVYESTLPFFGTTKSERRRTNLVSRTPPPDHFMAMVDLLNFGPSVEKLLMSLELGELEEAEIPPTDKSTKSSGETKF

SEQ ID NO: 147156 - protein, 91 aa, Heterodera glycines
MRRCKNNLTDEEYERLFPKSADKYVFPTNTNGICVGLGNQMFRFAALYGIGKPYGRKPIYKAYHKCTSEDEREKQMLFPVFASQEKFFVKF

SEQ ID NO: 147157 - protein, 107 aa, Heterodera glycines
MIFLKFLLFLTFFAPAPILGLFKALLNFRQNLGDAKACNNEIQITELRVHCHNGNEGSFYSVANSPNSVPDQLFPFVTFWDFGDEIEANFGPNFKFKPGLSKPGQPG

SEQ ID NO: 147158 - protein, 192 aa, Heterodera glycines
NSNGTTNSIDLNGTKGNELAPTDVEELNGKLKKIEQNMTKLQNENENLRAKNAELEQQKQQTLPEVEKLNYSQNWNDVQPKNHWCLNKSASEFFIFKPNYLKAVHRGVENSAKLLFAEFVLVPHFGIVYYEIKIIRRQATKSDTISIGLWSKSAGTHLTDIIAMALFMVTMPMASRDFPPLMRATRSDSGPI

SEQ ID NO: 147159 - protein, 55 aa, Heterodera glycines
MSGIEPLDGSVLSSGTNWAIVTKRDQKKNDAQIQRDGDEFINGITHKGKDGQHLT

SEQ ID NO: 147160 - protein, 143 aa, Heterodera glycines
MEMENQQQKVSLDQIEHLQNEQKRKDNAVKKELKKIQMKMITFGFAPIKWTKLEGTIVSNFGTYAYSNNGSFTIDGKWMDQKLDAFQENDIVGCGINSATRQIFFTKNGRRQDELFPFVSLLTIGNEIEANFGPHFKFNLATL

SEQ ID NO: 147161 - protein, 426 aa, Heterodera glycines
MTKICYSESFSLWLVNNGILLKNAKWRKFLLRKGFINQAQFDQIKPSETDLKWSEKNCENELGIQKVMKLFTDTQCEVHFSVIQKLIGKFPGLTKPFADKAWALPRYRNYALFNAEEQIELYKFIFNSDEKTSHETETKLAMKQLIGMAKEREESLFKTPEIADEIRNAKTQTFTMMALSETFCPSKEWPMDRMLCPLGQYVQFLSEMAKNRPKIEWEAPIWCFAHDINEIFAWVRQILFGKRVEFFKNYLKRETNGKDDEIIRIIREKPGAILRLHNFVQHKLIEELWKDEQIREKLYNVNFFSNKSRLLHNYRRAMAKSSSPIERLGARLAADIAAMANHLSAKFPKVQPHLRAALSSCQSFSPPFASNSNLSSFSELLDVVWVDLRFLYDKSDPTICDERIYKLTIIFVSNYLSGVLVALAIS

SEQ ID NO: 147162 - protein, 287 aa, Heterodera glycines
MGDIKKLFEMNGITFNESGEFITANEIEEKGKNMQRNETKKGKGKKKRKTQKINKKEAKEKKEKQKEKEKKAEENLMEEKEKAEEKTTEKLEENSPENEKELEKMKVKSGKNGNKKSPEFVLLEGNPTEFVEKHKDFIVINCVAEQKSDYEKFCNFIRGKIRSKMNNLMDKIGMKNSKEIEICEIDTEINREETFKIVGELVHREFSINFGKVWLFGIKIPANGNEKLKEHLRNFDIEMKMEYLQQLGLLSVEMDETEIINEFQKLGANVLSTVAKKWFLMDILEEK

SEQ ID NO: 147163 - protein, 16 aa, Heterodera glycines
YYNYDLVKNMRMSDLG

SEQ ID NO: 147164 - protein, 338 aa, Heterodera glycines
MYGNVGGVSAVSRPAGGGGAGGHSAGGGGYGGGGGNSAGGGGYGGGGGHSAGGGGYGGGGGGGYRTGGYTGGGGGGGYRGPRTGGNAAVGAPFRRGGKPQRPKKEFVYTDEMRAFYNGFDPGRRERKLTAPPVELISASFKPGEVIQGDVIMSYLRDRLNQEEPKLDVHLDGGESEEPKMEVHLDGAEKDVHLDGVELEEPKMDVHLNDGESEEPKMDVHLNDGESEEPKMDVHLNDGESEEPKMDVHLNDGESEEPKMDVHMNGGESEEPKMDVHLNDDGVEFEEPKLDVHLDDGKPESKLETQLGEINEISVKGFSKSLITNSGSDQRYHSSHQGQ

SEQ ID NO: 147165 - protein, 88 aa, Heterodera glycines
PPLRKGAPTAALPPVRGPRPPPPPPPVYPPVRPPPPPPPPPPPALPPPPPPPPPALLPPPPPPPPPALPPAPPPPAGRLTALTPPTFP

SEQ ID NO: 147166 - protein, 92 aa, Heterodera glycines
MGENKGQFALIGGGATASKSDDIFVGTAKGKMKPQKALYVAFIVGGVLIVLILALSLLFYLFLCRKRKKGYYAVNEQLASAFAKKVLFYLFC

SEQ ID NO: 147167 - protein, 73 aa, Heterodera glycines
MSKIHDFCGDELPAQLMSAKNVLTLTYVLKSAFFAQNPTQNTRKWAGDWRLRERDETEDEHFGWRFFLFSSDI

SEQ ID NO: 147168 - protein, 66 aa, Heterodera glycines
MIILHLFLFLSSILCCFGTNGVQRNEHQNVAEVQLNNVIDPNDLSSPGNFVEDDHPPKFFRMDMSK

SEQ ID NO: 147169 - protein, 69 aa, Heterodera glycines
MSNLDQNRTIILIKLRNGQDKRTSSNYMDLESPGSALSSVRRSDSGKSPKKVPRFAESPASSSRSSALG

SEQ ID NO: 147170 - protein, 85 aa, Heterodera glycines
MFRIPNPNSDKFLDFLIFLFLAASIFYSNLSVWSDNKLRSHFIVSGNTSEKIDNVFGIHIGIGIIVIILGEVIVIDVVIECAVMF

SEQ ID NO: 147171 - protein, 97 aa, Heterodera glycines
MNRRWICNDVWMDIFPSFDRPQLGLKLALLSPRFNSLVDKYFDGKSELPIWRQIVIRRKGIGPEMKLYVEMDYVFVPFPLPDRPLPSKIRFEWLQIE

SEQ ID NO: 147172 - protein, 334 aa, Heterodera glycines
MPDRPLPSKIRSKNLRIGYTDHSVIAFLRSNHQIFDKRGTNLHLRIQSSHTTEGQRIWDIFVREIWPIFSENIRHLGFPHGDQLDHLLRQISPTILIDLNQLVSIHSFGLSPAAFGDDFDGPNSTISAGQALSKWLHSPRNDGQPKRLRCVDYNKQTDLDWVNNFKEHFLRANAISSVSYQILFSVRVPSIQMVPFELVNELTKEKLTLTKANENDWENWIMKRCKIGEAADVQLQKDENWGNNFNNVAIWLFSTDCIGPLSPPSAEEEQEAGQNSEKIQQPEPIQAQNLPAEPDELSPQTPKTVRCSPTPRPVRERRPVVRYSPEPVARRKRK

SEQ ID NO: 147173 - protein, 126 aa, Heterodera glycines
MENKQPEQSVEVAPANPGEELSEANATEEALLAPEEEAKTAPMPAESEVATQSEEKENVPDHHPEELNSCAMESTRLIPPTNHFFAQYCAELVGRLLEKTSQKDGFHLRKELNGIMTKYEAMTIGK

SEQ ID NO: 147174 - protein, 97 aa, Heterodera glycines
HNGTGTNIGSGTGNSHNGTGTLALRRPWGCPPLVRNVDRRRPRRSRKRTRGPYSDNSDGSAFTLFHGMHGSFDTWGTAGIDEWDQSAQSVHNYGMVG

SEQ ID NO: 147175 - protein, 247 aa, Heterodera glycines
MITGENRLFAVDSDNPSAHTSATIEIMSPEHRIELCVIDEIQMLRDPQRGAAWTRALMGAPADEDGDCVIHFSKKGILDMARRLKFEYKKECAIVFGDLPPEVKREQVKRFNDQNDPCKILLATDAIGMGMNLNIKRVIFTTLKSRDGSLLPAYFVKQIAGRAGRYASAYCTGEAMALDDADAGLLEKLMNEPIDSIDQAGILPSFDQIEQLRNVTFSASPQSLPVLTPFLTRLLSKWSDVILRAMQ

SEQ ID NO: 147176 - protein, 128 aa, Heterodera glycines
PVPTDIDISRAQQPKAIGRLAAEVGIAQSELELYGHSKAKVSLAVLNRLKERPNGMYVVVAGINPTPLGEGKSTTTVGLAQSLCAHLGRNTFACMRQPSQGPTFGIKGGAAGGGYSQVAAMGALRGGG

SEQ ID NO: 147177 - protein, 59 aa, Heterodera glycines
GINVVQSDGEKRHLVGDVNFEEAKAVAGFLTPVPGGVGPMTVAMLVRNTFLQAVCQKLN

SEQ ID NO: 147178 - protein, 55 aa, Heterodera glycines
MFRIFGRFVGTYPIAFLIFSLILASLSDSEPLKKPIPGPGFHVDLDLDFLGKNFE

SEQ ID NO: 147179 - protein, 67 aa, Heterodera glycines
MPGETVPKPYPSQTAFSPVPQRWRKCSGAKSRASERIRPANGAGACCAGRALAASLWSAGDRLGHFV

SEQ ID NO: 147180 - protein, 582 aa, Heterodera glycines
MRWLFVSILVFGQPSNSLELWNKYKDQMYNPQGIISAAIRQAREQEALADIDWRLHFFNSSCLHCGLPDPPNSKAKNINLAVEEAFFGDDDLNMSPGQQNPRQQQNAPPPLNSDQQTVFDAVVKAIQSDPRDPTVPRRFFIFGDGGTGKTFLFGQIINRLRKPPYTYKVLATASTGCAAILLPYGKTAHSTFRLGREVSLDKLPSIPLESFFARRIREAQLIIIDEITMLHNTVIAVIDRVCKEMAIRQHKDLLFGGKTVIFSGDFKQSLPVVPHEGLPAQVTACFQTSPLFGQFTTMKLTINQRLGQGQQAYLQMCRQIGLGETGEHFWIPPQFLVKSREELIDFVYPDFQKLLGNDKELLNRLILAPHIDTCDEINEIMMANVPGQVREYLSSDKPLDERPLDIDEIESEVAALNRRTDSGMPPHRLRLKVGSVVVLLINKSDKEGLINGTRIVLEELGDDRLVGRVINSNAVGGQVKFFIERTRNVYEDKTPGGLKYERLQFPIKPAFAMTILKGQGQTISTVGIDLERDVFSHGQLYTAFSRATDGSNVRVYAPRRETDAQDRVKVLNIVATKMLNLQ

SEQ ID NO: 147181 - protein, 54 aa, Heterodera glycines
MANLLVDRMKLMLSTGDYADVHFLIIPAHRAVLNCGSDVFAAMFRYEANKAAAN

SEQ ID NO: 147182 - protein, 43 aa, Heterodera glycines
CFAVPRTGMQWMSFNLQEIRLAICGCKKLLGNELFFEVSQTPY

SEQ ID NO: 147183 - protein, 109 aa, Heterodera glycines
MEQDFPHDQLQHFTVHGHQGQQREVHNPVLIWYNGLNHFQTILGPEQLNYPAAHDIVTNQQYVTPAHLLQDAMDVGPSLAGPSVAMQEEEFAEEFLPTKKFCSSDERRI

SEQ ID NO: 147184 - protein, 114 aa, Heterodera glycines
IDSRMAFSRALLIVLSASLMKYTEDNCKSEKLREIILETIGLYPHQYSYQARHMKQVSENHMKQVSENRFGNWWSAVIISERGGYGMSAIYDQHQNTRRVEYGQGMSQAKARPG

SEQ ID NO: 147185 - protein, 234 aa, Heterodera glycines
MANSTRGGQQQQQRDGEPSDGDDDEGDAVQRHSDEALLDALRHQFAMLRLDELRERLRHRNCIGGQIQPFSAAFGGRRRTGQCGGESAHWQKGGGTNLHGIRPLTAHQKGGEGNLFLAVLKYYLNSFYPARKTDDAKKPYNPILGEVFRCRWTLPGVPLSASRTAGGPFPGSATNQMTFIGEQVSHHPPISAFYVEHPESGVTCASHIYTESHIAGLTSVGVRNIGRATVRLQN

SEQ ID NO: 147186 - protein, 103 aa, Heterodera glycines
NLLQNYVGSYAAMTSNGALVAAKTPPEVQREFASLAKVPLVAGTVNRGSELIGAGCCVNDWIAFTGLDTTSAELSVLESIFKLGDAALSAISTDSRDLIESML

SEQ ID NO: 147187 - protein, 177 aa, Heterodera glycines
MSAELEKEKKEKEEANARVAELDDRVVKLEKENEDLKKENEQLKQALKADRTKSKRPAESEEKMSRMEQNFLDAERVGGKGGEEDKKKEKGEEAEKDGQVEEMEEDKKKKGEKVEQKEDNETKKEGEKSAEKEGEKNAEKEGEKNAENEGEEEKETEENEAEEDDGQGSKAKRTRFM

SEQ ID NO: 147188 - protein, 47 aa, Heterodera glycines
AGLSRCSPHCATITARAPPGRPCRRGPWSRHPIGARPPPARLRPLLA

SEQ ID NO: 147189 - protein, 143 aa, Heterodera glycines
MPSRTLVRHCIIIRMYTPSFSLVPLGHPAMSDSLANRETPDNLAFLAKMRMTGPGLPGPPGMPGMPGPMGMPGTPAGPGMPGQRGFPGMAGNVGEPGRAGLPGIAGQSGQRQADGGYCPCPPKRKQQRSMLVVGAAKRSLLFP

SEQ ID NO: 147190 - protein, 249 aa, Heterodera glycines
MKIEEAYSSASTSSQRTIEPSQAKQKQKVPTMFTSPAATSNKNEAAKAKWGQKGTQFTLKLAASSKRSAETAQTKGEQKLQKLLLSPKGNEIVQAKWGQKVPGLYTYFEIAIDCGDCFLVGVSPLLNANLGVNLCELPSAIAYKSNGQFCANGDDIIRHDEEKPKSQSEIAYGAGDVVGFGYNANAFFGTKNGELIWTHDNLIRSATNDAKLFPTISFCGFGNAKIKANFGENPFQFDVANYVLTKFLL

SEQ ID NO: 147191 - protein, 112 aa, Heterodera glycines
MMGTNPKSGSRKISWGPDQIPINPKRYWKNDRDEFQVGIPKNFVGSRSNPENPKRFWKNDQESQVRMRKNFVGFLSFNTRKFFAVALTDTAGLLFPKKLLFFKSSFVAARMF

SEQ ID NO: 147192 - protein, 68 aa, Heterodera glycines
CVKLRPTPNDQFPLHDEMVAVKFCPDRVSPGFGKKHYRKVDCMLYKSTMRQRNVVKLTIAVGSRRKNP

SEQ ID NO: 147193 - protein, 109 aa, Heterodera glycines
MTEELLNVPHLCASFFRLLIFVSDIAAEGIAQSPPQMLDDILRCVKAALDYSFGGDRVRSALEIVNGLAANCVEDSVKKTGKYATMTERLLALVPSGRMGKRNDQNRSS

SEQ ID NO: 147194 - protein, 24 aa, Heterodera glycines
MRLTCQAMVRKLHAELDYARHFPK

SEQ ID NO: 147195 - protein, 914 aa, Heterodera glycines
MYVLMEHRSPERRPARSVHSVERHRLPLLRGRAVVHSSHPSSPHPAAIRCRYSITPQMSSSATSALLGIEEKRRKTSSGQQPQQQQLRRRQFVRQNGIMATDNEQNDEANNRGKAAEEHHQPNFQQNKSGERAREAVPTNDQQRQQNISNWTPKKLSSSGPSRLRHVQPPPNIKGDQNGPAVSSSKLQKTQAHHYDSSNGCERIDQQQQLRIAVGRQPLKYASSKVRPVKTTMPQQQIEKGGEYGDKAHKNREEEKENTVRKRISNSTPRRTTPNTTRKELQLAVTPNHRQQSDVEVIMMMHNDGRQHKQQQKHQNCNDNNTYEQISWDNCSGNNAISDNNNNNMMRVVVPTRAVAMTEWPPPTDEEPQQQRKRRKAMMELQQKGLSRSKSQSRNNLLLAQQQKASLEHFQMGRSKTATNLAFVAGEYSTLGVDTLSLNRKGGGGPFALLRRGANLRKLSLQRCRPAFSGAQSAVVDLFDALQSDQRREERERAEALPNGQFERIQRELKAFAERRHLALGRRRKVRIAELGLDQLHAQLATKQAKADASSGTVEGYNYSTKMFQRPRKKPLHEYYNDDDAELEADMLPFFAFQNSFVIQTHLCLVSLALANTVDPNAPQSNGQLIVPARGDFPSASTSGASAPPPLPRSIDSVLYKWANTQPKSVAAVQLDSGGKATATLTYSKLLSRANKVAYHLLTRQVTVNTGGVKERVHLCLPDDRVALVFPNSEPIAFLVAFYGCLLAGVVPVPIEVPMPKRDVAGLQQFGFLLGSCVPFSILRRPPSLPPTPSLLPQRVPPAPVQVRVLNATTTHSFTIPRLRTQTMDGLVSIGLSLNTLENRPGIGHCHRWLRMTTRPYIEYTFDREGSIKGVREERTWHFVQFTLSHFSLSGGMVSTSNARPFSSHWVSRRLQGR

SEQ ID NO: 147196 - protein, 38 aa, Heterodera glycines
MFYFLLNKYYSYCIVLPNNIFIIIIGIIMLIVKMVLVN

SEQ ID NO: 147197 - protein, 83 aa, Heterodera glycines
HILSRTVQSICTTGTVGGTFDYDQTWICALCILNTVQHRHAIARLSHPTNLGRSMQDLRFIIIVIAPSRAKFSKTFFQKKIIY

SEQ ID NO: 147198 - protein, 40 aa, Heterodera glycines
MFAHISMSDHSQMCHQQCQLCKCFAPYGSECGLKMMLITN

SEQ ID NO: 147199 - protein, 169 aa, Heterodera glycines
DDAFHYFSYGSNLLTERIHVHITGAEFVTAALLPGFELTFFDRSERWQGAIASVERKPSARVWGCVWRVSNALATVLDAQECGYHRMDADPSIPPTSMLCRTYQYSNPDKQHNCPSPHYKHVKLILSQGHFEKFAKIFFLNFSFLNFFFSRGGLGFFFPAINKNFNLVF

SEQ ID NO: 147200 - protein, 57 aa, Heterodera glycines
ATENDDHHQTMQHQQQQQNGFDANTGVQLPNVTDFVAGGERRSKTSTRMEAEDGGDQ

SEQ ID NO: 147201 - protein, 214 aa, Heterodera glycines
MNVKRSCHVHGLASWFDVAFDGTNGRTVWLSTAPTEPLTHWYQVRCLIKRPMLVLAGQDVRGSLEMVANDKQSYDMELEMYTDAAAAAIDNDDDGAAQQQHHQRNVLDLKMPYFRYTGQPVAPPPGAHADCPSDQLNLAVNNFLAGGAAGGGMGQQQQQHQQQQEDGEDHEGEQQRRQQRQQYKHHHQQQQRMMHAMKRQQHHHQHHLASSNKA

SEQ ID NO: 147202 - protein, 82 aa, Heterodera glycines
MGYMLVNERMLESFMFARKFLRPGGRMFPTRADLHLALFTDDALYAEQQQRAAFWAQQTFHGVALGASAEPALDETVRQPVV

SEQ ID NO: 147203 - protein, 36 aa, Heterodera glycines
MELRNRSKQMSEKGKEIIKLLIDIFCITELEIHLSN

SEQ ID NO: 147204 - protein, 393 aa, Heterodera glycines
NESLEKLCHKKKKNGWRKLNEVEMQLDKMISQEVRIDESFEKVGGCSSILELLRQKVVVPLQLASNKTTLPSLLYSAPKGILLYGPILLYGPNGCGKTLIARAIAKEVDAYFINFGTSLVGRLWIKNNNIAIISFFRAEKIQAEKIQPCVIFIDEIGVFSCFCNSLFRNDFQLLKTQFLAQWDDLRCNSNCNVIRNDFQLLKTQFLAQWDDLRCNSNCNVIIIGATNRVLDLDETVLCRFSLETVLCRFSLKVHIPLPDEEAREKLLRKILANENLEADFNYAEVVEATQKMSSSELKEVIRFAFLLRYQQVVKLRSVFFSSESMAEQNICNSNVFIALRSSSVANEGSENEAEKIQIKLSHNDIIRAFHDLKNVSMAPFSESVVTEEVVEVD

SEQ ID NO: 147205 - protein, 170 aa, Heterodera glycines
MANSPLLLLPILSLSIFCAFLSEIAIGMPSPFKTPEALDRMDGISPVSSAWTSPTISGCSTPEMGAGRANLRRCASIATDRMPTTYHGAGRGRSPPTLSQQMYGRTTALLPGARDGRTIGIFELIDFLGGGFPRLKEARFFPGIRSQCFSAVRIEIRFGRFCYLPKHTHC

SEQ ID NO: 147206 - protein, 64 aa, Heterodera glycines
MAELTNEIAKTGASIKDIFHERAWLAANIYSVCVRVICETRGEAHVRELISHLGKKYKQASRER

SEQ ID NO: 147207 - protein, 256 aa, Heterodera glycines
MIRKPNSEVGHRRILSKFVNVNKHRFSAQQQQLQHQRTNCIYQRHIGQCAMRLLLNSMVKNSSKNSAVAALMGSLHHQPTSAKSRRQKPMSFFEHILTENGDINRAEGPPPAGGAGQQQKQQQQQQTQTAGGTTQPLQKQQSTALLGGDQRKGSYNKLGDDQMRDHCWIGELGHYSREYHMLWNRIEEEMRENHPYFDRPLFIIARDSKLRRFCRRFVHARWGFDVGAEMGGEAAAVAQMVPDERRRWRWKAAPTI

SEQ ID NO: 147208 - protein, 293 aa, Heterodera glycines
MAKVIADGLFFTPNALVRDFGGVMTVFVYLTSLVFLLLMPKHVEINSVEQFLMICRAMRPLRIYTLVPHIRRVVVELFRGFKEILLVTILMIVVMFIFASFGVQTVGGRLAACNDVNVTRQVIKLKMALKQTFIWDYEFHFYRLIARACSGRKSLSPEWRCTWAVVFIHIYVFSGCMIGLTLFVGVVIANYTENRGTALLTVDQRRWHDLKARLKMAQPLHIPPKPSESATFRRTLYELTMCRLFNQFFAAMVVLNSATLILPWNVEEEEDKHRLLYIVTALSAILNMLFAVE

SEQ ID NO: 147209 - protein, 344 aa, Heterodera glycines
MGSSQGLYNRSNTGDLTHALRQQRTEDNHISINGQIYSVDGPNVNVGVEGHDLSVNGRVYQNRATEQYLEIIQDKNIRNVIVSVPLSLFSRENITVGQTRHIHAECDGNLYIDQSADDCIRILCVDVKKDAAAKNFWSTSGGFNFRSTSVFYNFSVRGTLHIHNSSLECANIECDASLNVTHSPIERNAQMKCGGSLSIDESPMGNIRLNCDGSLRIEKSKMESSQIDVGGSIGIVESPMGSIGIDCGGSLRIEKSKMEIGNLDCGGSLTIVESPAQSLKLNCGGSLNMKESPMKNVGINCGGSATIKKSKMESGRINCGGSFSIDRTPTGSVRINYGGSRINL

SEQ ID NO: 147210 - protein, 203 aa, Heterodera glycines
MEAGDVDIIRQQHIRYYADIDGRKYPTEGPDYDVLLYGTDLLVDGKLYKNAVPTGYINYINRIEERIPVLGSSGRRSVSLPEIPIGGNSDYINTGHNKHDGKPTFGDTKREEKQKNKQKQQKRGELIGGNFTHINNQNNENIGGTQDIGRIQIGGMPPGGALHLNTGGNRNVGGTQMIGGIKIGKMPTGGTFGLDIGGNRNVG

SEQ ID NO: 147211 - protein, 243 aa, Heterodera glycines
MSSLLLSIFPIVFLVCCNAMPNFPCCPGSQQVVAVMSKYIDTFSSAADESTVCSTAKSTVDGIKNELSSRGGCQNGGEAQIVDEIDRQLKNIAKMEINYEDECPYNLGFARAMFDLAAAAAGHAGNGTEWQYMKVQFEQESQAIKAIGQEKNFEVTDVHIGVPSKGVSAHQNVPSPSHVIANVSAHQNVPSPSHVIANRGQHSSVPRKERRTVVIGLRFLRTNKSGGNRIENHFVDMSNIYLK

SEQ ID NO: 147212 - protein, 114 aa, Heterodera glycines
MPNKFLPYELVFEIVHFIRFHKKWANLNVSRKFDRPLLKRMAQWLIIMKKREEQCKGAAKEILNTIFNLLPQHVRRGAIESLYNALAEIANGNCRLPNFKNLGQMGLRAEDGNY

SEQ ID NO: 147213 - protein, 189 aa, Heterodera glycines
MDNANVVNPNPALRPTTTTPAPRKDKDGMATLADRKIVQGHGLETDTKMKCKLRTESENGELNEKLNTKEETECEKTMKCSATFCKANDGALVWNRWSCFPADAKKKACAKEAPNAVNEHRAEWSASKLAEGTDWKCRCRFGANGTEMGNAKFVPSSAPVPKTIRHGNGGGMVLMMAGLIIGKFNDFIK

SEQ ID NO: 147214 - protein, 92 aa, Heterodera glycines
MNRRDVWMDILPSFDHAQLGLKLALLSDRFDVLVDTHFDGKSELTIWRKIKICEGIGPESKLSVRIDDNWVDFQLPDHSLPNKIRFKELQIS

SEQ ID NO: 147215 - protein, 21 aa, Heterodera glycines
MIRRVTTVIRRGTMVIRRDKK

SEQ ID NO: 147216 - protein, 84 aa, Heterodera glycines
MDTGGPSLMGIGYGEPSLMSFYTFLKSLNSLTSFTLPTYNMFNASSLNSIKYPCLLIQNGGTEKQPLGQKCSKNTRKTRFIEFI

SEQ ID NO: 147217 - protein, 60 aa, Heterodera glycines
MVRIGILGMEVRSLIRDSNRSRIGNPSPGVMSFGVGGYEPMKCLLFPPLQILHFEHSHRS

SEQ ID NO: 147218 - protein, 72 aa, Heterodera glycines
MRHASAIQLQEGRSVQKSENGIYNLPNEEKIFSLNQVMRRWHWMNTFGARTESQVIRRGKMGKSLKGQKCSD

SEQ ID NO: 147219 - protein, 41 aa, Heterodera glycines
MLFKPYPALFLQNFGQKMGRLSLFGKWDRTCHEPEKPEPGF

SEQ ID NO: 147220 - protein, 42 aa, Heterodera glycines
QQMEPAHCHVFSWELNSRTPLCYRFNLGISRRVFSNCELNST

SEQ ID NO: 147221 - protein, 51 aa, Heterodera glycines
FEQKVENSNFRFSHFWFKLCLNTRKRTEIQHCFNKRSFEPLLAQKCENRKF

SEQ ID NO: 147222 - protein, 157 aa, Heterodera glycines
MNESAMTEENITYSGSFATTVHYVNTPLANSLNPCFSKYIPPVFDGDYVDIDAIMEINQSEYINKSMLISSNAGREMPKYQSHNATDYIQVYPNATSELRKTDDSLRAPMRRSSSLYDFFVSQQPPVHSLAKKNNEAKYYARNWEFGREVSFRRLRI

SEQ ID NO: 147223 - protein, 471 aa, Heterodera glycines
MGICRWLGRKEEVSLFDNGLRIESSLKILTDDKQCREHGVLEGVVEGRAMYFVKCHTIPKDNSVIKLNSRSARIHITRYALVIVQEVPPKQRLYLNLEDLSVSPEGAVIGLFWDEILVKTKQYLHQGSQASRMPSLKSSSLGQASSSHQQLLFSPSPLYANEGRQTPSPIFASLYANEGRRPHSQSFDEGEAEPPPLKKKSIEEGPYAIPVDLGSERGGGFSVEDLLIESDPAQSKEDAQDRAFEDLQFIEGTPAQFLNQQLVSEVTHFSPNAAPPGLVKPTSDSPFLTFAENGHHKIGKSLSRKLKRQLTGSYTVRHFDFAVHLNSKKYDGDKSNSISYTRESNESANCGALLPTKPVISMADKAISKQSVENELVNCRRKNEPFVTSSIRIDSAIQRGSERLKWSQRSSTSNSQRESSVEREEHRSHSEESSLCENAVAILATQCGMDETNVKVEEESVRLLKSEEEMY

SEQ ID NO: 147224 - protein, 268 aa, Heterodera glycines
KIKKINNYYLFPANVGKTSLIDVLVYDRFSDHVPARSGTIQFPREFSEDGVLTQITDYSGRVQSDEELRSMIREANAICVVYSVDDRRSEERVTSYWLPLIQETLGGSNHNVTSYWLPLIQETLGGSNHNCSVLLVANKSDHQNGGDLVKMAPIMNDYLEIETVVECSAKIIKNYLEIETVVECSAKIIKNVSEIFYYAQKAVIYPFRPLFSVEKREVIYPFRPLFSVEKRELSIKCQKAITRIFKVKINHMFDCLVKFVIQFQLCDP

SEQ ID NO: 147225 - protein, 106 aa, Heterodera glycines
MPAWVAKLVPDWLNHVSHTAPVAFVLVDTLLTCHHAPDRKIGSTVVVALFLFYVGIIISVRLISGHWLYPIFDRLSNQQIVGLLSTAGALFWFLYLIGDGFNMALW

SEQ ID NO: 147226 - protein, 167 aa, Heterodera glycines
MRVPLISLSAFHFVFPSLILLTSFLFPVRSSNCFTTRRLPLSQFAQFGHALLCPNSILLLLPLFSRLHLYVITRESKNMDIKSRNMAIKYGPKIAKYGHKMAKISKYGNKWQKCQNMDINFSKLSAKFLQIYWLKLHMRYISKFFDSRKINNKSEIFAFLLIFDIIY

SEQ ID NO: 147227 - protein, 51 aa, Heterodera glycines; identical to SEQ ID NO: 124998

SEQ ID NO: 147228 - protein, 91 aa, Heterodera glycines
MEREWEESDWKMKLRMEPRRRNGTETNAENVDGKRWEANGKTNNAQDNGNFYGTKTEEKRNAIPGKRAEEENGIKKEEEGRNEPRMVPKPW

SEQ ID NO: 147229 - protein, 26 aa, Heterodera glycines
MLTIAAASHLGKGLFNILCINYLSNL

SEQ ID NO: 147230 - protein, 88 aa, Heterodera glycines
MTCTFPNVAFLTTVRSEAFYGLTVAASLLGLLSVRGLCFRRNVSNRCVTGEEKELKICRPNALSIKIKSNKKALADCAKMLCPKVDTT

SEQ ID NO: 147231 - protein, 125 aa, Heterodera glycines
KNQTEAFQALLQNAQTNPNSVNHSTIYSTINSQLGQFTYNPELDLTFQAWLDRFGPFIQVDGKDLPDAMQVRLLLGKLGQEEYARHAERVLPRLPTDFTLAQTIDKLKILFGETKSIFTRRYECF

SEQ ID NO: 147232 - protein, 305 aa, Heterodera glycines
MAFTGIAATLLPAGRTLHNRFGLALDMSNSNIGPRSKAWQELKETDLCICDEAPMINKRAMRTLDEKLKEIMNNGIAFGGKVMLWTGDFRQTLPIQKHATRAEKCYEQKQYKVGLRCAKQIMSNPIYAEHGETLAMKGLILNCMGKHEEAQEIVKKGLTADLKSHICWHVFGLTQRTDKKYDEAMKAYKMALRIEPENMQILRDLSVLQVQMRDFEGYRDSRYKLLELRPSNKMGWIGYASAYHLQGEYAMALGIIKEFKKNNKPTSNVDYENSEILLYEVMVLTEAGRIEDALNKLEENSELHN

SEQ ID NO: 147233 - protein, 58 aa, Heterodera glycines
QRRGTQVTVGLPNETFRVGRLPPPPFCIIKFFLFLLNEASGRDMKLFLFAFSYHFQRM

SEQ ID NO: 147234 - protein, 215 aa, Heterodera glycines
SKNIAILPRRDSDLEAFSHNPSDGSFAPLVYRPSTTKCLNLRFLSYAGLLLATGLGKTNLSHDGLNPAHVPYWWVNNPTLGEFCFAMIGRADIEGSKSDVAMDAWPPQASYPCGNFSDTSCWKLYTLKDRATLLRSVFVLKIRIKAFAFLLYERFPSSLSSLGHLRYALTDVPPQSNSPPDTVIGAGRRATGWPDLTPKWTPLRAHSRFTDVRNR

SEQ ID NO: 147235 - protein, 141 aa, Heterodera glycines
FRLGHFLRPKGLRALIPRVFSNASTLVHRQGVPIHELIGLVNHGNTPLTRIPTPPPTLGSASPVLSSPQHLCLRPHLHKSINSPNFFNTQTSCMFYSFRQLPNAGETEATTKVAPQQQPSPFNAEHKRKQALEPRRPRSPQ

SEQ ID NO: 147236 - protein, 41 aa, Heterodera glycines
MARDKVMKKTHGNYPAPLRILDVVRTGLVDGTQEGYEEETK

SEQ ID NO: 147237 - protein, 392 aa, Heterodera glycines
DLLPVIRSLLSVVSNALSTSSDTLLTTESVNSRAKESHDEQNLCQFKFDDLSSEAQLDASSRAQMVGCLVDGNCDTFWESGEEERGRTERRLRAANFGPGALLLALFIDNAKDEGFRVGRLSITSPGRREDEAARGDEAVQRGDDEAKHLLDTSLDKVRMHCRLVLITNDGLQLRNFPDGSNVPSMDEKASKFAFGGAQSDAFALFQLLATQVLCDRIAPEGTEDNALRETVLDMVTARGQLMHPLQQFVGTHLANGIQREVQSLRIRRRRNFSYVNALLQLLMRMNSAAAQPIVHAYDHHLLMALSDLWLFASEAVQEKALKAFECLITAGDGGQREGKVPEGTEMGVLAERLLVTVVKVLQIQVKEQRAAAFGTNRGRQQLTKHTIGVSN

SEQ ID NO: 147238 - protein, 276 aa, Heterodera glycines
MHNDSIIVDLSFRVLSADVPGNAPQPPPHSYSKRIRAFRFTSLSSSFKGFIGQFVISARAFVLLLHCFIASQKPSGDHLAACPATDFACASAQFDKSDQTVRVDQNEQQRMMLVGADQPESVAALVEVHSRCQHSQNADTNRLCAMALVSSAQMQNGKTVTAQRKGACLTAQLRARAQSMPPIAAKAATDNQKEARQTQCVSELLLESESWKEEHRLSTKCASWARRAARQGEGRSERRKRMTKRADSALGWSEMAQCGGTSQARVLTNGKGPIRK

SEQ ID NO: 147239 - protein, 118 aa, Heterodera glycines
MRGKDIGLRRINGKGRHGVRREEKRRDAERGKVPLRRWVGKEKPEPAGGKAKGIWTDLANLFISQIWKSSTNWRNAIEKLWKTGKRNAGNFAKRSVRNCANCDKCHSPKQILREKKGN

SEQ ID NO: 147240 - protein, 173 aa, Heterodera glycines
MTKMLKQNGGGESAILLPHQPNSSTLIGSSDECDIVIKSPGLRPKHAVIEFYPKTKSFWLRQLDAKNEQQQQQQQQKRRMDSVPPPPPYPYEDTVGPQNLSDNTRQQVLRDESHSAEGTRRPFCPPQTAVKPQTLPTRWPPNAEAIAKCTAAAIIKWSKFNKKLNEKINNQLG

SEQ ID NO: 147241 - protein, 102 aa, Heterodera glycines
MYQRNILDDPVELSRLLRQAERDHFRAAEQMRTLRKIVEKIAAAKKSVSFRDDKAAANTVSTYMSDLISNRGGGCLCNDTSIFIQEVGSIYYLNAFVIATGI

SEQ ID NO: 147242 - protein, 88 aa, Heterodera glycines
MCNTLMESPLTPAECTSMVETIFQGAISISMELTSEDVLCNLVDKNCSEKTYNKTGPISCEYCKIMHAKAKTEWRSEFRKLKESRLIF

SEQ ID NO: 147243 - protein, 234 aa, Heterodera glycines
MNVFDDPAKLLRLLRQAERGHQKAAEQMRTLRKIVEAEVAVDKGVSFREEVVATNALDLYLLNVLNKTGNGCLCNGTSIFIQQGLTSSFIGGSLGMQIMCSSLTASPITPAECSTMVNTVFQGAVLIALELSSADVFCNLVDKKCNTMTYNNTSPISCAYCRLIHAKAKKVAEHFDSMFSGLKVMCSRLEKQTLNESCKSQVKLLTRKIKQIIEAFLDVDEAELRCLHIFMCKE

SEQ ID NO: 147244 - protein, 17 aa, Heterodera glycines
MIAQNCRKNSTNLRIIH

SEQ ID NO: 147245 - protein, 223 aa, Heterodera glycines
MYSQRIGCRSVMVTDHPLNSNWCYKWTAAGPEKEEGQRYVCSGCRRIKDKKEVPSDTKLPARKRLGESWADSGPKYPHFCQPFSKTELLGVEELSHAEEESAVAVDEGRELPSQPLQLTIELDNAIAGEKANILAFLRTDYDDEQFTTTMSNYYGRIGHLIGFNPVQRNELDEMIIDDDARNLAEQSLDENGLLNADLPFDGLDEIENFARRQARRECYYFNR

SEQ ID NO: 147246 - protein, 298 aa, Heterodera glycines
ARQQVRRVLGQCRQCRRLRGMAYPLPTMPPLPMDRVRRRVPFESVGLDFLGPTATLDDSGQRQKAWVLLITCLTTRAIYIDATRDLSAKSFIALLRRFIARRGAPSRILSDNAPTFTIVGKTLGEFGITGDNPLEFADSRGIQWRFTPQHTPWAGGIFERAVQLVKRALQKTLGSCVLDYEGFSTLLAEVEATVNSRPITYVNGNPEEPLPLRPIDLIQENGRLIESTAGILRTERPTTRTTARTTDETMRHSQQRLEHFWRRWHPEYLMALREKAGWNRQMSSICATVGNVPLLTLS

SEQ ID NO: 147247 - protein, 1187 aa, Heterodera glycines
MDADKIRPILELPLPSSKKQLQSFLGFMTYYRKFIYGFGSLAAPLFHLIKENTPFVMGEKEQKIVNFLKRKVLEDVVLYFPDFKVAAENALRRFIILTDASKFGISAVLCQPDELKNVRPIYFASRQCNKYESKYCPTELEALAIRFGTRKFSQFITGIPCRVITDHKALIPMFRSKKETGNARVDRWLMEVNARYQLSVEYQPGKQNVVADLLSRVGKQSDTEKMENLLDDCPSEVVVIKKLSIKEIKTNADIEKLDRKEWVEQTKSSELKGIYEFFEKRETPQSINEAQSLMDKINNFALIEQLLYFVDQKTGSFRLFVPEKYRKELIKRRHEGKCAGHLSGKKLWRQLCELYFWPNMMNDCLKFALSCRICAHSRKPRKNEPPMQIVKTLEPLELVCLDILSIGPSESENRYVLVAIDHFTKYLIAVPLTNKNSETVARAFVNEFILVFGTPKRLHSDRGGEFVNETLAEISKLLGVEKTVTSGYDPQANGVTERANQTILNMLRKSTGSNWSWDERLPFIVFCYNTTPSEVTGFSPYQLLFGKPANFPGEQDVNWQTNPNYTIDEETYIQLFRENLKDIISIAVKNSEIAREKSKKYYDKRPNVTENKFSKGDRCMVLFPGSNARSPHKKLLWNNFGPYKIVEISKSSAKVVPVDKRAEPILVPIERLIRVPPELPNISTLPRGKNMYRNVLNALIAPKSWTKKKNDRIGPKKLEIEEGNSNSQLGTIEFLDGAMELDKDESYALTWSSICDGLGHEICSKVKCVDLDPVLETSSEMGQTVVKTPLQALLSAFLFRSGSAVSASAAQELVRLVVKSDPGFELILYEGGRRDNVKSGTFPTVAQMEDIWHIWAKNCVLAREILANSGFSTITVINNGKKMENSLTIQMAVPPALEKLTESEKTGWTTLFDNTGLVLERVRAKLIHNAAIFIDTPRVLVGDSSCHQLLAEMRDQTHFVGVERGPLPMVIRALSDCVLSSNVQAVLICVGRDSLVQSETVDQMMEQCVRLKQMCNRFCSAHVFWIPPPYVRQRDKEFGEFVTRLAQLVPEWFVGVTSTGRSILEIFRHGDTFDTTRVAADGWMSREGVKTLAAWVQSQIASFPGNRELGIRTVRSAVHVVRQNRSGDSGPGDRPPLRSITARSGMGRDDHPVSGQQLRMHPYRGFGRGSMSSVAGGRRFSRWHRWQ

SEQ ID NO: 147248 - protein, 691 aa, Heterodera glycines
MPAPHDKSTLRSFLGALTYYGKFIKQMREIRSPLDELLKKDVPWNWEDEQQKSFEKAKEIMLSDLLLTHFDPKLPIIVAADASKGGIGATISHQFPDKRERVIEHASCTFTTAQQNYSQIEKEALGLVFAVQKFHRMLYGRRFTLLTDHKPLLAIFGSTKGIPIYSASRLQRWALILSNYEFDIKYVNTKAFGNADVLSRLIANYPRPSEDILIANICNDTDCCVNFVFEAKIEQLPITAKIIAEESAKDEILQQISAFTKQGWPQKLDDIKLSPFLPKKAQISEIEGCLAYGERIIIPSSLRNNILKSLHFAHPGIVRMKAIARNHVYWPGIDSEIERVVKQCEECHSAAKNPTKATLQPWKAANGVFERIHIDFAGPCADGQTYLVLVDAYSKWPEVWQMERTSSQLTISMLKSFVHRLGIPKEIVSDNGSQFRSAEFAQFCKEFDIKHTFTPPFHPMSNGAAERFVDIFKRSMKKCRQEGKDWLQKVLLAYRTTPNTALNGHSPDELFLGRRMRTRMTLVHPEKQKLQPTNLENFQQFQGQYIKKMENQFNTKHGAKSTIFQNEEPIYFWNLKNNKAIWLPGKIIEKFGTSPTYRILAPTLGRAIHRHANQIRRRFPIELEDNDQVEENDQTQAQNPPHSPIAHKPQTNRQQTPAAEPVHLRRSGRAKQAPQRLDLDPSKPKYGLIRS

SEQ ID NO: 147249 - protein, 100 aa, Heterodera glycines
MDAQQLQQILDAALKKSAEVFAAALNIQNQNLNPGSSTTASLAASINARLEKFNYNPEVGQTYDAWLNRYGKIVQQDGASLPEQSKVQLLVGKLNEEEYK

SEQ ID NO: 147250 - protein, 157 aa, Heterodera glycines
ISVPDPYRGLENATANATKQFVEEINNISQPYLNATTVRQKLNHSLTKMWNYEIFFTPEFCGGLFYYYHNSGLQNQRVLYQRVLYQTKSLNSTGKVFLDPNTLSKDGTTAVTLESFSDDGTVFAYGISEKGSESVTVKVGQTKHGEGEDLPDQHNDL

SEQ ID NO: 147251 - protein, 42 aa, Heterodera glycines
MSAFIDKSDDDKEGEVPSQTEDNGTGLMSNILKKTAVALALV

SEQ ID NO: 147252 - protein, 63 aa, Heterodera glycines
MKFLILCLFFAVLLKYSISQKPQKGKKESDDDKEDEVPSQTEDNGTGLMSNILKKTAVALALV

SEQ ID NO: 147253 - protein, 114 aa, Heterodera glycines
AALSCSRVLACLFYRLFAAPLSPYPYELYKCPVWQFQLRLGIILQLNGSTKAEEITMSPGITHHWPLAKLSVTFTPSGLPPLPILGNDFIANRSHAALVPEWHSHLHCDSEFAA

SEQ ID NO: 147254 - protein, 295 aa, Heterodera glycines
CVQLSVKEVMLEMSELQSAEGTQKLNSRQPLASCTPSCSCRRLTAQAAHRMGCCCIPGLPGPPGPPGRSGVPGRPGAPGAPGFPGRPPAICEEVTICEEVTPPPCIPCPPGQPGPPGSPGEVGSPGPVGHPGRPGNDGPPGPQGPPQGPPGIQGEHGDIGREGTRGEPGRPAISTPALPGDSGPSGEPGPPGFPGPPGFPGEIGEPGRPGSEGLPGPQGPSGAPGPPGPPGRPGEDGTTGHQGPPGERGICPKYCALDGGVFFEDGHQGPPGERGICPKYCALDGGVFFEDGTRR

SEQ ID NO: 147255 - protein, 522 aa, Heterodera glycines
LIELLFFNSAYRICSNYSPVSINFAVSTFALHDDQFVFVTGSHEHLGNWETGKALKLDKRENGRWRWVGLVNLGADVLKFRYFIGYYLQSEEDKGPVLAVSKWETHSTPRCVMPPVEASTAGICRANLRCVMPPVEASTAGICRANLRDIFGFSGGREFFSDGWVLTDEMHQILMTVSGEALKFYKQKHIREEYRLKMVPFDLRRKSDWKGHKIKLGRNDRKRGEEGHLATSKITHFSAHFSLSLDAPKFRDQEEFGEPFHNKVDYFMFRTQSVAVEFLAFRLEVYSKFRLEVYSKSDKLVALGYALPSTLHDTFGRTSVPLLTKLGVPVGKVYFSYSYLFIRPLRLPHPNPTMHNCYAKHWKKRSTLEVGHRGMGNSYTKCAVARENTLHSLSSAYKNGADLVEFDVHLTKDKIPIIYHDFHVMVWVAKRLPTAAPPRAAGQRMAKRMMDFYQLAVKDLELKKLRLLHAKRMMDFYQLAVKDLELKKLRLLHLDLDHPSQREQLAQCVILRTIDGSPVHMT

SEQ ID NO: 147256 - protein, 78 aa, Heterodera glycines
MRPGRHDHFTVKCTIYLRNTVLFVDTEIGLPISQRVIFGLQNIDFIEELKIHIIVSFYCVFIVVFFADKLKFVLIYFK

SEQ ID NO: 147257 - protein, 304 aa, Heterodera glycines
VHKNIPREKYAEIWKLVENPIVILHDGFIHFNSVQLQLDEEVRFTCQLLGAELALPKKELYDAIEKVLYGLIKQNDDVQQSLSASITLFHTFCLNYERRKAALETIDKYVRNLIEQPNEQKFLKIRMSNKVFEEKVRPVKGALEFLGAIGFRMQKSVPTVVQQPDGTSATVISNEPYLVMTPPNEAYVKALCKQLGEALVQLKTGEPIQLKLFRDAKGIFRETEKFSSVRAFVAEHISFKHGMFNLIPAVPPQKHGRKQLREENNTLKEYGLDQSGVVNFSWDSETQEIITQLPDDQQPVFILQ

SEQ ID NO: 147258 - protein, 161 aa, Heterodera glycines
MSRSNDSINDEITPDQQRQEASEEHRVPMPSNLSPSEEWRLLSARMEELKRMNASGTVKWKPGELICRDGGAETHRNNDSFARMEVELRETKHLCTVTKLELENKALQSEMKQQQMMDELSSVKTQVDKIGQEQQQQKKEQQEKQEEDAKGKYGNIKGILR

SEQ ID NO: 147259 - protein, 346 aa, Heterodera glycines
MENFTAALEEQQKKIGVLENFVGVVKERFGNAGFLLSDMMGAILSSDPDCSLFAKNPIPQENSGIFYYELEILNVRGYISMGLATKAMPLNEFVGRSNGCGYRSDGLFYIDTFCWDYKKAACSRGDVIGLGINLATRRLIFTKNGQRLDPSDLFFPPSADRLFPCVSLGSPGDKIEANFGPNFKFAFLVNYLFGMIKHLIINEWRTVFAKCAVPTTGSAVIFYFEIKVINEKQLTTIGLATKQQTPLAGRIAKRRGIFAYESDGDCSTEGRNRRNRRRQFGDGDTISLLWWIRCLLIRRYSLLFLWVIPATKLRQTLGRTSNSTSPPFSDLIKEEEICWKMAYFVF

SEQ ID NO: 147260 - protein, 426 aa, Heterodera glycines
MNLDRVFVNDRSNDNEQNLLYAYVFDNDYEVVESSYDILEEHNYSKRSRMDVVGGESQVSLNSDIGIAGPSRMSDSQFEERRRTEYLKRKRERERMRRENESQNQRVLRLEQMRDRNNSQRSEENAYERQLRLEQQRIRQRVIRQGEINVYAAGSYVNAHEHGLGLMNVRCEFCDALHFVGEKISGRGNSFKDCCHYGKVFVPEIPEQDFPEELRDLFMKFDARHVNFFENVRHLNSSVSFASMNPLRYRYPNNRGPYCFRIYGQVYHRMNLALNPESGDEPAYGQIFIVDTEQAMRAMRQSNVGVDPQLLRTVYEVIRNANPFAEAYVMMKEEEDDEVERARNENREPAEIKLLFETGRQLDRRLGYNVPRANEVAAVYVPGADGEVPDAKIVIRECGKELKILNSIDPMVTPMTYPLFYPRGTL

SEQ ID NO: 147261 - protein, 334 aa, Heterodera glycines
MDRRHQSADQSDSIKRQLIKECAEMEEQISQLYERRIKQEKQLAEKDEIIKRLESDLCFNHTIKMSEPTKDEQLAKLRKDRIGITAHVEELWEEDAIREKLFEEKDKTIKEMETTNKETKAELSQTKSELNQTKSELNQTKAALRQKEEENDLLKRKLAELQRVPVKFLDSAVAGVSLSALPSSSSVQILSVQKNIFADYELQPNSLVEHYNSCITEAEQELVTIFNQFGREQAEADQTIKQLEERIMEKEAEAKCRICLKHEFEGTGGTNASTKTYRHIGTQTTEVRASNSWTFVILMIVLFGTFAVCCIILYQIRTIQNAVTLHYVRGPPPA

SEQ ID NO: 147262 - protein, 134 aa, Heterodera glycines
MQRASSRSGRRARSQLWKRTWMVSVCVARDREPARSQTPTTVKKSSTTSPSSSSSLSPASALQIYEDAYAYLCKWSRQFSEMDEVIGDWVIFESEPTSEKVRKAHRHFCGATTDDEMNDLYDEIAESQQTLELE

SEQ ID NO: 147263 - protein, 815 aa, Heterodera glycines
MARVLDGRAEPLRVGLSVQPPGWDNCFHVPMRPPQQNSAHALAAALETFAKQYDELDLFSADVCFKVSAVWALPGAPVLCGLQAAGGPAHAPARLPGAVPPVSSLWLGRPCAREPGRAPSRCADCLFVFENADCFEAHRRRVDPPPPPGWQHDRRRGRPHRPMCEERRVCARCRQVVWTRHGAHACALNNNVGRQQAAQQQQQCDRCFGIHDAQWTPHFIQPKRAQCQLIVNDAVRPPVPAEGLDGDNDDDDDDDDNDGDADDVDDNDDGGDAEQNRQRRRRRPLRFLFWDVECAQVADENEEGDEGVPARVLKHVPLLVCAEVICERCVAAGVDLEREPDRRAPGCCCGGAAWRDGQHRQWLMRAREDAFSDDDDDNADGGRRWRRPNPRRLRFFHDAATGRSPMAQFADFVLHDGPVNVRTVMLAHNGGRYDVHLLMEELQRRGVRPRRLVATGLRVYTLELGGRNQRSVVAKDSLNFFGCALSKLPAMFGLDGVPDKPFFPYNYIRAENMDVAHVGLPPAADYDPDRMRPAERDAFQRWHAAEQQRRPNRLFVLRRELLRYCANDVRILRRACLRFRHVVGELSGGVEPFLAASTIAGLALAIYRQQHLPRDLMVHTPEGGFLRGRRASAASRHFFALLERLRPQWRGRLRTARWSIGEACVEDDGYRLDALLYRPVPLRPLVIEFNGCFFHGKEGGGLLFLHFFHLPRPRLPRVLPEAPSSVGGRPNRRVAVCQDTAACLGAGAAPRLRGAHGVGVRLPAVAAPPAHPSAAPVHGCVPGGARPDGPAPGRAVRRPSGAVRAPLHVHRARGN

SEQ ID NO: 147264 - protein, 401 aa, Heterodera glycines
MKYRAFPVGLPRVLSAEQLDRVRLPWTSVEQNPYRGFFHCRVLPPRPAELGERHALLPYRTRTGRLTFPLCAACAEWANADKKVQRQHRPVPRCRHRAAQRAWTHAYTDVELNAALQLGYRVLALYEVWHYDRWASLEAGNSLFAGYVDTMLRLKVEASGWPADCQTVEQRARYVARYADREGIRLEAGRVQPNPGLRAVAKALLNSLWGKLAQRAERDDVCYTGSAREFHELLGDPRQDVVDFVHLNEQLDRCVVRRRWPFVRAPDTNNLAVACFVTAHARLHLHGRLEEVRLAGGRMLYCDTDSVYFVRARRPPGPQQHQFLRSEGDAFGQLMREWPGRRIVQFFSAGPKNYGFRHRCAASGGDERAERKVRGLELTYTASQLLPFERMRQLVLNFFGR

SEQ ID NO: 147265 - protein, 241 aa, Heterodera glycines
MDSFGTVAWILRPTAQTTGTAVGSMEYEEEENGTGKLVHSDTATVTTPTTAEFRLEKEAPSSEKDGAEEGSGGHGTLLFIESDDGEEEEEEEDEDIEDTPVATDSPSATTATVVDDSSNTVKGVEQRSSEHSDMTNGTGGGGGSEGAKLLGGGEEEEPVRMPLLNYLCAFNDCSMKELQLLFHSVHARQRMVSHLQQHCRLHTAHLKPAERNIALHCHDLSVQNANRTFACGGYLELTVIR

SEQ ID NO: 147266 - protein, 434 aa, Heterodera glycines
MTLKHTVRMLLIPEDVYRRLMDNPSAAAATSSTTCMNKLPTPATPIEHTARKMVAASSKHTNDDERLIHYQQEFKRYQKLLEEEAERPLNVQLSQRTTNALRDTVLQKASPATATPPPARPQRTTPLSRRRGLQHQNQAPSASSSSSTRPTKSSSSNEQQQPLPQQTAAPQKIGDLPKQAEPRIHAAMAYAQQNPGLLGVGGEDGQQILHLAQGAYRPIRGSNLDTLLRYHFVGRHQQQQQPRSSTTTPTASVAKAPPGYKTFVNNARDDLQMWRLLFPDERAAAAGSDSASTVGGQPRRHQPLRGQKKTGAGRLLQPNHHAHKSVQKTSIMVIGSNAVRSLMVESLLDPIYKDERSPACFTSVEPLLREAKRRHPDARLTRAEISRYLAGQRVYTLHRQVRRRFRRLPTLASGLHTDWQADLADFQRLRAQNR

SEQ ID NO: 147267 - protein, 32 aa, Heterodera glycines; identical to SEQ ID NO: 127531

SEQ ID NO: 147268 - protein, 107 aa, Heterodera glycines
MNGSIENDHEIYFYFLINTYSLNLLKMSLFSKQMSEQIASSIKDNYATFFPNSKEAKFAHKSNTAWDDLTNELNANFGSSVTVKQVKEKWHNMTKDSNRRFVDRKRS

SEQ ID NO: 147269 - protein, 83 aa, Heterodera glycines
MAKIPQIVLVPSIVPVIVTAIALFLATNGPHNWPALWQELINPPSDARHAIRGPSPYSAHVRLSQAGLDMRRAQLMVSDRRQI

SEQ ID NO: 147270 - protein, 28 aa, Heterodera glycines
MFNRFGPRYVFLFLTRELSVYVEFSKNV

SEQ ID NO: 147271 - protein, 287 aa, Heterodera glycines
MRKLSSSKSLKISAKLDGERKNAFLTKPIKSLTDGVQPNVGGPVFSPNVFHEQNEEDKEYEKQTDNYVPFPLYWHAVLEHFDGKVPAKIIANILGRLITALKLCKGNHDYDVITSVIDFDGILTAEHFLALKKTDGPIFQETELRGDIAFIVKKIDVPANTRLAYMSPEQVMHNSYNHSTEEDIVWSLGVILFTMLINRHPLQGMANEHFNLAQQNANNNNRTVDIGTFLANSSEDMLPKWRKMITFYVRSEQELPLEYLKSSVGVGNDHVLLIPVIEVGLYERRDR

SEQ ID NO: 147272 - protein, 246 aa, Heterodera glycines
TIGECHVVNHTSSLNLALLPILGNSVAGKDLVSDRKLPFGSKSLIEASCHLKNHNYDELSKCAILSPYNTVVDKYNEEILDLLPGEQIYLSIDETDLSKNPVTPEILNSLKCSSIPDHEIKLKKGAMIMLLRNLNVKEGLCNGTRLQVTDLGKHVINCIIKSGDRIGEQTFIPRITLIEEKKFPFLLSRHQFPIKLAFAFTINKSQSQTFSKIGLDFNDDPFSHGQTYVALSRAKSWNDIKIKLSE

SEQ ID NO: 147273 - protein, 338 aa, Heterodera glycines
MIQNAFIFSFICFFNKIFFAKNVKPAINLIKYSAIISPPGFYKIAIWDRFEKKKAQQCKNLFEEVEQEFNGKFHAVRRFKYYDGIELEYFAECFENFFIAQTNEDGEFDVNLMGNIGETIFFQIFPLYNNKAPIRSDSFPSTFLQSIHRKPDWRLCVHFEQHFYFLIHKEKKTKIGTMLDNWQRSANANPSDEEAFFLKACLQEIASRIVDTFTKGIKLTNNEISIQRKYWSAFQQMKGHGILAGKLAQIDGMPKLMKDLCRFTVADYEANSADGFEFNDKLLPLAFFCAEFITNGNEKHESILERMKLVKFEKSGEEMNKCRHYLFYHFYFLWNGIN

SEQ ID NO: 147274 - protein, 351 aa, Heterodera glycines
MRRYYGTDFMDFISEQGEEEEIGLNFKQGIVRVGHVQLPMIAAINIECRPIEVRLLQTHTLPPLSDSVGWGRINRNLSPEETFITAEREHDYFPIRVGKCLTSPGATRIVPLRLLNFGNCDIKVHGGSRLAVLEPLSADTHINWLRKCTETEESMLMNDEEWHKFKAESDQIPPEADWTDETLAFPKNGEATKPILERISLKESILSPGGMIKLRQIIETNEFVFVKPGEVGLFKGKTIHRIDLTEVARPCQQRPYRYPVALQPEIERQVKELLRQNVIRPSSSAWASPIVLVRKPDGSYSFCVDYRKLNQLTKRSTYYLPRIQSILDEVTGKKYFSVADWLQWILPHKIG

SEQ ID NO: 147275 - protein, 185 aa, Heterodera glycines
MGRKEEEKRNEEKKREIISNFYKIKEKIKEKGRKYSTKEWNKINTKIAKKLGTNRQYIAEWIKEFGLQKQIHKNYKSKTDEEKLEIVQNFIEMINEYKQKRKYTRKEWQQNYAEICKKIGVGHGTIYKWKKHFGIRSKITEKEKMEKMKIYWQTKREYPEMSEKEIAKMLKSDRTNISKWKKLFG

SEQ ID NO: 147276 - protein, 198 aa, Heterodera glycines
MPLTQLRVYVLKCLIATLLSGHANTVAVLQFALNSEKNKMQMHEILRNSMVGYYSQNLEATPASAQQFGGIGSAGSVGAGVNPFVPLKGQGEPRMFGASSSAAASGIANAFTMFRHQHADQQQQMLRSLRSTPGASDFHDFRLTAQIPPSPSNQQQAEFGDDLATAVFSEDIQEEANSYFQQVSFVLNLTITIFHCRP

SEQ ID NO: 147277 - protein, 132 aa, Heterodera glycines
MNTPTAASSRTPTNVLATPFIPSSQMSMTDVRTPTTTLHGVIPSHHPPPIVGHPAAPIMSAERMALPPGIFSEGRGAFCPAPGNELGVRTEDQILQSKVENILREWISICYTPMAQKDPQHALAYIVQMVLS

SEQ ID NO: 147278 - protein, 121 aa, Heterodera glycines
QGGVRCLRRCMCADGARTVSDSDSNPAQRRRLSRRRIQKTAAPPSNTIIFNDVQQPTALEGEQSVRQRCQNWRCFRELGFEEIWALWVPFCSVIPWPGILLAQANILTFYCLQDSTKPQRH

SEQ ID NO: 147279 - protein, 198 aa, Heterodera glycines
FADNYAQVLRERWHLGECGEDILILIVKTPPQMQSTDGPQSSAHSRPNGPFPMLFLSLGPLITSRLHPDFAGHALRHILFDANAQLQHDARPLFKVLNEMLLRMDAEVFGALAPAEFSAGVGTAPSSFVSTPHARHRHSYADGPTVPSRSHIPPWAWSRNLEFNLAIHYGRNSGASRIEARFLSSERCDWPKPRKFEN

SEQ ID NO: 147280 - protein, 153 aa, Heterodera glycines
MANCLTDGFATRAPQCPCRKIILLQKISFFLPTFAGSVLGLPLCLSLVLGPIRPLPNIVPTIILKLAQQTAVWKQKMNPMNSFHSTDYSYHLKRDFKQMPLLFLGLLIRLLNLVFHLRRHSSKIKIGIPCQNGKCIKIKMAWHLFKNGNSFKI

SEQ ID NO: 147281 - protein, 160 aa, Heterodera glycines
MEDDEEEEEKGMSLISRANSVAELEHWLQALKVPQTFAALRAEAERWRQTKSAMAGADQRILAQGGAALKEKLRELAQRRGAGDALVAGDAIATDAFEISDKYYAKAIIHTVPPTDLLTQRDFEKLADCFRRSLEIASSRGFSSVVTFRRLLTFDSLKQI

SEQ ID NO: 147282 - protein, 193 aa, Heterodera glycines
MFVLSIGKWFGHFAHRRREETAEREKERRPNEVGREKEEIRKNREEEEEEQNEKGPAEEEENEEEGQSEQKTMEAEKRQKEDEEEEEEESEDRSSTDENDSFALEDGTSSTDPLDSADELFLEASAFAEFTVSEDGSIWEGTGGWGEADDATDAEYETSVEEMLMLRHGTVEGKRSPTPPSKIGTICSSAEDE

SEQ ID NO: 147283 - protein, 469 aa, Heterodera glycines
MAAGVKTIIGGAVEAVIATIIRTTKVEVIRVKLEEDQWMGQNGLKGEEEEEKEKGEQKGVGGREGEKEEEKEEEEQLEEQKGVRGKEEEEQLEEQKGVRGKEEEEQLEVQKGVGGREGTEMHKNGKKEQQQQQKEQMEPKQYLAVYTAQTCIKRAAEKGGKWQKEQNGTAKAGEEDELSIYSDALEEQSAEEADEPKKEERREMEEGGKEKEEEREREEEKERDEGKDMKKREGKELKERMEEEKKGKERRPSKEMAEEQLVNSETSDDECEEEEEEEEEEEEDDEEVEEYTDEEEELCSEMSQVEREIERMRRESVAMVEEREVKTNTPMKMANPRNNSPEKAAGEEAAGRVADKERTPVDVGVYSGWRSTVMDGKDTVEEENDAEDRTETPKPPKKEQQQQQQKYAKTNDFQWPSEARRMTAAEEKPKQRGNEKEEGRVQTNAEPNQRQGDQQFGGGQWQRDARTID

SEQ ID NO: 147284 - protein, 175 aa, Heterodera glycines
MVYCEPGDMMQGEVYLLATLIVVIFTLATTVIYIIIGIMLKVIRSDQNNSNNSSQSQIEITRRIFKSLAVIMAVIFCFWFLFALIANILARGLITSDPALQFLIIRLVTQLPLIARAINAPVLYFCSSEYREIIKSEFPWVKFLLCSNNHNPPVVVVSAGPQILNSSNIQQMHHN

SEQ ID NO: 147285 - protein, 336 aa, Heterodera glycines
MTKIHKKYCEEIGRGQNIENTLNKMENETENLIKNLKKDPKLQEKVQNMVEMELSKNRKLNEKIQNAMERRKVNSFYDLLNAAFQTFFGNCKNCSIMPQKELSGRRKRRMAKHEMGNTSNTANEQNNFSIAGQNLVTQPTDVHNSNETGLELVTHSSDDNDHQNGGTNRVFLNAELPPQNRNLSPTRQILPEDRATPTQTVDHHPANDHHVDIPPVAHANVHELSAEQGHGAIPIAQPARQNQAVNEQIRGLLNQTYNARQGDRIFVCKFSKFIFSLIIGLWVMLWMSIFKEQLQFDISLSGPIAFFILYLFILLSFFPCLFYHVEVHQPTHNQDV

SEQ ID NO: 147286 - protein, 82 aa, Heterodera glycines
MPVPTVTKRHFVKSIEVFHGDNPLSEPECANLAGFMHQHSPQIDAYLTLHSKELEMKWPMPSKKRAVNTLKLAVVMKFYVRN

SEQ ID NO: 147287 - protein, 78 aa, Heterodera glycines
FGKSAKNGQKKPIMLVDAGIHAREWIAPAVALKFIDSLASDNKYNSILDQLDIYVIPAVNPDGYEHTWTSDRQFCFNI

SEQ ID NO: 147288 - protein, 52 aa, Heterodera glycines
MHTRCIQMRTFLPILTVPKRFSTFWTRIGFGATQLWQIMASKFGNTIIKKVI

SEQ ID NO: 147289 - protein, 42 aa, Heterodera glycines
MPRPGVVCVPGKGHKQIGQTNFARPSNFGGRSEQNDMMNSLN

SEQ ID NO: 147290 - protein, 208 aa, Heterodera glycines
MESHKYQVGRDLNNQNHRLFPTFLDFLRSVRGKKSINIFYPFRAIPTNDSQVLALRHFANLMESSNSRKGTVQFWQHAHTLHSNADIFADSDSAKKIVSYLRLLAENNSDFISFNSIGKSYEGREISYLKFGKSAKNGQKKPIMLVDAGIHAREWIAPAVALKFIDSLASDNKYNSILDQLDIYVIPSVNPDGYEHTWTSDRQFSFNI

SEQ ID NO: 147291 - protein, 53 aa, Heterodera glycines
MMDFGHWRIGKAFQKNDSNANEQSVEGQHQKETMTAHARLIEDLVNRRFYEPT

SEQ ID NO: 147292 - protein, 50 aa, Heterodera glycines
MIREKKQEKEDQRMMKSKNKERNKRPKEHISQLVNGGEHQLDGGTTSIIL

SEQ ID NO: 147293 - protein, 288 aa, Heterodera glycines
YELLNRTIVPYEDIWIPDTVLYNSGNMDKKNSEAVMNAIVETGHWRNDGRGAAIQLMFPAIYKLSCKMNVRFFRFFPYDQQNCSFIISSWTHDMATIDYHYTRPKVNMKNFVEDDEWTVISFDFRREELKFKCCARPWAMLYAHLVIRRKPLYYIVNLVVPTSIITVVAVIGFFTPSSSTSERDEKLYLGINTLLTMSLMLLMVTNQMPNTSNYVPLMGWYYMGIIFVIYYMGIIFVIVFGTILATVVLFIHSRKARLQPLPRPLQIIRKIFKMPFLIIRKIFKMPFL

SEQ ID NO: 147294 - protein, 76 aa, Heterodera glycines
MTNIGEILTYAGSSFKHVINCNIMVADMSDFQAVNETIKNFFTEDTYPARSFFQVVKLPKSAYVMIDVVAIVQGQS

SEQ ID NO: 147295 - protein, 24 aa, Heterodera glycines
CTCGVVVKLSTFHNFSPEFNSPLG

SEQ ID NO: 147296 - protein, 111 aa, Heterodera glycines
MSSKPETLVERMKHLLSSGDDADVLFLHVPAHRAILNSASDVFEAMFRFDTTKNATDNESAGGEAKGPVEVTDIDAHVFKVMLNFIYADDLSELNGDNAMAVLYTGQKISF

SEQ ID NO: 147297 - protein, 410 aa, Heterodera glycines
MPTSSSAHGTAAGFCAVPSPFCSASSSPYQIRDTATSAGTAAIPHLHQGQDGEVMCAVCGDGPAKLHYGVLACYGCKACAVIDVCRFDNDCIVDKFQRNSCRCCRFKRCLEVGMDPKAVRPDRDLTGKQRVPRIRKRALDEELINHMVMIQNLGFESGAFDSLGNDWSRKIPVEARVLLMQLLNIESKVAKGDSAMDRRLNTGVGGITQSTAAQQQNQHQNQPPLPYEPSTATAYNGGKETTTRQQQRELSLRELFEQKPSLNTRRTEMCYEPYRMAQAEELPKIAHRGAIASVDWVESLAELLDTVLLDTQDKPPVQQSDRSNTERIGRPIAQAGPPGGGGGAAEGHHHPGPEHAQLVARGATWRGRTARPCAGHAVPRGQGVAPGAQRSPTLRQSVVAVANNFGAKIE

SEQ ID NO: 147298 - protein, 196 aa, Heterodera glycines
MQNKMNTDFEQILTLLRGQSTTMTDNRVVHDDSRSSNTKSGDVHHQQQNQRVHGNGGGGEQQQQRRQAQAVPPPATQTTVAGPPLLQHFASPYSCNLMMPLSSSANHPAQLQSSSSSSNNNGNRNLGSNNEADEEGDGAEQRPRRHDIAEQQQQRHSNESANNNNKPSSSSSSADGTGDRRRLPITFSPDSADTIL

SEQ ID NO: 147299 - protein, 291 aa, Heterodera glycines
FIFSRLREFIRFYQIPNPLRQRLEEYFQHAWSYTNGIDMNTVLKGFPDCLQADICLHLNRNLLNCCPAFANCSPGCLRALSIRFRTTHAPPTTHAPPGDTLVGDILARLYFIARGSVEIVKDDLVVGICGKDDVFGENPLIYEEVGKANCSVRALTYCDLHVILRDDLLDVGDMYPEFVGDMYPEFAENFCINLVINYKLRDETLTKRRRPTFERQKLQRVSSSARTERRSAPPIGDSRSVIPRPSLKSRLRSDNLEIETRDQSSQNHNSRINPHFSATIFRIRDSPLFNA

SEQ ID NO: 147300 - protein, 247 aa, Heterodera glycines
NLIKTLLCRQINIYFLIKNNFQIFQFIILRCILSLLKRHFCHFQMIAAVPFDLLLVETLLLVETDSDETTTLIGLLKTARLLRLVRVARKVARKLDRYSEYGAAVSDNIMALFCLIAHWLACIWYAIGSAELLHKVITFIVQLARHLNEPYRQNGSLTNGGPSLKSRYVTSLYFTLSTITSIGFGNVSATTDSEKIFTIIMMICGSLMYASVFGNVLMYASVFGNVSASAIIQRLYSGTARYHTEMR

SEQ ID NO: 147301 - protein, 55 aa, Heterodera glycines
MSQNVIMAFAYRIISYFLPLIQVLSLGADVLPEYKLQPSRLNHCTIIHYSPFKGN

SEQ ID NO: 147302 - protein, 126 aa, Heterodera glycines
MPPGTVPMMMMMMMLCRNHLKCRSVCERSHFVLRTNRTGPIHWALDLCKNVRIYKKEKKNRGNFCMGSNGGKRNNEMYALFLFVSFFSVVYFTFLCLLFSNVINCVLLFWSKIELTSLINELLINN

SEQ ID NO: 147303 - protein, 43 aa, Heterodera glycines
MPVNDVVFSDASAVSVGHKWLNPPKMFTIIIKLKKGPVQKANV

SEQ ID NO: 147304 - protein, 69 aa, Heterodera glycines
KRCEHVNCIEQKPKALALRATLGEVEAASLKLGEPDMPMNEIDRAVEVRLERVQEVKKSMLKEAGLETD

SEQ ID NO: 147305 - protein, 160 aa, Heterodera glycines
YPLILISDQGIFMQKQALRDMVCTMRERPDIALVTQPPYCRDRGGTFGAALEQVIDSQCPTQLGTQLSHILEVYFGGAHSRIYLASHAFGFVCSTGMSALMVKDIVEQCGGFRQFGAYLAEDYFLGQAFVKGGFRNVISHLPALQNTARPTVRSFHERIC

SEQ ID NO: 147306 - protein, 36 aa, Heterodera glycines
MKSFILVVLFSFLFMALMMPLVSSEESETKMKSPIS

SEQ ID NO: 147307 - protein, 55 aa, Heterodera glycines
TRVSYIYVFEPDTVLERGIRPAFISNAARFPDVREGYHFRPPLGWMNDPNGFSKF

SEQ ID NO: 147308 - protein, 178 aa, Heterodera glycines
MKLGLIFHLIVLLIVLININYVGAEKKKLQQKTFDEIFGEKWEEKEEKQLNEQNKREIIQKYYKIKEKIKQKEGKYSTKEWNKINSKIAKKLGTNSNYIYKWIKELGLNQEIQRSHKSKTDEEKIEIVQKFIAIKMNTNKKENIHRKNGNKIMPKFVRKLELTMEQFAIGRNNLEKMK

SEQ ID NO: 147309 - protein, 15 aa, Heterodera glycines
MDSKPQEHIPITNFK

SEQ ID NO: 147310 - protein, 267 aa, Heterodera glycines
MLQKCHFLADQSDRNASDDRRSSPFSLHQEVIRAYHDRPSTFMDLKIFLHLLTADEQRALLDFISSILVPILFRANRLDPIWAFPMHLLDSVRRLLSRILQINANGSDLAIAMHAQMVANYCWEFFLRTDDYNVLALLLSFLEVLNKQTQCNPLIPVLLCRIYAIFGITWRINELVRQMDIKFIQRVNFAFFQCFVAENFGQFRTAGNYYASMDLKRTIDNREFSAVKVFLSEATLGEMRDGTLKEIVRRERAKCAIAILNYFRSPI

SEQ ID NO: 147311 - protein, 109 aa, Heterodera glycines
MVYLTMVKDEHTGIEPWERRRESQEDDWPTFAALTLAALTFAALTFAAPSQSDTCGATLAAPTLAAPSQKDTCGADTCGAQSKGHLRRRKIQRPQKYFNNLLKLTELLF

SEQ ID NO: 147312 - protein, 78 aa, Heterodera glycines
MTDQNSEATFAEETRELKAEIGPVFNREKLDKAYKKLAKKYHPDKHKNSAEKTAKFQRLQKANDELKKELLKPEAILF

SEQ ID NO: 147313 - protein, 45 aa, Heterodera glycines
MMGSPNAARTLDELNKVGHDELKKMATAQRGGDWTGTVTIGGQQF

SEQ ID NO: 147314 - protein, 54 aa, Heterodera glycines
MVVTLDGETAKVLLESTVEIKKGPEYKFFHQWLGNGVLVSDGDHWLRQVSPINS

SEQ ID NO: 147315 - protein, 81 aa, Heterodera glycines
MLLFFVAVVLLVFVVWRIFAISSTHLRFIRTSNGIYNIPETIPFLGQAHVFPQNSFAWSSFIVEQSNDAVRKGHHLMRWFD

SEQ ID NO: 147316 - protein, 25 aa, Heterodera glycines
MHNSYVGQIGEKGNIFVLEIINFLK

SEQ ID NO: 147317 - protein, 29 aa, Heterodera glycines
MNGNQNRVKKSEYKRGHCFYFHFNRKREE

SEQ ID NO: 147318 - protein, 120 aa, Heterodera glycines
MQRDNETCQMMVKKHCKCGWARCHERRGWNASLCCQAGYDLVCCTLELEENLIANHGQDEHRLPVLKEMAKNEICSDTVQKYCPCESAKCAQRLDDKYEGSICCEKGFDVVCCVGMLNKL

SEQ ID NO: 147319 - protein, 137 aa, Heterodera glycines
MCKMICFSFSQLFVVLVLICPLVSYALAPSNNNSSKMPTSSFFGQNRSVAGIGILGTFSRPGIGAYLSTWIPELSKTNCSYKAMNVCHPFVWGSCVENDVRVNSHPCCMDGYEWRCCTKASRTNKIMCKHKLYWDES

SEQ ID NO: 147320 - protein, 89 aa, Heterodera glycines
MLFNVLFLFFLLIVQILSQGTNPPTCFVPCPANEEFGYKKCNGCEPSCDKLKPEICTKIACPCSCDCKPGIFRNTKTGKCVEKCSYNDN

SEQ ID NO: 147321 - protein, 395 aa, Heterodera glycines
MEADFHAPWFYGSLSREKTEKCLQSCADGTFLIRNSTNYPGDFTLCVACNLRVEHYRIYMVNDHFTCDKEELFDTLTQLVSHYKRDADGLCHRLVCPYISEECQRQRTHIDLVLVEERKKEFEQAALLLSVDHLRLGTVIGHGEFGVKTLKNGMVQDLLAEARFMIGLHHEKLVFLVGVVIEDPRESEVYMLTEFMANGNLVDFLRSRGRHHVDRPRLVQFAQDVAEGMAFLESRNFVHRDLAARNVLLDDRLVAKIGDFGLAQLANQPSKESAKGKFPIKWSAPEALRQNVSDRWHSLAWWHFDAPFLAVHQQKRCLVLWHFALGSVFLWQSALPPNSHPGCAEACRKGISDGPARGHSPADPFPHGRLLAVVARLEAVLRRNFGHFMPTNSLI

SEQ ID NO: 147322 - protein, 234 aa, Heterodera glycines
MGGVGTEQPNTTTGEQRCSQSASPKDVGMEQEEEETEEGPVDSKDDDEEGTERGHSADPSAKVGSTLAMALVCLAIHRHALLICQCHTDFAAELSLLRRSASASSPLGPASAEPSTEFVLNSLFARSSPFRLLGSTLLNPIAPTTSSIDNDHSDQRRALSAFAPASKSPVTYPTRHHRFVSTPNGNGTSLRNNGSGNGQPPYLIRRAQLTRADELNECQRINRHFAPGNKFCFE

SEQ ID NO: 147323 - protein, 58 aa, Heterodera glycines
AWHPKRLELLSSGANQTVVRWSYSDSDSIWLPISRFGDIVGDEVNCYDITYSPCGRYA

SEQ ID NO: 147324 - protein, 271 aa, Heterodera glycines
MYQPCPDRPVHVMKVPLQQSHCAHCGQHLPTIGGTILKIAQNLVFSLNRWNPNFVQVQTQSSGTKVLNAAAASATDKSTAADSSASSTATSQISTSELPITVDPLLVVANPSQKVPKRHLGDQLDQRLTVSWSNFICTVDSSFIIVCGYPDYSFRLIETGNVQVRQVVLGHGNVVTCLACSETSQHLGLLVGDYNLPGEEPSPRAILTGHDSEISAICVSAEHGIVLYGRYPSDAFHTGRHAAHHHLLERQRNGHIGTNQRHSVQQRLLHC

SEQ ID NO: 147325 - protein, 190 aa, Heterodera glycines
MDRWAREYGTHTHSQEQFGPKEAYERMVPVPHGSQFSITEPGATFDSNTMYSDHFQVSPESFTRIERPQQIRPSTALRLSGNMDMVTGYRTEFQNKEFQNKVKPCPAGELVESLKKEDKSDTERTLIKQNYSMQSNGAATGTASAADAGRANTAQMAQANGGIERERKPLESRQIVAQYIKYAVKLERII

SEQ ID NO: 147326 - protein, 23 aa, Heterodera glycines
MRPILLMTVQKKYCFTNEYTNCI

SEQ ID NO: 147327 - protein, 55 aa, Heterodera glycines
MPAAAPPTPMAEPAPDEGGTGAPANAAGPYPSLSGPRLFVEKPESPVKKSSAIRS

SEQ ID NO: 147328 - protein, 117 aa, Heterodera glycines
MPAQPQPPPPPPPQLPQMPIAPPLRWVALGSQKLDSQAKLLSHVDRAFGLDNLQRLQRWANTGGALDLLKEQFAKIAKNYKPPPALAAITLPPQLDYLLQNPSGGGGGGGLGGIGRK

SEQ ID NO: 147329 - protein, 89 aa, Heterodera glycines
MPKTLCSRARPGPGSRPGFFLDPGPGHFSATWIFPGPGFSWILSRKSRSRSNVKKNPGPGPGFFQNTELYFVHLASVPKSAKKRKISFF

SEQ ID NO: 147330 - protein, 55 aa, Heterodera glycines
MEVKFPSFLDVIFSKFKYAHFNFILVSQMIIRISNMLWFSYVLGRFLKTATMGVS

SEQ ID NO: 147331 - protein, 72 aa, Heterodera glycines
MRRKLNYERIWSLTIAQILMKLMAKTLRILIKIPMSKLRKLIAHYVQKNQVDRVFSLLRKKNAKNRFYFIFG

SEQ ID NO: 147332 - protein, 21 aa, Heterodera glycines
MHPPNFIPKLHGHLQTFLCQQ

SEQ ID NO: 147333 - protein, 33 aa, Heterodera glycines
MTKSSRNSISSSFLMHLSIDAAKLLAKNISCSL

SEQ ID NO: 147334 - protein, 46 aa, Heterodera glycines
MKISLIPTTQMFTPKTSRVRIRVRGSKLVEMNIIFVISALENPKGL

SEQ ID NO: 147335 - protein, 69 aa, Heterodera glycines
IEKFLCLTHQNKRTNDNKNNSSDSTLVAILRTVADAVAQPAHFSSSSSMNCDTAVAPVAPLVPGVDTTS

SEQ ID NO: 147336 - protein, 113 aa, Heterodera glycines
MLSTLEELGAIPCGTQLAFFCGQIVSILPSEKKLTALMTCASCENIAVTEFKKVIKMSILKAQRFVVERFDGSVYHTPLPYEFVVMNFTKIAVVQCASKIADCFEKLTSGCFY

SEQ ID NO: 147337 - protein, 204 aa, Heterodera glycines
MASHTETNKQKVKLSHGEHLYTFDKMSKMERQNFLIKRASHEINAPPAVPTNLNFEIAQAYKTYTSTDGVEELFCWATPRYCADPVFPLNVRMLTSVAFVPFCDVRNAAFGQLCWTSSSQWHVVATVDPSTNGHWMEMRGRTTTQKRSTTVCKARSIVVIHRCGISLMFFDLNRKSPISNTILRSLDCHLRKSEANIWQQIDEF

SEQ ID NO: 147338 - protein, 170 aa, Heterodera glycines
MEKRGEWKKRGMEKEGNGKRGEWKKRGMEKEGNGKRGEWKKRGMEKEGNGKRGEWKKRGMEKEGNGKRGEWKKRGMEKEGNGKRGEWKKRGMEKEGNGKRGEWKKRGMEKEGNGKRGEWKKRGMEKEGNGKRGEWKKRGMEKEGNKKFGTLHEFACHPCAGAMLIFEQKL

SEQ ID NO: 147339 - protein, 228 aa, Heterodera glycines
MSKRLRSETDELLSANNPDLSILEQRMSRLENLLERLLPVGVGPIPEDPIQRLEKRMEKLENQVTALVLALEKRPISQQQQTPWGCPPDHIIRHINAVVLDSDIIREKSKRAVVEKLPEGIDEKDVVKSIAEKCGVADDLILDEIHRHPEERSESTSQNTRKPRILKIPFASTESRDIFLKKFRMALSNLPNFPKFLSARRDMTQSELSILYNLRSQAYNSNSSCGLF

SEQ ID NO: 147340 - protein, 82 aa, Heterodera glycines
MPWINSILINARSIANKIADLEYLIETNKHQIILINETWLNTRNTITTELTLNARKRTNSRKVNFGFDFFLESLPLLMILRF

SEQ ID NO: 147341 - protein, 533 aa, Heterodera glycines
DKGQQILFKCLNFLFLTVTLLPSDSIWLPDTTLYNSLVMKDDDSRRLLNAKLTTNMTRKAVLVEMLYPTAVLVEMLYPTIYKFSCLLNLRYFPYDLQECTMTFSSWTYDNKGIDIDYVPYSDEIGTSNYLENEGWYLLSSTMRREEVKYTCCPNKYTLLKLTLYLRRKPLFYLINLIILYLRRKPLFYLINLIIPTAIITLIAIVGFFTTSSASGTSSASGMREEKVSLGITTLLSMSILMLMVSDQMPTTSTVSDQMPTTSTFIPLIGWFILGMIGVISLGTLASSVFILGMIGVISLGTLASSVVIAVQKRGRLGERLTKRAVRIAKIFGAISYTEVPLHLRKTSEHAEAPPPSASYRPAKLATRLASVRRTTTAQRRQRHRRNRSGLSPNSDKSTEPLDKSTEPLIETGGEDAEKDAMADPTSVASARSSAMPSPRAPPLHSAVKTQPLHSNATVLMPVQRFKSHNAQKFGIFQNLRLSRQLAVKEFEWMATIVERCCFIVFATMFFFLSIGINLLGYWHWANPELAFNN

SEQ ID NO: 147342 - protein, 114 aa, Heterodera glycines
DAAKTQRRPSPASADPFNAFAITDVPLMRLTKDILAPGRYDVRVRPIIDHTKPLKVHISMSLYQIIEVNEPAQNIKMNVWMIQKWHDEMLHDPREYDMINSTILEYDMINSTIL

SEQ ID NO: 147343 - protein, 523 aa, Heterodera glycines
MADEAKVKLLMTKLNPVAFGEYKRFCLPEEITKFGFSDTKGRLIKLFSHPPSLAIDRYECLRVCREDGENFEIFVNRLKAALRKFRFSELNEEEFKCLVLLTSLKSPSDAKLRQHILARLTTEDTKTTKTAKLFDKVVEDLNTQLKTEAEAKILERPKFKINAVHHSDGQSSPNDAEKGNRSDKNRKFSDISDGKSPPNNCFRCGELHWAQNCPNKTQMCSKCNRRGHIKQQCDKIQAYHQNKRKIVPKINMVNLPVAFKNSGKFSKPLKAKILVNEKPIKFKLDSAADVNVINKAAFKAIGQPKVQYCPEEAQLFDGTRFKFIGRGIANFQFNGTNAEQQFYVAKDGTPNLLGVVTLDRLGFLEQIKRLINASNPNQISSEIPAKIKDKFQRSSAKIRREGAVSSINFDKFRPVLRTPTVTATENFSNYRKFGTKSQPPKIGEIFSRRHKSAAWSPGKINQIRQNSYTPFQDKSHGKIRANQPDKMKENHTGNYLPQIGAIQLCHRGPGDHLRSDPNKLSHV

SEQ ID NO: 147344 - protein, 35 aa, Heterodera glycines
MNYDELSIVKEEAVVKTNENGKIKYKYLVGGMEQK

SEQ ID NO: 147345 - protein, 17 aa, Heterodera glycines
MAIFHLMIMVMRKRETK

SEQ ID NO: 147346 - protein, 100 aa, Heterodera glycines
MEKQKEKTLFGRIGELEGQQKHQKQQGEKESNELVGQIRQLKEEQKKYLERVNELEKHQKQMQQERGVSIFKSENLQDEQKRKNNSMEDNNEKQMQMVNK

SEQ ID NO: 147347 - protein, 642 aa, Heterodera glycines
VFPIFVLCFSFFLAFYNFYYKRRKLPPGPIPLPLVGNILTLIRKPGPIPLPLVGNILTLIRKPGEDAFLEWKRKYGPIYTYWLGEMPVVCVADYKNIVEVFRKGGEEEMPVVCVADYKNIVEVFRKGGEEFTQRQIFVDFTHEFRGTYGIFFYGIFFINGDFWKEQRKFASTVFRQRKFASTVFRNFGLYSNLMEKKILVELSRMFERILVELSRMFERIDRKLAKSESSEIIEISIGSIINCTLFGYGYDNERIDEERIDEFHELLALFDSAFKLAYEKNLGSLFSTLIVCFLKYFRERYEKYFRERYEALMEVSRNLRNFFMKRIQKRAEQIDFKSDEYDDFVEAFLKEKERLSDEYDDFVEAFLKEKERLDGQGIAHSFSMDQLWNICMDQLWNICMDIWIAGQETSETSSTIIAWGMAHLLNNPKSLARVYDELDKVMGDERRLITAGDKARLPYTNATINEFLRISNMIVQNAYRRVFVDVTIGNFQIPKGTCILPQISVVLADDEVFDNPKMFRPERVFDNPKMFRPERFLDENGNFVTCEKLIPFSVGRRKCFAKCFAESMAKMEIFLFTANILNQYRVRFSVGKVLPSIKREMGITIHCPNVRFSVGKVLPSIKREMGITIHCPNFECRVEKRI

SEQ ID NO: 147348 - protein, 162 aa, Heterodera glycines
MEEKGETKEGEKEELEEEKEGEEEMEEEEKEVEEEEKEAEEEEREFIAFDFKVDEKDMPATDRAIEKLFDGIDAIYFMENGFKAIAHELEKLSAICSELEIDELERERFKLKRQMQIVSRKMSALIVKNSLSFNRQVENYESVRTNAEHLLRITRRMRRCEE

SEQ ID NO: 147349 - protein, 88 aa, Heterodera glycines
MDAAFAEQTKLFNLERYALLNTANHFLGNTELVSVKLRRHFEGSLCDASRMAILDSLTMRTNPEGTTEQSDERTIDNLPFEQLCQVKV

SEQ ID NO: 147350 - protein, 213 aa, Heterodera glycines
MDEDKLALKNGQKDDTGGRESENSDKQEEQFAEDNFDTNPLVEKGVMQKSLIDNAFDVFECASQNLNCLLANAEMSAIKFDQFIKVVEFRTFGRQYFGNPCQLIRHTLMDQSRKYIERYHAEKMEEVKMFLESETFTLCPVPVQFTLFDLPEFFFLKELQQKQQNDEQTEEETEQNSVETFVHGKSIRFSVFRHSSEMDTEIFPYSPEQFDES

SEQ ID NO: 147351 - protein, 330 aa, Heterodera glycines
MGNIFGKREHGRRRRKSGEEKHEEEEKSGRRNERMGEGEGRDDEEEEEGGNGREEEERQKEEIAQREHQKRREGNSKIPKCPHGFRPMNYPGTRWTFLECVMDEELKLMKRRKKTKRRKQKDKRRRSKRKKRRGNKEWEDEVEEEEAEEQQKRGDERHHRQQSEGDTEVEWETERRKEGTVQHKRKREEEEETVQHKIKRGEEEEEEDETVQHKRKTAEEEEEEDEIVHPKRKRGEEEEEEEDKSAVCPRGSICLNARDDPFGRALCCVKRGKHLKDYKLGMEEMKEEEDKFRKERKDGDEKKRIELATEMPTAAVPMAFKRSTARKKTW

SEQ ID NO: 147352 - protein, 457 aa, Heterodera glycines
MGLISVLNPTSGVFRGKYVQDPISLRDALAHGYIQFPSAQPLLALTLTDCIVDGFIDAHAGEFVDRFGSSGERFTLRDALDRQRPLVKDNVRECINTATNQRLTIAEAMLAHALNPRSGKFTDLATRAELSLRQAYDQGLIQKSQTLTEVVEKGLLDTQGHFSDRGNRFTLMEAINSGLLDAEVRHIVSEQDQEVISIGEALERGLLSPDGKIVLGWAADGAHPERQLDLHEAHRQGLLTRRARHTIFDVKGVKNAELGTTLSFNEAVEAGIMQVQEEILDPKLAFSQVQTERVLDQAVRQTLSLSDASRQGLVDSALADILMAPCGLSEGGTEVSLIRAVSKGLVDASKGVVVDPRFQRELSVREAYDRGMFTSLRSAMHLAALLDVHPSLMTPVKKKPYSKKRIQRPGQPALAEDQVKVDERSLALGTTAYWHFFGINKLPRLLDSSTIMAQHLD

SEQ ID NO: 147353 - protein, 243 aa, Heterodera glycines
AQEQRQAERVEEVHEFQPPPPVIPEMPRITEHEEEPQMFQEVGPEGMYDDDHENPAKDSCPLMCNCYCISLTVMIINLDQNHQVLTASDWKETVTKTQFYEMEGILHKQTGEILTFVEAIRQGLLNLSAGGEFFDIVSGQSVSLDKAVDMGLISENITEILNGRHGIKHPETGQEVTLLEAIQIGLYDPDSRQLRDIKTGELLSLFDSRHICPTDVQHRLIKMGVLKLPPMELEQALKNGPLE

SEQ ID NO: 147354 - protein, 122 aa, Heterodera glycines
MADEQEETQVAPPQPVLHTENVSSFLDLQTEFIKRRDAAIAGKSQSFATEPMHRRTPRNNILAISKEEKAQKAKSEVSTLRAQRIRQNEEAIRKEEQQRAKQQQILQQKAAIYERMAKGERL

SEQ ID NO: 147355 - protein, 36 aa, Heterodera glycines
MADPIDSKYFDFVPATEEQQEPGILKILGLGMGLDN

SEQ ID NO: 147356 - protein, 60 aa, Heterodera glycines
MEAAQAFEMPKLGLLNYALIWLEGCAEYALIWLEDFAELALIWLDDVQNLSAAADCAKIV

SEQ ID NO: 147357 - protein, 279 aa, Heterodera glycines
MIRSLKKSKFEGRIKNFKCSLKQTNSEDNRKHSDHFDEKEKLKIIKEFDKRREILKNKNIYNCKQRRLIEREIARELGTYLHKIEEWKREFGLIKRAKKEDKETKLALIEQFDRMKNERKMKKGYKNAEKVGIECEIAKELGTHRNKIYKWKSELLSPPTKKFSMQQRMEIVDTFEKVKELFVKKFNFKPTVEIEEKIVEKFGICRRSIYIWKNIFELRICPKHKYSEAEKLELIEKFDEAKSKNPTISDEELEKMLPVKISTIKQWKRGTKRRKTVKL

SEQ ID NO: 147358 - protein, 91 aa, Heterodera glycines
MVLLFSVLLFLLSLVKIEIKKQKQICKFRSEGCQTVVRVQHLQQSGPGRSLPWGNLDKLLQRGETSLVMPLTLCRSFRSIRFDIFRHFSAA

SEQ ID NO: 147359 - protein, 21 aa, Heterodera glycines
VNIDHRPQTQKCLKTVRIDVK

SEQ ID NO: 147360 - protein, 71 aa, Heterodera glycines
MFENFLILTIFCCFANAIAQGQNGYYCQQVGGFYSCISCNEPSLVKLCKIFLPERPLGLKIEMAFFVCLLS

SEQ ID NO: 147361 - protein, 92 aa, Heterodera glycines
MADQKVQSIKDEQQQQIDLTPAAHHPAQQQHITFTFKCHPTNESRGEKAAEDGEAKAMPIGVVILLTVLGVLLVEAIVGFLVFLCISMRKGI

SEQ ID NO: 147362 - protein, 35 aa, Heterodera glycines
MTDEEKRAVEQRLSRKKKQLKEEETKLQKAWKFVK

SEQ ID NO: 147363 - protein, 87 aa, Heterodera glycines
MFFNFFADLGQQLISISGQTGGQIGRQIVGQVGGQIVKHVGGQILGDIGEVVQCAVPLTSGHSWLAELSQLVVRPSRLGRVKDFNFV

SEQ ID NO: 147364 - protein, 20 aa, Heterodera glycines
MFFQNPIDYSSEKFLLNDFY

SEQ ID NO: 147365 - protein, 58 aa, Heterodera glycines
MLNFQFKAFDYLFFEFYYKLPYVFKYAFEVWLSIKPCRKAVLRSTLKAFGVFTNLDLY

SEQ ID NO: 147366 - protein, 68 aa, Heterodera glycines
MAEEEFCSKLLYDQDDDEKAANSNYRICSNYHPWGIIFKPLRNGGIIGDCGINRDWAIIRAYTAEKIK

SEQ ID NO: 147367 - protein, 257 aa, Heterodera glycines
MMEAEHARDLTQTFGVFTLEHCKAMTGRITIQKPRTDAYNAHLPENNHRFGISLTFCERIKSYQMMTSRSVQLDKNHRKRQRNITEIQRFESVHPRIYQIYDLLKKLRSDQSRQAELIEQIQEQVIGIEDAFVNSQEWTIGRTIHEIRVGVIGSEDSCKNSLIHYFLTRNWNWEDAPEGGRFKKEVFIDGLSYLLLIRDEGSREPNIQFAHWFDALLIVFAIESHQSFNAALELHKKVHYFRPLDSTDVPVYLIGMR

SEQ ID NO: 147368 - protein, 96 aa, Heterodera glycines
ARVDGSALASLCQRPPQQSRQSPATSTLGRLAVHGRLHPLHALLLRIGRPPLCRCRTFDAVGHFIRIQSQQFGHNRCTSPAATQQQQPLCKLQQHQ

SEQ ID NO: 147369 - protein, 56 aa, Heterodera glycines
TTAQWGADQCGAGGRGGDGGDHVRRADRVLKLLVTGVIVEVGVDRARPMLIHRLSP

SEQ ID NO: 147370 - protein, 44 aa, Heterodera glycines
MSSSCITFLIGATGMNNQPLSSPLCFTWPLSASHSPALPTDAFD

SEQ ID NO: 147371 - protein, 344 aa, Heterodera glycines
NSMNLSQQFFNLLLHFRRHDLVAFVNEHSRLYAEAQISGDYGECIAHYYSVMSKINEYFCGSFHFVPPILPPEPLPVLPVALRQLHLRIGQSLELGPGKHCLDIGCGIGDVIKNLAFTGAHFTGLTIAENEVHIGNANFRSLGIDNNCFLLLGDCTKISIQNESKDAAFALYSLKYMPNLGHIFAELDRVMKPGGKLLIYDLLKTDKFDVSNEKHCKLLSELEFACGMPPLHSRSELLAEADKAGFQLIQANDLQHESGMFYHCFSHSPFFMWLMRSRLTENLIKVAQTSRLTENLIKVAQTLKILPRGFHEFNKIFIRGTVVKIVEAGQLGILSGSEILLFCK

SEQ ID NO: 147372 - protein, 147 aa, Heterodera glycines
NKTGQQLRRTPTKEEKSNSTPEGRKRATQPPRGGKEQLNPRGEEKSNSTPEGRKRATQPPRGGKEQLHPSPEEFFSQIFHGHCSFGTHLFEIESRTNPSAHSQVQGGHIIRVQNSGFGLSQLGSHPLHFLSPGFSFGGHFNPKTISD

SEQ ID NO: 147373 - protein, 100 aa, Heterodera glycines
MFRIPCLILFFVILPLITVQSFHDSDHDDDRDDDRNDGRCMCPPNEKPGDRKCNGCEPSCDNPNPEFCTLMICPPCTCECADGLVRDSISNKCVPKEQCP

SEQ ID NO: 147374 - protein, 94 aa, Heterodera glycines
MFQSPCFFLFLIVLSSCVIGLTAQANDNVRCRCPFNERPGNRKCNGCEPSCANPNPGFCTLRLCPPCTCECANGLVRNLNTNRCVPRRRCPRKK

SEQ ID NO: 147375 - protein, 122 aa, Heterodera glycines
MNCSSAAMLMLLMTIFTVLSNVNEVAAEEHELVSRIKRNGYGYSSGYGGGCSACLPTPPAPPAGAAPTPLTRLPLTPLIPLLPLPIRPTPLLPLPTPLTPLLPPPTRPTRPTPPLPPAPRAA

SEQ ID NO: 147376 - protein, 512 aa, Heterodera glycines
MKLINAFEFAVCSILLIAAQLFQVSFSCEIEKINKAIDNLYINLFELQKMDKSQQNYFENDHKNWENILLKIESKLLYSSICTILKSAEMPKNAHKEKDRLKEFLEKYKKLSSEFSDSMLKNCEFWKVWRLVAKNFGKNIKVANGEINFECQNRKIIRRLEGAVEDPFAGDILTGHLNALSQLLTPKKGDEKPIQIGKMREKENNNWDFNGFFKKAKMKSESNIAYLLRKNRVEKNIKGIIEIKQRIEHHFGTQFLEKMEQLRPIEMTFGDYDNIIDDQRLANSYVKFLQKEEAAKLAQQNEAHLLLSTRMFFGQIISIFSMTNSYGKMKTKKRKDVENMKRICAEIETIWNKNFYEICTQIETNSAYSVESISKFWHKLAKLFNKIPFLKKCEKFLIIYEELTLEKTNGLEEFLWRAKDQLMSEHAKNVIRLTVGQSAECQNALSRFLANSLGQMKGAKHRLYKFFTSQFIGITYFDKLLQENANFAQVFRSGDFFIFSDEYYRNSKIIII

SEQ ID NO: 147377 - protein, 478 aa, Heterodera glycines
MDSDSETDVHTRALFMVDYLAFYQWLKNWQEKLSKRTQPSLEQLLFQIELYLDFLASTTESATGEAAKMEHKQKMLALKTAKDAFFPDEAEVIVIDGRGENTANLLAIKMELLLMHNEIIKGLIENEEHFLDKVKTIFIDQKRLRIMIPRMSQEYQILIDNAKGEKQHGNENKNNGKEDEEEKGEGGEIGDKKRSEKEDERGIEKENEKGIEKENETEKEVKKRSEKEDESIGEKGENGRDEKEKEEKKGKEKVEQKGESEEDEKEKGDKKGGEKEDEKGREKVEQKRGSGGNKKEKEDKTEKGGEEDGKRRDEENEDTKGRDGKAKGDKKEKGGGEDVKERDEKEKEDKKGRENVEQKGGSEEEEKEKEDKKGRKQVEQKGGSGGDKKEKQDKKEKVGDGKRRDEENEDKKGRDGKAKGDKKEKVGEEDGKGRDEKEKEDKKGRENVEQKGGGDEKGGEGGGAENKGCVDSDGEISL

SEQ ID NO: 147378 - protein, 1035 aa, Heterodera glycines
MYEDCNTVFARCHDAKKARLFITFTNNREWPEFKENLHKNGQVFTDRFDMWMRVWSSKIAEFREELYDKKFFGTILGYGESMEFQGRGGPHAHIVAQTDLDAVPYVIQEYIWAHIPSLPDKDDDTPIAKMHREIRETMHMQLHRCSDSWCGPSDPIYGRCKKGFPAPYSKCTILRPDRPAMYFRPSPSDGGAQLEVNGLIYDNSHVVPYNPYILLRYRVHHNVLFAYGNKANIKYALKYPFKGPGHCYVECKEESGNKIGIDEPAQYAKMNFRGATEAYAIVHSMPFARLSHHVVKLAIHLPNQQPIVYRAFQLVSKAQQIQQGELPETQCSAYWKQWQNEWKNDPKFKDILFEKVPERFRWAKDKWVLYKRQQIKRPPIGRIVPVPPSDPERFALYSLMRHFPGDPDHLKMVNGLLCTSFTEAAIMHGLLEDDKIWDKTLAEAALSRWPDQMRWLFVSILVYGQPSNAIELWNKYKDQMYNPQGIITLAQHKVAELEALADIDWRLHSCFNLSCVHFSLPDPPTSIAKNTDAAIEEFFFGDDDLNLPPGQPNPRPQPNTPPPLNSDQQKVFDAVLLAIQSNPKDSTVPRRFFIYGDGGTGKTFLFGQIIRRLRKAPYTYKVLATASTGCAAILLPYGKTAHSTFRLGREVSLDKLPSIPLESFFARRIREAQLIIIDEITMLHNTVIEVIDRVCKEMAIRQHKDLLFGGKTVIFSGDFKQSLPVVPHEGLTAQVTACFQTSPLFGQFTTMKLTINQRLGQGQQAYLQMCRQIGLGETGEHFWIPPQFLVKSKEELIDYVYPNFQQLLGNDKELLNRLILAPHIDTCDEVNEIMMANVPGQVREYLSTDKPLDDRPLDIDEIESEVAALNRRTDSGMPPHSLRLKVGCVVVLLINKSDKEGLINGTRIVLEELGDDRLIGRVINSNAIGGQVRFFLERTRNVYEDKSPGGIKYERLQFPIKPAFAMTIQKGQGQTIRTVGIDLEREVFSHGQLYTAFSRATDGNNVRVHAPNREIDAQGRAKVLNIVATNMLKLQ

SEQ ID NO: 147379 - protein, 53 aa, Heterodera glycines
GLYRTCGVKSKVEWICVQFEQIPSSDVDIDLSDVHPMNIASVVKLYTFLFSIT

SEQ ID NO: 147380 - protein, 83 aa, Heterodera glycines
MSVSNLAAVIAPSLMWPSNYGTHSAAISDAHRQSKAVEMLTRHAHRIIEVDQRVTRPFIDQFSSKVIRGPCWSENNNCSSNTL

SEQ ID NO: 147381 - protein, 200 aa, Heterodera glycines
MLPLMVQEVFDVNFALDWRTFFDTHPNVPEPTNEHSSVGAIDRGISGTPRPEFCSDSVDGDNKPRRQDAGDSRHAIVGDQRRGAGTLAAVDLSAEDIDDELVEDDDDDENEEVDELLEDDDDDEEEEEEELIMTSAADHRHRHGGQPQLSGGGIAKNGAGEGAAQMPSPAVDEKKQHHHFHSVFDKRLLVDSYCKWREKA

SEQ ID NO: 147382 - protein, 147 aa, Heterodera glycines
MELPHLHAWRLLFTCQKDRFFSLTLTHDERIYFRINKTNHKNSFFVLSWDIHSLAESASLEMGHISFKSKERLVRRMAMVEAVQKARGEIRVEFVLVLVHFVDHELCFDRLGNCCFYQALITANGSYFIKILYNEKIIKFKASYLIF

SEQ ID NO: 147383 - protein, 92 aa, Heterodera glycines
MHSIVVIFALIITVQSQCSPPNERSKNESPSNEKHHQNASQSNQNEGGVSHSLEKNCPICLDEFEESDGRQNQKNEPIKCGHVFHKQCLDKW

SEQ ID NO: 147384 - protein, 134 aa, Heterodera glycines
MSCEVNESNEKDYNPADLSFAYLCAYFILKLEQNEDILLKVERVAKEQWMEASLYPANKKKSRAKVQAEEDEKRWGKRTDEAKKALEDKMAEILAKAKEEDERVAKEKEETTKKANERAVVYPGRECPDRRSVD

SEQ ID NO: 147385 - protein, 147 aa, Heterodera glycines; identical to SEQ ID NO: 147382

SEQ ID NO: 147386 - protein, 161 aa, Heterodera glycines
MEPYFGFGSPSATPVLHHHNNCTTGTIGAGNFPSNTPSTSSDSAAGTIGPVEQQHLQLQYQQQNGGGGCSGVRSLSRHRLVIRDPFDDDCNNNNNNNFVEDEQYSNGNGCLLNGGAHFGMPPSSSASSSASSWFSNNMMSSSAAAQQCRPSAASAPPSLMD

SEQ ID NO: 147387 - protein, 80 aa, Heterodera glycines
MTTAAIFQQLFRKCIIISDTISQYTVHERPEFVAAWDFVGTSAVFVAPPPPAAVPPPLACFFNAGKTSTEKLRAPDEEIK

SEQ ID NO: 147388 - protein, 106 aa, Heterodera glycines
EKSAKLASFFYANSSTQSLSELSTSTTLLYRSGARNFSVDVLPALKKQASGGGTAAGGGGATNTALVPTKSQAATNSGRSCTNDGGTKCVLNPVFCTDEEEGGNTK

SEQ ID NO: 147389 - protein, 72 aa, Heterodera glycines
MYNKMRTAEWTRQRGQVHCLPKQLLGMPQTVIPIAIHPEMQKQFAVRPLLIDQTMACFRHSSQKGATVLRFC

SEQ ID NO: 147390 - protein, 126 aa, Heterodera glycines
HHPQCGVQFAQPIAAHHHDEQQFCGAERGRVQEVRQAQSVPNVVQRCARTFPLNHFVGCCCAAQHDEYTITIAYDVLRTHETDSFSDFSDQVSRRMGFVPIPVVILLIRVICQSVDFENPLSVAAL

SEQ ID NO: 147391 - protein, 445 aa, Heterodera glycines
MDGRGQRQRRPICQWRRVCRACGRIAYVATHQCPHDQPADDGICRRCNGPHTVDEPCYIQPIDDGSVRQRASIAVDNDDSDDDEDDEELPLRLCFFDAETSQDTPLQLNNRTVQKHVPLLIVAEVICERCLQAGISVNDGLGRRAPGCVCMTGMRLNGLPAQEFYAPDTMKAEKRAQFHRWHADNNGNGFQLREQLIMYCVNDVAILRESVIRFRQLIADNTQGLDPFLHASTAAGLALATFRRCFLPANRLVHSPEGGYLRGRRASAESQRYIRFFELEHPEAQVQCASWSVGEAHIDDSGYRVDGLWRREAPLRPLAIEWLGCYFHGCPVCFPDRQQQLAAGRTAEDLYERTERRLFELENDHGCEIHKVWACQWTERLRHDPDLKRRYDAVFVPCPLDPRNDALRGGRTEPFKLHHVCSDDEEILCIDIVSLYPYVMVGFFF

SEQ ID NO: 147392 - protein, 70 aa, Heterodera glycines
MRLLKIFICEPWNALNRQQKNDFNYMKLASLMTPPYSHRQALPSCEQWKFILKNEKHYQQKMYAKHKNKK

SEQ ID NO: 147393 - protein, 91 aa, Heterodera glycines
MDEEKLKNEVANCIRSFPDFPTKDVLFRDIFPLFSNPSLIRSICAHIVTLYRQKIDVVVALEARGFLFGPIVALEMDVPFVPVRKRGKLPG

SEQ ID NO: 147394 - protein, 141 aa, Heterodera glycines
MSDIAGASSSAFSADASSTKKKGDFLFLAELGEGSYSTVYLASERQTSRKFAVKMCLKKKIIKEKKVQQIFRERDILRLLSTPANACPFVVHLFCTFQDDESLFFVLSYAPKKDLMARLKKLQRFSVGQCQFAMAELFLAL

SEQ ID NO: 147395 - protein, 213 aa, Heterodera glycines
HIHALDVIHRDVKPENILLREDGHILLSDFGCAKQIIAKRENVAEENGDKTDGQRGDDGQKAEKSADSKSSKKREEEEATKLALRRRCSFVGSGAYVSPEVLNGKEVTGACDWWAFGVTLFQLLVGRLPFSADSEYLLFRQVLALSYKFPDNFPCAAARQLVQALLVLEPTQRIGAAEMGEPTTMRYHPFFDGTVWEGIEKRKSPLFDSAENG

SEQ ID NO: 147396 - protein, 141 aa, Heterodera glycines
MPIPPVVLREFVPGTPLGDWVVSTPTATRTFIDRVDTFCEQIGTMLGTFHAACDRHNFCPPVFRQYAPIMALEHWHFHWREFELQKRTDKLEAKMAKQCAEVFEQFEQKVLGRRSEFEQGISPKREGRKMDISYLNTYIVF

SEQ ID NO: 147397 - protein, 147 aa, Heterodera glycines
MYSKYFFENFMKFLTIFVFIGIHSSTVAEVIHQLPEDNICAKFTVQFLEEFYQQNSSSPMFGWITAEGDVTLGQQNGTHFGIKCLALALTLAPPNSHRRFIASPWHQQNDQLNNGTNQTADQNVSYIVPLKSAEVRSPQLISVRRQI

SEQ ID NO: 147398 - protein, 452 aa, Heterodera glycines
KSTLADRFLQLTNVISTESDAQYLDKLEVERERGITIKAQTCSMFHKDFMLNLVFEVKRSLITCDGAILLVAANEGIQAQTLFNFHSAFENNLSIIPVINKIDMKANIAKVEEELQQSFGFHADEIFKVSAKTGRNVPKLLEAIIQSFDHFKGALLFVVVKQGILTKHLPIRFFSSPEKEYVVSEIGILHPETTPTNELYPGQMGYIYCGIKSSRDVLVGDTLFHATERIETVKPYVEIGNVKPTVYSGLFPMETTEYERLRNAVESLQLNDPSVNLQMDSSVVFGQGWRVGFVGNLHMEVFGQRLEQEHGELAVFTSPSVKYLAGWYLTMQKHTDKGPSDIVDNEGIRKRRHKGQSQIAICKPSDFPEVPTDVLRFLEPMYLVSIVTPAEYFSNIERLCQNARGEVLETTYIDEKRMILRWRLPLVEIIVDFFDKLKLTTSGFASFDQKDD

SEQ ID NO: 147399 - protein, 291 aa, Heterodera glycines
CQMPMSLDLDDDEEEIEKALTAAPERDLVDLAGILGMHNVLNQPQYYNALKGKGQMHNVLNQPQYYNALKGKGQNEETGISFSGVIKAFQPRVVPDEPDNETDVEECTRRLESGDVKLEEVNLNNLKRVSKERIRSMLRAACKSKHLKKLCMANTAISDQEARPLVELIEHSDSLKVLNIESNFISPEMIAKLLRATLQTQSLVEFHAENQRQSVLGNQIEMRQSVLGNQIEMDIMLSVEDDIMLSVEDNDSLLRVGVSLQSMEARNRVGEALERNYERRKSNNTEKQMQK

SEQ ID NO: 147400 - protein, 122 aa, Heterodera glycines
YYAEEKTLAAPKQPLAKRAGGVGGLTSGAGNCGGEKYYGRDLSNYDDKDIEGLLSNLNTDELEELNNDFDPDNSLLPPSQRCRNQTDKKPTGPFKREKLLQYLEEKAKSEKDWEEAVPFAPG

SEQ ID NO: 147401 - protein, 136 aa, Heterodera glycines
MLLLASWLFLLPIFLIVQPAPNVSAWTTVAPTPNIYSTDKVAEQRPAAADTLLLVSTIDGYMNAIDAHTGAHKWRFHEGPLLSSPVSIQRGFTFIPNPRDGQLYLVVEGRLSKLPFTIPHLVRVSPCRSSDGVFYA

SEQ ID NO: 147402 - protein, 182 aa, Heterodera glycines
RTGEEGRLRFLGNEFGHPEWLDFPREGNNQSYHYCRRQWNLADDLTLRYKYLNAWDRAMNHLEMDSEFLSHGHAYVSWKHDGDKLVVFERAGLVFILNFHPEKSFGDYKIGVEMSGVYCLALNSDQSEFGGHNRLKQDQCYHTFAEGYAGRKNHLCVYYAGRKNHLCVYIPSRVAIVLKKKT

SEQ ID NO: 147403 - protein, 163 aa, Heterodera glycines
MRILLIIWRESFSESHYLLHRKLAELLASDVQNVEKVPTEEPAEYEGRLLVWTRTVLKRPEHGQQVSIWEQDITEFFLPNANKADSFQLDFLTNYYGIIQQLFGFQFNVGIMETSSWDFSLSIFRALPTIKKFAISQSATPTISQWHNLGYEKIVGAMPVKIF

SEQ ID NO: 147404 - protein, 143 aa, Heterodera glycines
TGEENENQGGQQQGGGGTNNGRGNNRGNENGGQNGNGQQQQQPPAGGATCTNRATGCDVAYCGNTDFARAHCAGTCRSFLNECSHLASVPDPSVACGNPAGDCAMNPNVCSDDVLAVCGCPRKCGRCSDHTTYIMQGKCRNVL

SEQ ID NO: 147405 - protein, 693 aa, Heterodera glycines
MAVVTKLCSKIEPTDANIGECSRNLGDLLEHDDERVAECALRCFAAMTDRFVRRQMDPMALASPSRLVAHLFDLIGSSSTAHENAPTELSSNGENCRIRKRSSAFISMVFSLFVNLCKSSFALTEEILSSSKLVPALKMVLNGKDERCINVDPNFVDDVGQTLLNWCSAFGTSDMVIYLCDKGADPNKGQRSSSLHYAACFGRVENSLTVGVRRTTLTLIRKCVFHISAKAFFEITEAKMNTNGEENGNFVESLVGVLMGVFESKENNLDAKQQALMNEEIAVHADNSTPSPTVEILHRHNAPNTEEELSPSNHGDGANSPQFDNELVEAATTIANVLGVQIVQDVSESSCELNQQQQRQPQNSAKDGSEDVWTVEEKVFYRWKDWRLIRSKDSLFLWCDAVALELRWFGFVCHPIILFHSDGSNGWLRFLMNGRLSTLYSSGTPEYGADNAENRTEFVEKLLKARATVPAGSQTKSVLSVPRSVTLEIQSGNWNLASPEVGTLLLTNREGTQQKMVVKEDLPGFIFETTRHQKHLFSADSTLGHDFVTGWAARGGGRRLRYFKLEVQKQKVYELAQEIWDAYLKKARDEPRELVLEVQKFSNLLCKLTKSIAKMEEKDSCANSTEELRTILAKIRDILIDERLLSVFEISVSGLVPSFLGFIEQVHLNRSGVLAKSFAEVFDLFINNSIPIL

SEQ ID NO: 147406 - protein, 209 aa, Heterodera glycines
AECALRCFAAMTDRFVRRQMDPMALASPSRLVAHLFDLIGSSSTAHENAPTELSSNGENCRIRKRSSAFISMVFSLFVNLCKSSFALTEEILSSSKLVPALKMVLNGKDERCINDSLRFIDLLIVLLCEGRSAISKNRVLLNDSVAPPAFDKTHRNLIDAIRLRDTDALIDAVENGTVDPNFVDDVGQTLLNWCSAFGTSDMVIYLCDK

SEQ ID NO: 147407 - protein, 914 aa, Heterodera glycines
MENTARTKGSLQIRKVCFIMEKHPNYCAETRQNVPGSSHNSSSQIQNIGSNLRVKLGNYAEVFRNMMQQVLESGENSDIYDVDEFDNDIYEDELHFIECDGISSIFSSANLIHFSDCEHPGSDHGGGISISSDSSSIADRFAEHVQNIGSTSVSTGPLGTSGGGANAASSMFSDATTALQSQIESFSSVASAFRRQFSTSSTSANQSIIPNTGASRADAFAAIRAAIERSENIIPSLPIDVIIGSSPVNEGRNHRWRQALLDEFNAFIPPSMGSQSDGRQRSNEEGNCGRAARTMANKTAIQPGGWNDDFVLRRQFGALIPAFDPRPGRTNVNQTQDVKLPDSIQFCTYRRKGSLIREEPKGGGTSSTAKEKSPIRLFIKMTGKDQVKNEEEELVELKDDDSSLFRYVQDLLVTSQKCGQSPNVFSADANSLIWENTFTLIYSVNENEAAECPTEDTEKAMTNNLDETNPLVEQALNVIKILHELSRSISNFDQIIGVEVTFPTLPEESFHSTKLSQKLCQELTDPLVVSAKALPNWCNYLAASNMAGLRREDHYPEYRIGRVKHERIKVHRSAELFLENAVKVLKFHALRKAILEIEYFGEEGTGLGPTLEFFSLVAAEFQRRDLCMWHCEDSVLENEANDQKGGGFIGSKPTGFYVHSNVGLFPAFWPSGSNERVLNLFQIFGIFIAKAIQDNRLVDLPLSKTFLKLITSPKLASGDGPSIESVLDFSDFALIHPEKVESSPHINCLINYSAHLLDLSLTFAVNAPARCFPYECVELIPNGASVEVNGSNVELYVKRLVDFHLNEGIREQLFMFRFGFDLVFPLSSLTCYSTSELQTLISGEQSPRWTREDLLRYSEPKLGLTVVRKVGSGDGSYPSVNTCVHYLKLPEYSSAGILRDRLLAATAEKGFHLN

SEQ ID NO: 147408 - protein, 70 aa, Heterodera glycines
MAKDKMPIKEEGITNLLVLEEKFDQIFAGIRCKKHRKKEKQRDKMDKEKRKERTKLAKHWDKWRNLLLLL

SEQ ID NO: 147409 - protein, 42 aa, Heterodera glycines
MPAFVLGFQTKVPIFALQVLSFSRGRPLKNKAKPTAVAKEQT

SEQ ID NO: 147410 - protein, 85 aa, Heterodera glycines
MIKYSFTSSQMSSARTLRHSLHFVLSVLLLLALANVLTVNATPLTILTREISPEAVANKLLASFPEGLDHMEEQHLREARFFGQR

SEQ ID NO: 147411 - protein, 181 aa, Heterodera glycines
MVTSLAFVPLEDLTPALAALEDHLPGELEGVLDWFVINYVGRLRNNGTRTRLLFRPEAWSVYERTMNGTDRTNNFAEAYHRTLQHAIGQGHPTIWKFINILREHQKVIDVDFEHFLAGNAPPPKAKRYRDTDTRILRILHRYNEEKTQPQIDDDHQYGQNQNNRNLIIEMLRGISSLYQMD

SEQ ID NO: 147412 - protein, 190 aa, Heterodera glycines
MDNFEIKSQRNYKKLEHNGCLYVFHKLNADWNVKFWRCEHQHGEFKCRGRIHSTLNDVVLKTIGEHTCRHSAANVVAQKIVTGIKRRAAETMETPAAIRAHTLHQIPTPVMASIPTKNATKKLVKRVRHEIELPPPVPRTLQELELPEQYRIYKRTEEAQELFLLADSTPSVPNIHNAQSTFAYSIWCAT

SEQ ID NO: 147413 - protein, 31 aa, Heterodera glycines
MEPQKFSLRMPRRTSSTNCHFPNYVDIWTHY

SEQ ID NO: 147414 - protein, 25 aa, Heterodera glycines
SKSSLTTAQKNMFFVRFRPRGAQEK

SEQ ID NO: 147415 - protein, 82 aa, Heterodera glycines
MQYRYCDFDNNYVSLGPCQTPTLAFCVRRHDAIGQFKPQPYWVVQAEVELPNGGQSLTLEWCRTRQFSREAAQTLLDKMKVS

SEQ ID NO: 147416 - protein, 60 aa, Heterodera glycines
MAAYFTHCDIQPVHKILTLRTAANLSFKNKQMRHCASFCRRCIELGGGNWARDVVEFDDF

SEQ ID NO: 147417 - protein, 26 aa, Heterodera glycines
MFTPEGCVLDLANKIYGHFGIVDNVK

SEQ ID NO: 147418 - protein, 104 aa, Heterodera glycines
MGQMLGVAVALGAWFFMDRSIRRCEMRAVMSREEKPPIKHLLALHGRSDLVDCFYNILEKKNTKAMESVKQQLSDLGLDHVSDAFVEGYKRVEMDNKSKNKYFN

SEQ ID NO: 147419 - protein, 19 aa, Heterodera glycines
MSFPWSRSSNTNTGKHLNK

SEQ ID NO: 147420 - protein, 104 aa, Heterodera glycines
MQLEKDEIVPNIVDCQKPEMVNCTHFTIFYNLKVKIYHFPRHMKLKQSKVSRRFSIGQNCEEMAKDWGQIEEDEKIGDEYDQSADNNGQVFLADFFVGRINAKI

SEQ ID NO: 147421 - protein, 44 aa, Heterodera glycines
  unsure (1)..(44): unsure at all Xaa locations
HIYKLGWTVGYGVHAWLGNIWPSFVILKHTKHYQLSSVVXGESA

SEQ ID NO: 147422 - protein, 89 aa, Heterodera glycines
MFNPSFAIPFIIIICLLFPLSLSKTNLSRKKYEAHLGIVYFLRKNWQCEKLRRSLKKNTKNIASIWAFCTNICSDKTSDFPALSQNLCL

SEQ ID NO: 147423 - protein, 76 aa, Heterodera glycines
MPEGTECRRKWDKGSERTAKRSARSSVGVFFSPNPLKMGEPFNVTAIAQSVQSLDGLECPWVRVPPGELHFCIWRK

SEQ ID NO: 147424 - protein, 175 aa, Heterodera glycines
HKFVFPKWQLYARFSPLVLGFGIEPLAYKTFKLLDANEGDARNGSVINYEILLKCNISPHKNENYVIGSEFYQHIGGEAGFIIQVKLYDIEMARLCYEDEYGNENSISIKIRKNTRLLRLLLSNENFIRTFIVEKSSFIKLMNSNLICEVMLKLLIYYHIQKSMSKLARAQIAAG

SEQ ID NO: 147425 - protein, 41 aa, Heterodera glycines
MHHLKTLPLLWDVRDRDRAGKASVITNPTPGSQPISGNDKH

SEQ ID NO: 147426 - protein, 336 aa, Heterodera glycines
MNFLIFTFIFLYIVNVCNGMHNILNSTDYDSNYNKPNHTNDNDQNNQNDHSNGLAINYYNNLLINNDRSAQNQPDNNNYYYQPNLDNLTQNLHTFDNLSTNNGDNYDEMGQNGINNNNNNNILDKVSTQSADFNSYFNNFVPNWHTSDTLVTNNGNNYDEMGQNGISINNENGPGNNLDSNFIDLTSNLDNIGILANTNNDNNSGHNPNGINGALKIGTSRDRNRMPSRAPSSSVGTLKRKRSRRRDPSRQTTTIHIDKQNFRQAVQEATGGPFKPSMMQNMKNLLPPPHGLTLTLPGMRTTRKQLMDILFKISKKKIIKKSYKLSNSKNQVFFLF

SEQ ID NO: 147427 - protein, 205 aa, Heterodera glycines
MTAISEDVFVWAKKGAQGPPGSAGIKGDRGPVGMPGFAGNDGTPGRPGEAGPPGPPGWDGCNGTDGFMGLPGVHGPAGLPGFPGQPGTDGPKGEPALGYAGAPGEKGDGGVPGVPGLPGTPGRDGFPGEKGDRGDVGLPGPRGPPGEPGLPGNPGIGTVGPKGDPGEQGLVGLPGPPGPAAYGLGAKGTIVGPEGHPGHKGDKQY

SEQ ID NO: 147428 - protein, 24 aa, Heterodera glycines
LTHRPLRRKNQLNCTWSPKLTRRV

SEQ ID NO: 147429 - protein, 65 aa, Heterodera glycines
YPGHAEKDPVVSPDDALSGPEDRSEQMESGIVEEKQQKSTASAPSQEDETVQQQNGSENSVERME

SEQ ID NO: 147430 - protein, 105 aa, Heterodera glycines
MEEKNTEIRGHMCRTLVKSRKCNYHWQLDEESMSVDFSTKSLSVAIREAKHVLEMVVDEEENLRDEMVTKSVDSLAIPLFILGKKWHFIRRIDQKGERQRPKGRR

SEQ ID NO: 147431 - protein, 103 aa, Heterodera glycines
  unsure (1)..(103): unsure at all Xaa locations
NELMHFLMEIVKLLYTFLFIFADASRHFQLFVEQKENILDPREQHKELMEVGENGIESAKPVTEVKLNYCTRKNXGGGGGQPQNQNQFEVFQRWRSNEYLQVL

SEQ ID NO: 147432 - protein, 105 aa, Heterodera glycines
MCRSANGQYLWDQLERQKRLLVEPKDKREVPALFREFDAAVRENRPSVGKSGETNGQQIEQNAKPTNDENTARNSICRTAIKWGQTGTTAAANDGQRGRIATDFK

SEQ ID NO: 147433 - protein, 69 aa, Heterodera glycines
TGGSAVFLNYDMNRNVALGPSFSPPALWPRCQCSNSAMGNVRLFCPLLSISVFSVRSASPWNLRTALVR

SEQ ID NO: 147434 - protein, 977 aa, Heterodera glycines
IERHVRLNGKVHKMVVDSGSKLTIVRKLIWVKLGQPFLTETKLKGRSFTGNIFTFMGKFKVQAALDDVPLDLECFVIDSRDTLDLMGLPWIRAFEAPTTKWCNFVNRKCCRQSLMDLQNTFPKIFEETMDLQNTFPKIFEETLGLCTKIRAHLKIKENSSPVFCAARPIPIGVKQEVDKELDRLIDMGVLKKTDYSSWAAPIVAVRKANGKVRLCFDFSTGLNAALEPHHHPLPRPEQLFAQLSGAKVFSQIDFKDAYLQIAVDEQSRKFLGVNTHRGLFECSRLAFGIKSAPGIFQWVMDQLSNGIPGVLGYMDDFIIASRSIKEHYRTLYQFFQRIQEFGFHIQLGKCKFLVQQIKFLGQIVTPNGIKPDSRTKALQDMPQPHDVSTLRSFLGAINYYGKYIKNLHEIRAPLDSLLKKGAKWEDTGTSEILTIIVTADLTIIVTADASNKGIGATISHRFNDGKEKVFQHAARTLTKTEQAYSQIEKEGLGLIFAIQKFHQFIFGRKFILRTDHRPLLGIFGSKSGIPIFSASRLQRWALILLNYDFSIEFVRTDCTGQADALSRLISDQRSCSKDEDVVIAQLLADTEADVAHVFNTQTEQLPLTAREIAEAQLSDPLIREVLECTMGRWPNKGLNPEIKPYFTVRNNLSIISDCLVFNGRTIIPQALRDRILKALHLAHPGIVRMKSLARELVYWPSMDADIESLVKSCVPCQEAAKQPTKHPLQPWPSTTSVFERVHIDLAGPCSNGKTYLVVIDTYSKWPEIFQLNNTSSHSVISQLQWLFDRYGVPKTLVSDNGPQFSSSVFKEFCKNNGIKHIFSPPYHPQSNGAAERYVDYFKRQLKKCSGDRNWLSKSLLYRSTPIAERSPAELFLGRKLRTKLSLMRPETIPKQQHHEHTSKMKFKIGEQVQFLNYRNGKTFKIGEQVQFLNYRNGKTLWLFGRIVSNKGLIYEIRSPQLGNRIVTRHANQIRTTM

SEQ ID NO: 147435 - protein, 80 aa, Heterodera glycines
MMREIMTNGPIQVQVDWYVDAYLYGQNSTQVNVYMHTIVNQTDKGDYQEGSLKLIGWGEESTDKGELVKYWFGVNSFGTE

SEQ ID NO: 147436 - protein, 195 aa, Heterodera glycines
CFLHNNEEIVRQIKKLTFVPDVPLREDEHLLEHSYVFSYFMRPQGKFDPEDYAMYVQPVSKISSVEQFWQVYRFIKRPSDIAEKVDFHLFKEGVKPVWEDPWEDPSNRNGGKWILRLKKGLSLKKGLSSRIWENLLLAMIGEQFLVGDEVVGAVCSVRNQEDIVSLRNRIVSLRNRPDSPVPLRRTLRRVLNLNK

SEQ ID NO: 147437 - protein, 95 aa, Heterodera glycines; identical to SEQ ID NO: 130305

SEQ ID NO: 147438 - protein, 209 aa, Heterodera glycines
MASQVDRVLIYGGRGALGTALVEHFHSKNIVGSKQPNQFKEFIHWAMLLVCPSIQWVISVDLASNEMASHNILVDPLQGVQEQEHSVLAGVDGALGGEKLDAVLCVAGGWAGGNAAHKDFVKNADLVGLNVSIPKMAFPIGRCGVKASDSTPGMIGYGMAKAAVHQLVRSLADAKAAGLPEGTCSFALLPVTLDTPMNRKWMPKADHSS

SEQ ID NO: 147439 - protein, 63 aa, Heterodera glycines
MLNISAYFYCSSLCFQLFIHRIMINLPSVQLKIEKIVVVEFVPRPFIIFKRFMWLFLVDGDIK

SEQ ID NO: 147440 - protein, 73 aa, Heterodera glycines
MTNNEMAEQSAFQSKLMLLRLKKVTHLPIDTDIKGNGEKEAEFTLTDFTSIMMYLILENIWDNRSIDVMAIED

SEQ ID NO: 147441 - protein, 185 aa, Heterodera glycines
MNTYYHVHFLKHSNNQRPADGATGNMNGAETGKSRTASSSFSGSSESVPNSGGRNYDEAHEQESESNIDPVYLALKEATEKYGNKAGKNRRFSQNIGCGGAGTGDSTTTPSSCSRNLSQASLLDSGTFSPLQKYIRKLVQFNVLSITQCLITSPTFTLFFICLIQSQLSFTHENLLFVYFPFDGS

SEQ ID NO: 147442 - protein, 217 aa, Heterodera glycines
MKSARRRASIGHLSNWHVDRCQPTTQNSLRHHRTVLDQLIDDDDSSAYKPVGRHSSILCQPVHRLFLDKNGSGDRSAKLQQDGGVGSGVDTVKQQRQQRYYYSSQPNSRKTSDKYRSNNDDGGGSGTYGSVGNSPRHMPSQPAVTLSRLARTLPSAIVPAIASLRGTVTASCAMGMLQQQQNRRPVTARTGCRLRQHSLQTFPLQPLQKRSEPQPVG

SEQ ID NO: 147443 - protein, 91 aa, Heterodera glycines
MKLTINQRLGQGQQAYLQMCRQIGLGETGEHFWIPPQFLVKSKEELIDYVYPNFQQLLGNDKELLNRLILAPHIDTCDEVNEIMMPNVPGQ

SEQ ID NO: 147444 - protein, 100 aa, Heterodera glycines
MLKRSPNDFRPLFRLNDPEQLKEERRAEKAQNQAIRQQQNHGGRPGRRKGEKMEVVLPYIHDKFERLSEQIESERDAIRQKVSAKRNNPKKGERRTFALI

SEQ ID NO: 147445 - protein, 41 aa, Heterodera glycines
TKNKGSFMNISIGSLLRKRTKTSQQILLINLDDSKRLCYRF

SEQ ID NO: 147446 - protein, 250 aa, Heterodera glycines
MSPIVFTFIFHLITSPTNALPGLNFFKSIYIDVCCELQFLYSPYGKARNTLLDEFYLSYFTAKNEGIRQKFKSKIEIYTHLYILRWKLDQNKIILLDENMPKGLNGYRKHKANLANIQFFFARYELFDEAMCLLLRLKFELLRLLNSQNLPYNKIERIFDHKECENEKRAKAIVDEFSEQIKEFLLSDLLHSLGQRQKLLKYFGDLSTQKNRRELGEAQMNFIDLLGSVRVAMICDWQMKELATLCEQIP

SEQ ID NO: 147447 - protein, 82 aa, Heterodera glycines
MQQNVERDGHQIWLEMPIISPIFPEKNVANRIDVTTAKQIKDEFVNDECTLCDNWGYKLCDFAYLFLLICYEERGSKISFLR

SEQ ID NO: 147448 - protein, 36 aa, Heterodera glycines
DREIWARPGPGLFGWENREKSREFPGPGQNWSKPGP

SEQ ID NO: 147449 - protein, 116 aa, Heterodera glycines
MRFLENGGNYDDEAIMRILNKIERLNKSEETTKKGETDRNENEENGKKEAEKRRHKMEEVKKAMTVLWRRNFFDAHFGHFNSQVLFVMLTKVFLLFPGDVSVPFLVEKFYLIYSIW

SEQ ID NO: 147450 - protein, 55 aa, Heterodera glycines
MNRESTKPFLYMPVNKILTVNTMFGHNYVMKMLVGESKCVKKDYNYTECVCGKLW

SEQ ID NO: 147451 - protein, 118 aa, Heterodera glycines
AFANASSPANFIVVILSMLSFDGDDSVVPFDLTNEFTREQLALKRTDYCYRLLLVRCPIVRDTDKWAKWEEEAIDWQFNHQWNIIDIQINNERKMGQMLIKKCEIVAFLDVSRNDGPK

SEQ ID NO: 147452 - protein, 215 aa, Heterodera glycines
MAKAIFISGDGWLCVFDLLEPSQLGLGIALVSHRFDFYVDEHFKTRRWALKAMEIKAKFEADGTNGWEIVNCAGKPLPIPQKALPKKIVGFKDISIKYIDQNAIAFLHRFRQLFTSRPINLAIYTGGDRTLEFILRKFWPMIAKSICAMHLYARIFYRLRQFMPSILNDCPSLRIINSFSDGFFAEFPCDDSANASNGQAFAKWLFTPRPDNVPK

SEQ ID NO: 147453 - protein, 35 aa, Heterodera glycines
MDNQQGKDDVLSSNAFAYQQIVGPQNITACLWSLL

SEQ ID NO: 147454 - protein, 197 aa, Heterodera glycines
MEAAPVEGNNSTMNNNTGTFYAQQQLHNSSNSWNSQTPQYYIEPLHSYFADSSYFGQPSSMLGGSASLDSLNAYGHFGPLFAGQQEIEYSANFSTAFSAFITGGIEAAAPMQYHQQHHHHMVGHHHQSAALGGGGDFLMGSLVVHPLPSQQLAAAATAADRECISCGGRLYEAESVRVDARGYSNQSINQSINKTII

SEQ ID NO: 147455 - protein, 49 aa, Heterodera glycines
MTVLLLKFSKRQRKCRPIWHCLPLANSLINGQNLPPPLFGTFKAMATMA

SEQ ID NO: 147456 - protein, 59 aa, Heterodera glycines
GGAPNNVVALPRTGGSYPATAIRQKREHTPMASAPFVGPLLPNVAAAADELSRHYSMWI

SEQ ID NO: 147457 - protein, 46 aa, Heterodera glycines
MISTFRAPTVCIYVKRKTILDLLSQQQCFDKELILLCCARNIILSV

SEQ ID NO: 147458 - protein, 121 aa, Heterodera glycines
MEIDMIIAPYIYLLLLCLNTFNFYELNNGRLFWHFFSSFVMDKHFDGKSELTIRNLIKISKMRTNATVFVEKRRFPLPKYPLPRLHSHTERGRKDEQPRRGRTSPSSRRLQLPSSIDLALH

SEQ ID NO: 147459 - protein, 315 aa, Heterodera glycines
MNRRWVCNDVWMDIFLHLDHAQLGLKMALLSPRFNALVDKHFDGKSELPLLRQIRIAKKGTKLSVATKSNPLPIKIRFINLRIEYIGHSVIEFLRSNRQIFEKGTHMDLYLDLDNLHYDNKGIVQPIWNFFAGEIWPIFVPNIRHLIGHHLGDLRCHISPTIFTDCNQLNSIVSDNLLPAAIADDGPNATARQALTKWLNTPTKNGQPKQLICCGSASETNECVVNFKKEFLRANSSASYIIQFKTYTSIAQFELVNGRTKEKLTLKAEDDDDHVYTHINCVLERCQIGRTIQWEDKKTDKLNNVIISLYGNCIG

SEQ ID NO: 147460 - protein, 156 aa, Heterodera glycines
MSRVHSSPKPNVLLMLLSNGTVWLNYRVFESYSFNTATVTIDWLPLAAVTLQTAEISASDFELTHTKHYKHTEYYKAGEWYRLTVEVGFRRRYGYYVYANMYINVFLSWIAFCISLKALPARVILSVNTLMSLCLQAIIGKYQCQNARSDHFSLAM

SEQ ID NO: 147461 - protein, 208 aa, Heterodera glycines
AREMQARATIKLVFCIAYAILFLLGSLGNGSEMIKCQFPLLVIVMICLVIVMICNVLSTLSRNRRKTSRKMLMASAEHVFIYVLGQFIPVQCFFLRLIPLSGLSIVDLFVILHLPLLIFEMREGQWPFGEFMCKLYWFGESVNKLLSSFLMTVLSWDRYLAVCSPIKSMNPSVAITVLISCSAFATLLLYPVLKEATVLRVNKLTGVP

SEQ ID NO: 147462 - protein, 31 aa, Heterodera glycines
MPLTDFTSIMMYLILENIWDNRSIDVMAIED

SEQ ID NO: 147463 - protein, 63 aa, Heterodera glycines; identical to SEQ ID NO: 130392

SEQ ID NO: 147464 - protein, 181 aa, Heterodera glycines
MSHNPKKAEKEMEKAIFISADCWLEVFDLLPPSQLGLEIAMISHRFDRRVDEHFKTRKWKLGYMKIRSKIGQNSANEMIIVNSNGKELPIPQIPLPNKVMAFRSIAIFFFDENVITFLGRFQRFYDICETMLYIRAENVRILEFIVLNTLPTLKDTIKNRLPRPLQCIFGCFFSCFFRNLL

SEQ ID NO: 147465 - protein, 68 aa, Heterodera glycines
MKKKVGKFDLKFVNELKEMVKTIDENDGQKLEKVKELVKKILEMFEEKKKAYEICSISRKESGRLLII

SEQ ID NO: 147466 - protein, 24 aa, Heterodera glycines
MLRPALSQFSLTRIPVKSALIPSY

SEQ ID NO: 147467 - protein, 61 aa, Heterodera glycines
MNFVWLLFTVLPLFVMVPCTEMLHCELMLLDVTETDPPPADFPLFLPSQSSLPFTRIYSIF

SEQ ID NO: 147468 - protein, 148 aa, Heterodera glycines
MFCQLLLFGFLLAISIVTVCAAKREINLSIYPPPISNDYNYRIKICCNQNSNSGAAVEVPSSLHQQKLIAEHTLCGTKNSEQNVNEGQFPENGKNGINQSRYQENKGCQMSHPLNNFFLKKKIAENLKKAGQVVYILALSERLGLESL

SEQ ID NO: 147469 - protein, 23 aa, Heterodera glycines
MKIYFPSHYMHMHKKIFSDNKML

SEQ ID NO: 147470 - protein, 93 aa, Heterodera glycines
MAVVQVTFDNAVIWKCPPKTPLGLREAPGHWQNVGQNGAGCPLHRFRCAFGWLTDVQLQRHTDIDWSTYMQHVGVYEDGQRNYTQIRGDTGPI

SEQ ID NO: 147471 - protein, 879 aa, Heterodera glycines
MAWDNSCQVFGQEWKGKIYGPVGLEDVPVKTNVISAEAQFESWLRNLTERFGQTLTKLRAKEYWKDCHLQSKRVLVVSNQEAAELVAKEFEEEGSSWFVHFGDKPLREKMFPANWNIKIIFNLELRREEREELEVFKEDIKDMARAGLEVHLATRKNARLPREFEEFAEMQGCGIYQYEKIGELAAAIRGTPANTGTNPESGESAQKSTTGWRRAVTKSLTGLTMLVMLLITLLQPMMINGQVIRPERNGRWIPVNPFGRPLRMEELVGFAEPTVPRMSLDKRGQITPTLPTTAADMSIAHIREWYKKARMQTSGTTQTSAATTTVRTSTSASTVMTTLRTPETTVTTRTTTKTKGVTTQPQRKTTNQEPRMDSRRRQWTQTPSRHWTDRIRATTEGPSQASAMPTTTKPNPTEGTVTDETKPAVRRLNRELEEVHRGADPIYWCAHKGSSLWRIPDADKSPFCKPPPGLTSQWKRLTISLYMPYRKPQEVKKAYRCAIKRTKEYFYTNLLGDQFVRTEKEFLPVQKRICMAMIEQHKCPYEDKPMTPIEGGGWSSNNPLNEEFPGRFSSLISGERESVTLNCFVEKATLFYRPHNFELISPLYSHLEDCNYLTGNCNMADNTTLNWETECNESCKPCDYHFVESMDGEHTGSTDWAGGTWISKSKEQALTFSKEAKMETACNGKPIRLSDQSFGILEDEYLKIVNDRGLGKRAIQEEQLAAQLTAGQLATSRSIAQLFSKECRRSSRGGNPTIQARRLLRRKDVMARWLNEDTMQIFSCAEFSMQNVEYQAVNNCYRYIPVQIRIDKKTLNAFLDPELHILTASSPFADCGNFCYHYLQLSQSNWIKIDTRSATDAIDRVYIRIFSVMVICSGPIKKE

SEQ ID NO: 147472 - protein, 53 aa, Heterodera glycines
MAEMQKSYGQNRLLLAIWCSAPSFFEPNSGAYKLAVLSEPISCGSLMRNDFEN

SEQ ID NO: 147473 - protein, 91 aa, Heterodera glycines
MNRSNSFRLFSSVGSCRYSNRFWYGIGGRLHLKKAPGQSDSGQSDSEDNRTEVDNWTVDNRTVKYKIDKKIPVAAMDRLCHIKKKQNRQIN

SEQ ID NO: 147474 - protein, 108 aa, Heterodera glycines
MTLHPISYRLYHYFCHFGSPRIGDYAKKKGKGENQLRERKNEKERKKSVKETVNDKRKAIGKKEKALQRRSQAKKRAKKEKQLKIFTSMASSEGELSTWRDSDFPASN

SEQ ID NO: 147475 - protein, 86 aa, Heterodera glycines
PPLSPPPLLFPLCFTSPNLGILGSGFALKVQQHQRQKHLIRRRVPAARLIQCLWRHYCSMPESRSLATWKVSMPESRSLATWKVHL

SEQ ID NO: 147476 - protein, 303 aa, Heterodera glycines
LMLLPPPSFSVLFNRLISFSSADQNRKMSLVGKPLVYKNYSTDQRFRRVQSKMHNFLERPRGWKAASYHLAVLVMVLLVMVLTCLALSVFSTMPEFEEQSTLILYYIEIIFVFWLAIEYEIIFVFWLAIEYICRVWSAGCRSRYRGIAGRIRFATSAIAGRIRFATSAYCIIDIIVITASLIVLCMGAREIIVITASLIVLCMGAREQMFAASAIRGLRFFQILRMLRIDRRAGTWKLLGSVVWAHRQELLTTLYIGFLGLIFSSFLELLTTLYIGFLGLIFSSFLYLCEKSNDKYTTFADAL

SEQ ID NO: 147477 - protein, 100 aa, Heterodera glycines
MAVRPLLPSSCHFPRHFAVLPNPRAHLPRPCLISNDRPHRLAGVVQFGFPSLANESSHNATNSLLVKSDTAKRKEGVEQRRRHQKTMRKLQKTKARPMRN

SEQ ID NO: 147478 - protein, 99 aa, Heterodera glycines
MPSSLNSNKKRNANYQGTSSVKEIDESLIETTLHGLGSKRRILEDFRDFLSLRNRRSFVGDGLNPSDTMPKMIDRMTEELKLKGMAKTKEKSVEAAAKV

SEQ ID NO: 147479 - protein, 232 aa, Heterodera glycines
SGLWDQLEVVFKFRRLYGFYILQAFMPTYLSVFISAFMPTYLSVFISWIAFWIQTSALPARITLGVSSLMALTFQFGNIVKNLPRVSYVKALDIWMFGCMGFIFLSLVELAVVGFFDKLEARKRRTQRTKEFLMVNSDSEQQWLSRMKGTNGGSMDNGTAKSVTLKVSGTRERKTSRPRWKRSMAEDGEEDSWYMLNGEFIDDLSAKMFPALFIAFNACYWFYYICLSSGAN

SEQ ID NO: 147480 - protein, 245 aa, Heterodera glycines
SMTWSIFTSHVFFHYIFKTTSMGACIYFFAEMTNNFTHLYSLFFTRFSNCHFLNVTPNLMALGIPYELKAHVWGVCSGALVEMRINEGEYAALLRRSRHNSAAFSELTMDEIERDLHRSLPEHPAFQSAAGIDALRRILTAYAVRNPTIGYCQAYAVRNPTIGYCQAMNIITSVLLLYAPEELAFWLLVAVCERLLPDVCERLLPDYNTKVVGALVDQKFSSLITHFDRIIPIIFVVPPPPPPPP

SEQ ID NO: 147481 - protein, 87 aa, Heterodera glycines
MLRENAEIIVRARDEGEALVALNEFTDKITDSTVKNSTQIFIGDLIGKSYKHFADTFTNETIEKLRLKHRLKVVQNLEDSQVGNCTI

SEQ ID NO: 147482 - protein, 76 aa, Heterodera glycines
MLSSVPIFNTLLMEMMMMMMLLLLVVISIHLYLLLLLMLTRVYTVICSVPLFSFSSFSLIYNNCQSSVSLLRVVYF

SEQ ID NO: 147483 - protein, 46 aa, Heterodera glycines
MDIFDEFIVVDEKAFNGLKAEDCNSSAAGVNVYVPPAWRSRRCIET

SEQ ID NO: 147484 - protein, 104 aa, Heterodera glycines
MQIASGSGVGGTTERDAGSDRVLRSATKAELMKLQITVTNSAPNVPTIIRTLEGERSYRVKAVLASYTHTNGKTAYFLDWLRSWAVGRIYKKLFGSGTGTRAKR

SEQ ID NO: 147485 - protein, 116 aa, Heterodera glycines
MKRRVATLATAPAEQHKIIGPESPKPHEETPKNVEPKDELATKKRKVDDRELWKLAKGKFLLTTYLCHDDWNRLYNNQQKVKRLEGDRFAFGFEMCEECVWANCRATDLLAPMKKK

SEQ ID NO: 147486 - protein, 184 aa, Heterodera glycines
MVLVSTFCAQLLNCPVKSLRDRLNHPEDRALVLKHIIGRKARTTYNDRNGLTKTFFVTGISVHGAAFLPAYGQLRNPFNINVAAHFYARHRIKLHFPYAPCIIERFSGGGEDRHYPMELLELIDDNMDMDINNNEHWLGRLFTEIDEKQSSSNSSDTTMRLVFEGDMDEDSGRNECSQSTVPLY

SEQ ID NO: 147487 - protein, 1380 aa, Heterodera glycines
MQNQPPKHPFLFSIDQILSVPSKKPRRGFLINELLGEVLQEGGGSSSSSSKSAKEYVKKLDSTVEHVPRFQYSKVKSRFSIEDVPEANPEGLLAGIFQYCLDAAMEESRGRGIEPTHLGCMISSPLLTGGDIPIPVRQITDNTVNTILNQFTKVAQSKQQQNVTLWGEPFTVVVTTVDRSGLPGRRVLKGGARRSLAPVHHRVTETCLIKICNPDGHCLFYALQATMVAKTCGWPRWRFYDYLHSRRGQQGCLRRDALQLMQQIGVRTGRNTYDAEICVPRVVDHWNNTQQQQRFAVFIFGSSGQYKPLYKYINDHYDTPIVLYLNNQHFDGVQKLHGLFGQPYCLDCEKPYERPSRHLNSCKARCLLCSRVGPAFPCVPLGGFFHQCAGCNKKFRNNGCLQHHLASNFCAKSKQCKDCGVIWDTRVHNRDGRKGHKCHETYCQLCNTFHNPERGCFIQPIEPKEQDPYRIVAFDLETMQHQPVDPQQPEKREHQPNFIAARVACPECIESGNWRRVTAGCRICGPHRTVAFCHRPFEDTRVDKRVVADNPLQAFVDWLIFQLPAKYDTYAYSHFGGRFDMVLVFRELFRIGFNPEMLRRVRKQKRRNPNIVFRDSFNLMPCALAALIPSYGLDVEDKPFFPHLANRPENYGREIHPTPEDYLASGMMPSKRQKFDEWYAEHRHEPFKLDEALASYCTNDVEILMAALVAFRREFFEISRRQDYVDGIDDKENHDGIDVLRECMTIAGACMRHFRTNHLPDEHLAIVPERGYDNAQNQSLLALRFFHWYAKEHGVQVQTAHAAGGEKRIGPYSLDGWIEAERRAIEVNGCTCHGCKRCYPNDNMLLPNGKTAGQVRERDSKRMEFLRGKVNRMDVYWECEIHRMLERSKEMRKAFDDYVDDGPLVIRDAFMGGRTGPLKLLRKAGPGEKISYYDFTSLYPYINFTTRYPIGQPNVHVLNQEVDWRSAADNPYPLALLKVWVVPPRRVDVPVLPVKVGERLCFPLCITCAKEHPTGGVNPNYHCEHNDRQRGWVSTCTSIELNEALDEGYLVTKVFRVLEYEQSDDKLFRPYIAEFMAQKIQASGFDNSIRGDAEKEQQFVRECAEQFDITIDPTKMAVNKGKRSLAKLCLNNLWGRFSLRNFGLAQTLITDDPATLAEYLDNKSIEVTSIDELDEQHILITYLQKKDWVDEHSCSNIVISLWTTSAARLVLLKAMQKVFRSPGSDLLYTDTDSLILVHPEERCPLKTGPHLGQFTDEYPDHDIVEFCSGGAKQYGLCLRRKGAEEGAQLEHVLKVRGLTLNYDVINNQGMRYENFKEEVVRYATSGEYEPISITYPNFLRANIREGGRVVSVPLQKCYRPFVGKGIIGANFNVLNFGHTL

SEQ ID NO: 147488 - protein, 62 aa, Heterodera glycines
MHFIFLIIFIAFKIESGKIRPNFGEIFGNAWDNNKREEKAIKIEQNEQNDNSATVDQMEKFE

SEQ ID NO: 147489 - protein, 128 aa, Heterodera glycines
MNLWLLLFLIIFIAFGIESGKIRPNFDEIFGGEWDKNESEKMLIKIEQNEPNVKSQAAVDQMGEEIGSGPNDQKKTQNKYSNEDKLRKMRKYRKIKENNPKISDKIIAEKLGISFSTLNKWKTVSFSN

SEQ ID NO: 147490 - protein, 236 aa, Heterodera glycines
MNLWLLLFLIIFIAFGIESGKIRPNFDEIFGGEWDKNESEKMLIKIEQNEPNVKSQAAVDQICEEMGTDPNDQQKREIIRKFEAIKEKLKERGKYQRKDRHKIDVKIGKLLGTNRNKINKWKKELNLNKKNFYEDKKKEFIERIDEFKYLYGQGKQKKFAKELGISERVFIKWKKELVPNYYKTQNKYSNEDKLRKMRKYRKIKENNPKISDKIIAEKLGIPFATLNKWKTVSFSN

SEQ ID NO: 147491 - protein, 168 aa, Heterodera glycines
MARLVCFATIANRVGLLCDHDTVPVCFATMAHISVCFATMIWKASPDLLSPRDACGWAAQWWRHEFLIVAGQQPMPSKQHAKRKKEQERYQRQMEKSVSPGRSPVPDGSADENGVASHPGTTTPNISALQLSTPASSIGSKRRGRPPKAGAESIMTSQHSVSSADTQI

SEQ ID NO: 147492 - protein, 37 aa, Heterodera glycines
MVAKRTGTCTNLIMVAKQTDKICKQIKNSHFDNLRPL

SEQ ID NO: 147493 - protein, 42 aa, Heterodera glycines
MDILPSFDHAQLGLKLALLSPQFDALADKHFDGPTNFCINSA

SEQ ID NO: 147494 - protein, 53 aa, Heterodera glycines
MMRRGTKVIKRGTIVIKRGRTVIRRGTTVIRRGTTVIRRGTTVIRRELGLFKN

SEQ ID NO: 147495 - protein, 209 aa, Heterodera glycines
MPNSPPPSKRPRRFFIEELLREPFNQLSPPRKSPKDYVKLLNSETELVPKFQWLKNKSNFIIENVPANPEALLIGIFQECMDEAMNACCAFENSSENTLRASIPFWCLQQLLVWLYQRSDVVFYRSTVWFTSEGGYLRGRRASAESRRYIRFFELENPGAQVQCADWSVGESNIEDTGYRVDGLWRREPPHRPLAIEWMGCYYHGVLSS

SEQ ID NO: 147496 - protein, 60 aa, Heterodera glycines
MEKDLERYYNDFKRPPFAPTFHPTDEEFADPISYVAKIKPQAQQFGLIKIIPPPNLDSIN

SEQ ID NO: 147497 - protein, 25 aa, Heterodera glycines
MEPFQRFFAIVCVLIAYGMFESVQS

SEQ ID NO: 147498 - protein, 125 aa, Heterodera glycines
LSENQIAPPAVDYVVITHGHPDHAGNTNDFPDAVHFQGFMSHYRTKFNFSNLFENVKHQLTENVALISTPGHTSEDISVVVTAEDLSRPMMWRPLAWNDEVQSHNRRMILCTADYVVPGHGKMFH

SEQ ID NO: 147499 - protein, 149 aa, Heterodera glycines
TVDAKSWDGSVEKVTTLKLSTSSSSAPATAADRSTSTADRSIQKQLFGRIIIEEQKPNQTNRKIEFNDDEKEQSFFYQVQGNNDGGIGQSANIEILREVIMIKGYARQLDADYVFVASITLIRDGAKIILVDTGMGTDINGRTDLIRSW

SEQ ID NO: 147500 - protein, 204 aa, Heterodera glycines
MDMSSQRKVHADEGRRLAKVIKSISGQLNGTIANEHFWCFLKIHHKILRKSLKILEIFLWETTGAGNDLLPHFFNQFMETSAKTGHNVHDVFAELSRRLVKACDPQRRLRPASANGSGGGGRKSAAAAEADGGIPLKLANNANDDEGGMAEQYQQQQALSLFGHWHFWHGDSPLCGGVAHGIRTLSEGKNIRVAIRAATEFQGP

SEQ ID NO: 147501 - protein, 48 aa, Heterodera glycines
MVDKMTDNVHNSFCWVQLAIISRRNSEEAHADRPNRNVYVLRCQKRQL

SEQ ID NO: 147502 - protein, 177 aa, Heterodera glycines
MGVSQKTIKIILCVADQNGHLINAQSSVKISKPTLERYMAKIKKSLGAAYFVANQNRVADWYDNYNTAKEIRLDLMEFLETEIDLHNRNVEGHNWWQMFENSLPNLTQYINNHKHPAMDASEHFKWASNLDFLCAAKLFKLNVIVLVDQDPEYKSVFIYYDGSGHFEAILNPIPTAD

SEQ ID NO: 147503 - protein, 302 aa, Heterodera glycines
TGIASEDTVNFEDQLRLSSYNAFKEIFFRYKWKYDAWKVQHGRNKITKSVWAIKYDQLKDDQIADKVINAMALAADQLAETIKKMKNPWKKPTEEELRRGKKGKAEKQTEITQAEKQTSGKQMVFLFGDRPTPADASLFAHLVQLFETPLKIPKLENHIKTVKEQSNHAQHVLLQYVEEIKEQIGWEQMKHSSEKAVENPFNFEWVEDAKKMEKYNGKFLGRRDKNKYNKCTYVVPFLINQGGQQIRMARNSDFRVPTSDIFGVGIPTSDFRKFLGHRNCDFRLPKFLMKSRNFSEFFFSKN

SEQ ID NO: 147504 - protein, 209 aa, Heterodera glycines
MIEFDGMFMVFPGAERMHEREEFGADNEEEKEEEENEDEEDDGNITEIREEKVKTEKSEQSIRMRTPKREKKKGAAENTGKKLSAGGEKKTEKKMLRKDSSGSGSSRRQERPGNEQNPEGQEMQTVYNEQELKSFAMYFEEKTWTTLMNKQMLFEVQYMYSMGLYVVFGYSHGLLGQCYCMASSSAQSYPYRVFSTMFYVIHVHLPYLL

SEQ ID NO: 147505 - protein, 123 aa, Heterodera glycines
KIVELEEELRVVGNNLKSLEVSEEKALQREDSYEEQIRNLSARLKEAETRAEFAERSVQKLQKEVDRLEDELVHEKERYKAISEELDSTFQVNNDCMRKRGQSFHPFGGAFRLLICSVNGCER

SEQ ID NO: 147506 - protein, 151 aa, Heterodera glycines
MGMTDNPSNGTCQGRGGRGRTEPPHCVGGGGLGTHGGPTENRHSKVGGGEQSSGRSGTRPQIDGDAFAGGRRTRKHFGGASGGSESDRGGRGPQIRRGERREATVEGETDRRDALGQCLCQWLIWLMAMPMANMANGNANGKYRQCQWQHF

SEQ ID NO: 147507 - protein, 106 aa, Heterodera glycines
AATNADYCEEDNLYTVQCDQRPKLAPIVLKVNGKDIVVPAEEYIIDDWVLGALFLNAYCTMFDYDKGQVSFASSKDTIPYRDGEEFNASLHVHSRQILLHEHKEEL

SEQ ID NO: 147508 - protein, 50 aa, Heterodera glycines
DLTHHSPSLITDDFETKFGILIIIDLFYLCFCPSHEPAIVDHGFSPIICM

SEQ ID NO: 147509 - protein, 529 aa, Heterodera glycines
NFQVITMESCNRLSGVEHGAFLHYLRNASVYFGPGCNNEMNVIGRLASRWNVMNVIGRLASRWNVPIIAPIIAHLSGDDALSDRTIFDFDTLGSVALTSATEMARAALTLLQLYGWKQIGLVKASINFERLSLHSLKNFLKDSQIEINVEIELDPYMTADEIIATGKLKLLRNRARIIIVEMGMDLHSSRNFMIAAHRSHMKTNDYVYLIPWLAHMHDHYPWEATNIEKQETKTAFDDTIVITAHGYDKKFIEEFEHRFNKVTGIISSYYATLSYMSLYDALFLYGLAVRDSVEESRNQNIFLDGRYIWKKMTARQFIGVTGQVLMNNKAIRVPSYATYHVKNGTMRIVVELTARLSDKHKCALSENDCSEHVAHETMSHYWGSYDGYMPSDMPKCGFDGNLCDYTNIYITIGVLAFLAVSIPLGYLLYLKEKERMLYDMTWRIPREQIRLLEEKSGSLHSKTLSHDSSSLGGSLGSAAKANARLSAKQAMSNGVKCAYKRYSQMRSLSFNKNELKRLKELKLMENENL

SEQ ID NO: 147510 - protein, 170 aa, Heterodera glycines
MHTVAAASWATHLNLAPPAESIGQMLSKGEGQMKQQQQTVMANNNNNKSRKVPKRRSPSSDALTRCSAAPADAAGANGGAGHWTPAKQLKNVHKNVMELAAGPPLDLQIDQPTTKFADSTTTTKTTTAHVPPIISQLVGTDSSSSSSSSSNNITEQHKLDANGGKIKKII

SEQ ID NO: 147511 - protein, 171 aa, Heterodera glycines
MFLRRTVNAWHFAHCLKNVPRTLSCYVLLLLIIHWDRYKVFWWAAQPAGQQQQQQSQAPGTAPTTPQAQNGAGGRDHVFIYSSFLYNRRFNGQILLAHDCFYEYRHSAQFIGLIDWDDLLVPSRHFATLPEAFAAASAAHPDTAYFLVNKLEASFEEQLGTVFLWGKKRYL

SEQ ID NO: 147512 - protein, 327 aa, Heterodera glycines
MELFSDAVSLPARLLLVHSDPLPSLPVHSAPNDANGPLLLPANVHFQKPTRLKKISLIKPFFGFAFVINPFSGRCVNGLCPIGYVCNSNDFCCAVDLLHVKLLSVIAIQFFPYLQINTNITTSGTLNEGSGGGTGTAAPGQNNTNGDITGGSSAAAAVAGNVHRCQSPIMEAEVAEDTSNKMFPSHEQSQQLQQQPQGVKKESVGSSNSTTSSTRVASVVHPIETTKDSKPKPSVKDNTTISPQALNSMLSGSPLITTPSIAPQQRHAPGDYTDAAVTGGKTRGGVPHHLHQYQQQQVVPHQPMLNHRHPAGSPPSVAATAVEGTTM

SEQ ID NO: 147513 - protein, 88 aa, Heterodera glycines
MAMGKELEQAKESQKQKRGTKMEEVAECHADNETEATKGPTEYLEEREGRKGKRREGKRRRTPSEAAAEEDRRSGRRSECNGQRGLSD

SEQ ID NO: 147514 - protein, 96 aa, Heterodera glycines
MTLLVIACLAIAVFSGSSIANRHSFVEHYDATNIQKIREVFLSLNRKRVLKCCAIPCRTILCHGSRGPAAKNTNSTLANSHGWLREKNVWHKMPIW

SEQ ID NO: 147515 - protein, 205 aa, Heterodera glycines
DPTSEFGGEITIGGTDQRRFVAPITYTPVTHKAYWQFKMDSISGGNGKLACQNGCQAIADTGTSLLAGPKNDIEKIQKHIGAIPLFHGEYMISCERIPTLPDVTINIGGKAYTLKGKDYVLKMTSMGKSICLSGFMGIDLPERVGELWILGDVVTTRCLMWAKVIIPIEPQVRDCVRGGALCFDHSNGVDDSDQQMVEGDFVMTD

SEQ ID NO: 147516 - protein, 19 aa, Heterodera glycines
MPSNSQPRRPSIRHAWSLQ

SEQ ID NO: 147517 - protein, 101 aa, Heterodera glycines
MPSSAAQQMNTASNARQYDEQHNQEHLSIDAKLQKQDSGLNLLPPELQRNMTVMSDESVFEREKRMVVLLVNNQQDKPSQLAVIDVDFQSPGFSRVKKKDN

SEQ ID NO: 147518 - protein, 103 aa, Heterodera glycines
MAVHMRHALAFTTEWGDLDKILCQTPNIKPPKMGSQDLLQNDDFLETFGNKVNVWDMRRRTLFQTVYLYSIGKLNKTGLFSADRVVKFSSVTVGEWPVKLVYK

SEQ ID NO: 147519 - protein, 170 aa, Heterodera glycines
MDDQHLYVFLGGIVYRTMGILHGDKMPLGKDSAMRSYNTERRFFAGRPFEGGPARLQLSLDGRRLFVSNGFLRNWDEHFFPQLMDEVFSTKQVHIDPVGTNPMKLDPNIGINFEPDEQQQQQQHSVNDHRKRGGGGGDKNGPATQPQQQQQHFYAREMRFLNGDSTSDLL

SEQ ID NO: 147520 - protein, 75 aa, Heterodera glycines
DFNEHGAKPRSRINTAYDIILITCDHKNEKAVHGKRHISLPDIVIDAATPKMDEKSTAEVHFKIGEFIFKFKYLP

SEQ ID NO: 147521 - protein, 125 aa, Heterodera glycines
MMDSSSNNTTNNGGSSSNANSVMPSPLSRHNLPPGLGLGFGLGGGGVGGGAPAPPPSLVSGMGLANRGGGGGAGDDAEQQQQQGGRPGSNAGPGQQNGRGPSPQGVCVLFGLTVKLYNNSAPSES

SEQ ID NO: 147522 - protein, 60 aa, Heterodera glycines
MVLILGNDPSLTTKLRIGNFLFITKYLFHFFVGGNPRLKSGIRCPFIAYLNGDDLAPRIK

SEQ ID NO: 147523 - protein, 98 aa, Heterodera glycines
MAMLIIGIKMDEHNAKGAIAQPNLEPLGLLFSFPGQKMEANGNNAKDEEKQPPKGNQKKKPNKKPFLIKLQRGGRGKRDVLGNDDGFAGGWDHPIDST

SEQ ID NO: 147524 - protein, 17 aa, Heterodera glycines
HKHLFDLFYHIHNLIKI

SEQ ID NO: 147525 - protein, 65 aa, Heterodera glycines
MPMIFMPNIGILYRLISLQICTLVSSYSCTFEGFVWTAYAQSYSKFDLKLFIIPSVMDVSNHYAQ

SEQ ID NO: 147526 - protein, 295 aa, Heterodera glycines
MLIKKGSNTKLIRSLLHGDLISPFWLGTRDPEETCGMCHNSLCSGIEEHSNCAAITLADLHPAFAVMDKLRNVKIETLGELISLMIAKDVPIAQIRNWATNRNTHGPDFLLKFSSNLSPSSQEFISIISLWIDRCDFAFHNLQASGCKKIKFLIPKENKGYPFQKAIENAIEDVKARSVLGLSKVIRSPFIVFSDSVGEVMKNKLEAEIFLERSYTALSNEIVTTYFGEEVKEILIMAGTDDIIGNVPIEETKKAIKKISFHLSKFSIKTFIIPHAYSFQKNQGHMKNFLICWMK

SEQ ID NO: 147527 - protein, 113 aa, Heterodera glycines
MASGFGTFLPLFLLKRLLIFHHQAAISDPNCAAFMVEPIQGEAGVIVPSPGYLQCVRQLCTKYNVLFIADEVQTGLGRTGKMLCCEHDGVRPDIVTLGKAHSGGLYPISAVLA

SEQ ID NO: 147528 - protein, 27 aa, Heterodera glycines
NSALVLIWQKIKPFFLRTHWCSIHLTK

SEQ ID NO: 147529 - protein, 91 aa, Heterodera glycines
KGCRVWDVNGKEYFDCLSGYSALNQGHCHPRLVETMQRQCQQLTLTSRAFFTDALGHYEEYVTKLFGYQRVLPMNTGGTNKSPNCRLTTKK

SEQ ID NO: 147530 - protein, 205 aa, Heterodera glycines
MKRSTRNASKRENKKSRSSDSLRQEKQQEKSQNCIKKIDEYTTSSKKFQLLRSKSKFVVQNIDQCDNPTKELEECIKSSINEAIEDAKRTLGGADKAGVVISSEMLDQGDIIVPITPISSNVADAVFNQFIKVEQSVARKSLNIYGTPFVITVTGCIFPETSGKIAEAEARSSKLKKPEVFEAEAEVSPSPGPETCATNPLARFK

SEQ ID NO: 147531 - protein, 37 aa, Heterodera glycines
MSDNVFALLDDFDIENIDPSLNFANDDWMEEIGESVT

SEQ ID NO: 147532 - protein, 66 aa, Heterodera glycines
MNRRWICNDVWMDIFPSFDRPQLGLKLALLSPRFNALVDKHFNGKSELTIWRTIEIRRKDKGPEPK

SEQ ID NO: 147533 - protein, 82 aa, Heterodera glycines
MDFDLLIKKLQYVIRKSGPFRKMKRGKAKDKQQKHGNDLIKSGADQQRNRLLIRTSFSRWPEEVKKSGFLNTFLNNFLKQKL

SEQ ID NO: 147534 - protein, 1108 aa, Heterodera glycines
MSGVIRSKIPLLNRVIKKEIESAKTKLEEGKFEYDQNNTDECLRVFNKTKEIIQKIEPNFEKLKTLHKKWQNLMRKMDKEQWNTEWKIQKIFREKHDYLKTIKETDEILDTLKDIKLEVKRRLKVIKAKPSSDTDQEDESNDDEEENEDEEIEEEDEEEKEYDSDQEDDSPELTSNDQTNRKQTPFVNYRSRIKLPPQTLTHFSGKFSQWPSFWDDFKSSVHNDPNLENIQKLKYLRGLLHDEPYRIVSPYPLTNKNYPIIVKLLKSRYGNPQLIRENLHSELRNLRKPNESTSELRRFILFIDRIILQLQSQGEEINHPQIKQSIETKLPFNIRLKLREKFKLYSTKELMNFLNSHTQAREDIERMEDSNRQIRNFPPHRPPQNRPQRQSYPNYSQPQLKANHRNHQNLPLSPYPITSALTTKSKPVRLAEFKPKPSQPKPQTKIKFCRFCERDNHLSKECKIYSTTEKRSNRARELKLCLNCLKKGHHLRECKSSFSCFNCKSKHNTLLCTRKQNQYNQREKFTKVNVTQNPEEFEETQTFMSMDSDQNQKIIQNDEEELLMTTEAPVLNPDQNKTQNEVIFFDNGSQKSYITDECADSLQLPTIEEKLLAISTFNQNKPKIISSRLVKIGIKTLNGEIEYVTLQTVEKITEKMVNRETVDIFKNKIPINHAYPQILIGIDHSWHFMLPNSQIQILPSGFYSIDTKLGKILSGKGTIEDTNVNLVKEKRKKDETNEILQKFWELENIGITDSPHLTDEDAALIHFDKNVIFEENRYHIRWPYKRETPNLPTNFGLCLGRLRNVVKQLIKNKQLESYNKILQEQMDTNVNEIADFKSKNLIHYLPHHPVIKESSNTTKIRPVFDASAKLRGSNSLNDEIHQGPKLLPDLCGMILRFRLKNFVLLGDLEKAFLRVGLNETDRDTTRFLWVNQSYLDEINQKYREIEMRDVELRRFTRIPFGVNASPFLLTAVVNLHLSKTDEMFEKFKTQQIDKELCLNGKEKQFKELCTELKENAYVDNFVMMCDDENEIKFKHYWSKEIFKLASMNLREFVSNHEQSNKEIQKLEGSEIPKVTKMLGIKWNVDTDELELQIKIPLMSRETRQKGKF

SEQ ID NO: 147535 - protein, 582 aa, Heterodera glycines
MNLREFVSNHEQSNKEIQKLEGSEIPKVTKMLGIKWNVDTDELELQIKIPLMSRDTTKRQILTMIAKNFDPMGWLSPVILKYKLFFQKLWRSNKDWDDKLNDEEIREWNNISNTDEISIPRSPFTSQNLKCASLHLFSDASELAYATAAYLHANNKTDLLFAKTRLTPLKGLTIPKLELLGLLIAARAVKFIVKESKLKFETICIWCDSKCVLSWLKCKKNLPIFVKNRVEEIKRIVSEFHITFYYVKSADNPADLASRGTTMNEMKYNELWWKGPKWLKLGKENWPAHSFYTPEQNDSLYDDNIMEIENTQTNLVKMDYQGFIEWKKCNSWDKVTRICQILLKFVFFTLKDSPEFKTKFKIQKFQNELSLKFMAQKMLIRIIQKEMEPNNEEERQLGIYRDNDNILKCGGRLKNAQIKATNPIFLPRTHFGTHLIIMDHHQRNLHAGTMTTLAEIRKTYWIPKGRRIVDQIRKQCFYCKRYNAKPYQQPKMPQLPKSRVQITEPFQNVGLDYMGPLQVKSFTEKCWIILFTCCTTRGIHLELVTSLSVQHFLNAFRRFISRKGTPKNIWSDNASQLKLASK

SEQ ID NO: 147536 - protein, 86 aa, Heterodera glycines
MAKMVFLSPRSLWIDAKYPFRKTPTREALVPRSMPIACEFRGIILCELEICGILTGFPITLPEIFFNGLYQKGKKYLATLTKNSKS

SEQ ID NO: 147537 - protein, 60 aa, Heterodera glycines
ILVISFCFWWGAWNSGIMRTRPIWQVKQRLLTSQKVRCRDETNQHCLPRGTRHGPPKEWI

SEQ ID NO: 147538 - protein, 54 aa, Heterodera glycines
MDKISEFFRTSYPGVHFSKTTRTRLIINVIFFDGFVFFPKSVNEFVGHESDLRF

SEQ ID NO: 147539 - protein, 262 aa, Heterodera glycines
FSSNNIFKVHRLMLVLVFLKSLTLLFHGVNFYFVSVYGHERELWAIIYYVTHLLKGALLFGTIILLKGALLFGTIILIGSGYTFFKQFLSDRDRRLFIFVQFLSDRDRRLFIFVLPLQILANIAMIILEESEFSDQRYLFWLEMFTFLDIVCCMSILLPILWSIAFLTECAAKTTDGKAAFSLERLRLFRRFYLHVIAYIYTTRGAKFTLEYFLPDEKRWVSEAAAELASLFFFCLVGAKFRPRKSNPYLRINLEGGDVEAG

SEQ ID NO: 147540 - protein, 215 aa, Heterodera glycines
RGRELANGVQTNPHLCQLQQQDQGIDSLFFVFDFTAQRLVVVRSGHIKSIKLCTNLSRQGQKKDIKFNICHGFALFSCPYSEDGETRNSTSSVVASSGGFLSHLFGGSSSSNDLKLPYFDYLPIGLHNGQYSTQFAVRFNEQQKGFFFLFFHNCFNYREHGYSDRVAVDLAAIIVEKNVNSFLSVVDIPKPSLYVYFAFLFALATILWANLLCKS

SEQ ID NO: 147541 - protein, 151 aa, Heterodera glycines
MQQKSFDEIFGEKWEEKEMENHQKKSEIIQKYYKIKENIKQKGRKYPKKEWNKIERKIGRKLGTNRNKIYEWIKELGLNQKPNKCYKSKTDEETLEIVQMFIAMKNELKQKGKHSKKERRQREGRLIEKETDCERKKEREIERKKEKRGSE

SEQ ID NO: 147542 - protein, 459 aa, Heterodera glycines
DSPVDSNNSDNNSSVVQRKLYKADENPPWPLTLLFGLQQVMVSVSVLVSIPFLISDEVCPGQDRDQLRVRLIAGTFVVCGLGTILQTALGLRLALLQGVAFAYIPSVRAYMNLEGNRCNATIHDFVPAEVYENKLAIIQGTLVVVSVLKVLVGIQGTLVVVSVLKVLVGATGFIGKMTKYIGPMTVSSLYIGPMTVSSLLILLMVESVTITVKRMEQHWISLIMAVALFATVLYLPRVNVPMAVALFATVLYLPRVNVPCPAYVNGKFSFVGFNVFGQFPYLTAILFSWFLCWLMTVFELIPPYLTAILFSWFLCWLMTVFELIPKDSVARTDKNGTMMAIQNAPWARVPLPGQFGMPKFNVGLFMAFIVQFGMPKFNVGLFMAFIVSGLTTMFEAVGNYHAVARVSEERPPPSHAINRGIVAEGLGERPPPSHAINRGIVAEGLGCLIAALIGPCVGI

SEQ ID NO: 147543 - protein, 51 aa, Heterodera glycines
MTLPMFVDVYAFPGPLQRTVEAIPLLKYMPFMPKQKKANANLRNGFGENKF

SEQ ID NO: 147544 - protein, 183 aa, Heterodera glycines
MEANSGSLSASLQAAEAEIGSLKEMIKLQNEKMKDMRHCFVNFRSWLDQLEAWASDNKETKFVRPDTRKRALLDDSPEMPATSNAASAAERKMRGAGDWLFKASTPQKKWWRRKWDVQFWTTTKFFFKIYLPKIERHPTPPACDGFVVQPTPYTVGLAPRLRKMNGVGSMGMCRESILLRESN

SEQ ID NO: 147545 - protein, 172 aa, Heterodera glycines
MPTSTFGDRSGTNLELTLCSSDNDDDEHPIWDVLAREIWPIFAPSIRHLGFFDDEQFDALCRRISPTILTDLDQLVSINFDQLILVIADDGQNGTSPGQVLSEWLHTPRKDGQPKRLFCEELDGEGNIAWLNSFKEQMVKVSRYSINDSNNLPLIAFPTLDDINLRWHFSKN

SEQ ID NO: 147546 - protein, 199 aa, Heterodera glycines
MEAQRVISGIKRRAEQTMEPPATIRSLALQNVATPVLAQLPTKQATKQRYQNDPTFAEMARCVTSLAFLPIGDLTPGIIALDMALPDELTPVLDWFIMNYTGRLKHDGSRTRPRFDPNIWSVYTRTLQSDDRTNNHSEAANRRLQCAFACSHPSIWRFIDLLRKDQKLSDDDFAKCSTGQEPPQKAKKYRNADRRILTM

SEQ ID NO: 147547 - protein, 101 aa, Heterodera glycines
MLWQQSLIRPLLMGPCVAPHFATSLRMLTTQEAIAAGMAQAIGTTRPTETEGTDGAGCKTLRPTCGAGQVVTIHVILANGDTDFGNYDLVPSRWIAMPKGS

SEQ ID NO: 147548 - protein, 35 aa, Heterodera glycines
MSSWRNVRTPSFSIELQGRPGNGDIEIQKTVQMSP

SEQ ID NO: 147549 - protein, 130 aa, Heterodera glycines
GMNWDRFSSELDDSLLNDSTTLKVKKAFWSAKQLLREKLGKREDEHIVAADAELDTHLQTFRQIRDSTQKLLNLMETHQREILNVSIGSAMEDQRRSHTTDGVSKPDKLNTSRPSSARRRQLSAGSDNTE

SEQ ID NO: 147550 - protein, 125 aa, Heterodera glycines
MKRVRELLRFEDDAMIGMAQPADQVRLKCPAATSSESIGLNLLKHSSSSTANLLDDLQHGWDSIGCSSAALNDLEHKKKNAETKSQLNYFAFVGLRDAVPSTLQAVAQRPDQRGHHGESAAGQVP

SEQ ID NO: 147551 - protein, 142 aa, Heterodera glycines
GGGGIPKLNTFRPSLSPPWLGDVKGMLGDVKGMADRIITMRSQLRDLLAKAGSKRNWDHIVNQIGMFCFTGISPEQVDRLAKEFSIYLTRDGRISVAGIPEQVDRLAKEFSIYLTRDGRISVAGISSKNIDYLANALHEVTK

SEQ ID NO: 147552 - protein, 122 aa, Heterodera glycines
MAVGLALLLPIILLATTLNPLYQHIHPYLKYPLLHTGNSSPSHDAFATDIYAMVGSQQQQQYHLLPTQQLKHNGNKQYTTQQQQQQQFTSPYATSNYGYHELTHPPAYSMSMVGGGGTGQRR

SEQ ID NO: 147553 - protein, 291 aa, Heterodera glycines
MLHREHFRQAVHIGSIWLSLAFISVFGLLAALAMLFGANVSHLVCRPLEEPLQRPDFLSLLDRFVHLYGLDRPSSVSPHKSSPSAADHFSLDQLFSANRRPADLISECAQKHTLYTMLGLDKKFKLIGREGLQDDYQYLVNRQRSIMDNLSSHQLIDEALSRGIVPDDPRLSARQWHFFSGPMRDALQRLGQVRMPEWNSSDVEQFCAQPKRFALEGVVAGLRQLSQQAQAEANNSGVDGEKPAGTVASNFSELDAVIHFLEELRPDTASERNSDLMAFTRDESDQTVLRC

SEQ ID NO: 147554 - protein, 235 aa, Heterodera glycines
MVAAIDPFYEQYANKGLIASEILINGIISVICLTGICLNFCLVYVTIKTKSLHSPCKTLIALFAFCSSFLLFGTSIKFFVFLFGINYILLKHCFFIQLLPLIGSSIAVSLQLGIGIDRLFGVMFPLWYKSRGKYTSFKGIIAFCCIKLAFFCFVTYSGSAAHWEKWTQNGQLNLNLNFVFGSFRPVMCHLGDPAHQPETAYYTDINALISYCAEFVCYALIWLIIWRRTAQSHSV

SEQ ID NO: 147555 - protein, 182 aa, Heterodera glycines
MAHPKMTLPKMANPKVAPLRMTHPKMTLPKRANPKAAPPRMAHPKMTLPKMANPKAAPPRMAHPKMTLPKRANPKAAPPRMAHPKMTLPKMANPKLSVILRQQIYQINQPLVIFTKVPQNPFQLEHRKASTAQKVPRRQTRPKSMEQIETNPAKLTAANPFTKTLAFCIFEHFYCSKKQLVK

SEQ ID NO: 147556 - protein, 799 aa, Heterodera glycines
MTTHAVNSISLLKTAVLFNKKPVEFHLDTGSDIVVIDQLTHEYVGRPPIEKCNEIGKAFDGTKISFIGKGFGTFKFGKIEVEQTFYVAKAGSLNLLSCKMMDLFGLLDELKLKISNPAVNACHANGKKAENLIPNEATQIAGTEVKIQGLEKAFHEIFSEELGHCLKEKAHLALKDDARPVYRKARPVPYNSLEVVESELSRLEKMNVIKKVEHLEWAAPILIVKKADGSARLCIDYSTGLNDALLDCQYPLPIPEDIFATLNGGKIFSQIDLRDAYFQVELDENSKNLCGLATHKGNYRMERLPFGVKSAPAIFQSIMDKMLAGLEFAIAYLDDIIIVSKSIPEHTNHLKEVFGRIQAYGFRVKLAKCKFFRDQIKYLGQIIDKNGRRPDPAKIYAISQMPAPNDIPSLRSFLGMVNHYQQYVKNMRFIRKPLDDLLKKEIDWSWSEGCENAFRKIKEILASDLLLTHYDPKMDIIVAADASELGIGAVIYHKFPDGNIKAIAHASKSLAPAEKNYSQIEKEGLALVFAVQKFHKMIYGRHFTLQTDHKPLVSIFGSKKGIRQCSANRLLRWSLILLAYDFTIEYINTKDFGQADALSRLIAKGNEPEDEKIIAMINAETDFETNFDNTISKLPLKFSDLIAASERDENIFQVQKFVKNGWPNEKAMDKENQIVRDLCRRKEELSTEKGCLMYGERVVIPKVFHSKILKLLHKGHPGMKRMKQLARQYVFWPKIDQDIEDFVRECVPCQAAAKAPIKTNLQSWPKTTGPWQRVHMDFAGPFFGKYFLIVVDSFSKYPE

SEQ ID NO: 147557 - protein, 76 aa, Heterodera glycines
MSKLCMTILLLTIGYNSFSLSAEHFSYFSECGISDFEPEFPKKLFVSYGSANASNQQHKSGVEAIKYHPKSQHFRI

SEQ ID NO: 147558 - protein, 17 aa, Heterodera glycines
MDVSRSYAAKISFKGFI

SEQ ID NO: 147559 - protein, 142 aa, Heterodera glycines
MIAFFFLNFSQFANNGPTAADDEVHFNNFFKNFFGSFLSVTEMACSVLRYSILIVLLCFVYGNNEENSQKTIQKEAGTEHKNDKHIIDDDYLDDEFWDKLSPIINLPKIDGVEFVGNHFKHTEQKKHDYTHEGKIQIYLFIT

SEQ ID NO: 147560 - protein, 201 aa, Heterodera glycines
MYYNNNSNNSQHHDDDAFGGDAQQFMDGQQMSSQQQQVATEPHQFRQQHNNRSSGGEQFNSPVSSQERLHQMVLFSSAATAAAGGAAASSSATNGGSNSGTMNGGGRGCVASSQNGSSTTNNNNNSTTSRGARRMPSSALATASTSSLRGISDAELVGRLQTARERLQDALDMIDSLQRELSVRQQLQLRGGGRNVCYDDE

SEQ ID NO: 147561 - protein, 172 aa, Heterodera glycines
MRNFCQNLTVGIIRYDSIKWSQKGNQQKKFKCDYSADEEEEGIDVNDDEHHHHQQQQQVMFNDGDEEGEEQGRPVDHHPQNVHDEHGRQHVVVSSGGCAKRSGGDASALALAPPPPLPMYREEWEETDSAEATALRLHKRGRVRNMTSADEASKTQPIAHNGGRNGCPHPIF

SEQ ID NO: 147562 - protein, 47 aa, Heterodera glycines
MHKKHNIIRWAAENLLESRDRGIDHETRGREFVPMLKTLRIGLETEE

SEQ ID NO: 147563 - protein, 60 aa, Heterodera glycines
EGMERKDLLAANVRIFKSQGEALAKFSKPTVRVLVVGNPANTNALICAKYAASKIPAKNF

SEQ ID NO: 147564 - protein, 105 aa, Heterodera glycines
DSMESLIHHFKFFTEGFQVPPGAVYVPTEAPKGEFGVYLVADGTSKPYRCYIRAPGFAHLSKFAHLSKIHDISYMHLIPDIVAIIGTLIVAIIGTLDLVFGEVDR

SEQ ID NO: 147565 - protein, 114 aa, Heterodera glycines
MWMILQQDSPDDFVIATGRNYTVRHFVELAFKEIGETIIWEGEGVDEVGREKEKGTLRVRVNPKFYRPTEVELLIGDPSKAKKQLGWEPKVEIEELVKEMVASDIELMKKNPMA

SEQ ID NO: 147566 - protein, 38 aa, Heterodera glycines
MGLAMGTVAEQIPFVQILTQVLFVILPFNEPKFDKFNA

SEQ ID NO: 147567 - protein, 104 aa, Heterodera glycines
MCPWGWASSPPTNRCTFPWVTFFQVLSPRPGPVLDPFAWRPSGVGHLCRRALSLAPTPVDGQPKLSVRYQRLFCAARLALQNGINGVRLCLLQMEKIGEKYVKN

SEQ ID NO: 147568 - protein, 333 aa, Heterodera glycines
LNLIQINALLKLYKLTLMNLIAGILAAELAPIAATPYQCMDLGCLCKYLNGTVEGSNSCQEGSNSCQLADNQPLKKSVRKEYRMLSDEERIKFHAAHAAMNAIKKSGEYDKIAGLHAAFGQSGAAHAGPAFLPWHREFMKRMEIALRQVDPSVSLPYWDSSLEAQLPTPGDSYMFTKDFMGDTDEEGNLVTGPFAGWRTLTGTPNVIRHVGQGGKGFTENETGTPNVIRHVGQGGKGFTENEIQWFLNQQQIDKVLGYSSPQPGVFIYIIFLNLQVTHGNVHLFVGGDMSDTSTSANDPLFFLHHSFVDCIWEQWRVARQNRNDREMTYPMDN

SEQ ID NO: 147569 - protein, 30 aa, Heterodera glycines
MSDVDPCAKAPTKALRIVCTQLHRWDKNAR

SEQ ID NO: 147570 - protein, 106 aa, Heterodera glycines
MNCKLAFLFVFLCFTYLNVAKCEEKHEKSAINNKNNGISNSNNNNGTTSSTNDHAEKTEKKVAKNEEKVPTEDESAEDDMDLGFLDKNLVPGKPRKNLVQEKARQI

SEQ ID NO: 147571 - protein, 173 aa, Heterodera glycines
MAKLLHFVPPSSDHKMPVFFQIEDPEFSKLITSNHWLSPSENDPRMWRKSERCDMYGKDCYRVKGLLKKLDALIGCKRMKRASSNETVPSLANEGLGCYDLKPSETLLCDCDIVCDKHELQQRLDARKENQSRIWESVPGIGRINSAEILNRSRDQYFGTGPGKYYRRRDFEH

SEQ ID NO: 147572 - protein, 125 aa, Heterodera glycines
PTWSFTGSTEIRSIYSGEAKVYDLKKFVFNAGTTELNYAIHLNEVCEQGWAKLGLALEAEAEGEAQFLFEAEVRSSKPKKPEVFEAEAETGQDQVLMSRFSRDTDPDLLGLESRKTTCPCIILKS

SEQ ID NO: 147573 - protein, 110 aa, Heterodera glycines
MAHTYVTELAGGIPSARGTKYSYTYESRVEEEGNNELLEQSQRRREETDEEEMKQQQPITELRREEEEHELGRELRRGEDGTERHCTSTQKVGREAERSTIDLIGQCQIK

SEQ ID NO: 147574 - protein, 63 aa, Heterodera glycines
MGCASTVSDKTEKCQFNTTKCDDPFEGCVFSTFFQDVKWVLGLTENGLSRGEPKNNLSVNKNI

SEQ ID NO: 147575 - protein, 367 aa, Heterodera glycines
MEPVTVSKSNAEPVTVSKSKAEPVTVPKSKAEPVTVSKSKAEQETVSKSKAEPVTVSKSKAEPVTVSKSKAEQETVSKSKAKRSVGPPNSVARPNVLTRKIKSAAAVPQFNVESDSAWITISPKKSGRKSTVVEAVEQLNPPSPMKNEEPKQKVIEKQQKKSRKSAKIRTDSIYVGTVIENTMGTDKQNEKKAIDVQNDKASTDKQIHKVGTYRQNDKISDGKDAKVDTDTQSAKSGINGLNAKVGTDGRSDKAVIVAKNAKFGTNGESDKLGIGGLNAKVGADGQNYKIGTDAKSAKVGTNGERDKLGIGALNAKVGADRQSDKVGTDKQNAKNAFDETWEESIAMKDKGKAEKVQEIDFDYFIWM

SEQ ID NO: 147576 - protein, 93 aa, Heterodera glycines
MSKICMTGTNFIRNNLVLHRRVNSCQSSTAGDEQKKTIEQKNNGTSDGEGPSQRESTRRPSLGDLLNARRKSEADRESMDTLWEPMNEGIFRF

SEQ ID NO: 147577 - protein, 60 aa, Heterodera glycines
MIILCLGDKHKTYKNTFCEIDEHLRRFRWERGLVKPIFKSKALTLNGTSFTQAKTLGLQI

SEQ ID NO: 147578 - protein, 233 aa, Heterodera glycines
MCEGRTEHGQLDGRRTKAKKAPHFLVTFLCAAVPLLIYAITAFLLLLSLFLLRLRPAICLHPNSAPLLPQAEANSAEFSSHCPPNLWTAWNCAQFDEHNWPTESNSTSKGQNEANETALFKKINATDKKDEGQKVLLLLKQKQRQHFGEEKTDSTVSVEHFSTENGEEKDESGRLSSETSSGAEEKEEAKKNSSEANGEGKGKEREETEGGGQREGGDEEEEEKGENSTNCGN

SEQ ID NO: 147579 - protein, 20 aa, Heterodera glycines
MNDQSKPIKKGKCEWSEERK

SEQ ID NO: 147580 - protein, 61 aa, Heterodera glycines
PVRHRMAPEGGTQRQQQKRSGRKGTIREAAVEEEEAEDENSIGKAENGKEWEKRRNREREL

SEQ ID NO: 147581 - protein, 89 aa, Heterodera glycines
MTAIILCILIAPICHTIALETINNPLPAAEQMIGNDYRTQTTISIGAAYYDFSRFQLNIGRITLRNVTTVLAESEAKKLRKSRGPSLVK

SEQ ID NO: 147582 - protein, 118 aa, Heterodera glycines
MKSIFLILFAFFHVLPNLVDAGNCLSGTAMSWDAYCQSLGENECHAKVITPCKLSDNGQCVIKRSIGTVTINDNSKIWKDSCHRRQNERCTNSRFEPCVWQVNDCVFFGTMFTFTTQR

SEQ ID NO: 147583 - protein, 81 aa, Heterodera glycines
YCPSLDFDNLSLTPELNRSLVGVISCHHQTFSIFSIPLQCGNHSAYLSACGNQRKPPNPSSAPARCWQVKPCTRPINPQWW

SEQ ID NO: 147584 - protein, 157 aa, Heterodera glycines
MKKTGQRKRKVSGMATAAGEKEQKEEKKEDEKKGAEEELQQQLPVNAGTEGTNEGKAEVGEETDGAETTEEAKKEMGAAPGEMVEDETEGREDVCKKGNSESADAGLEVEQLKKMLRDSGQMPTDNAPLPLPRWVKGCGAFKRKYKKIYDNMIKINN

SEQ ID NO: 147585 - protein, 148 aa, Heterodera glycines
KAFNDRVQCHVDRQFHEAFAATEFGPLPVRVPTPDGAQLATVAQLLAKAERPLLLMGSQAMLPPVEPNTLVDTVNSLGIPVYLGGMSRGLLGADSPIQMRQNRKLALKEADLVILAGSVCDFRLSYGKNFSPNTKIVTINRSEEQMLK

SEQ ID NO: 147586 - protein, 207 aa, Heterodera glycines
NSDAFAFPQNHDVFWQSAVAVQADVALTLVGLRTEMVARGWKSPCGWAELLREREAETEAKNAKRMAQRPADGHMNPLVLLDAMNKVLPKDAILVADGGDFVGSAAYIVRPGGPLQWLDPGAFGTLGVGAGFALGAKAVYPQRPVVIIYGDGSSAYSLMDFDTFVRHKLPVIGIIGNDACWTQIAREQVPVFKTAVACDLDDTHYEQ

SEQ ID NO: 147587 - protein, 1092 aa, Heterodera glycines
MALKSINSASLIKIKVLLNGRIVKFILDSGAEINVIDEETYRLIGQPKIWECAERGRMFDGTEKSFIGKGEGHFEFQGVKFKENFYVAEKGLMNLLSVQTMDAFGLLDGIKAKINSPINLCSAGEELRGKTHAPIKSNKVAGKRNKDAEKEINQLKQEYTNVFKTELGLCKKVKAHLELNANARPIYRKARPVPYNAKEAVDGELDRWEKMGVIGKVEHTEWAAPILVVKKADGSARLCIDYSTGLNNALKDHQHPLPLPEDIFATLNGGQYFSQIDLRDAYLQVELDEASKKLCAIATHRGNYEVKRLPFGIKTAPGIFQSIMDKMLADFDFATAYLDDIIIVSKDQKKHSEHLKKMFSRFQEWGFRVKREKCSFFQDEIKYLGQIIDKNGRRPDPSKITAINEMPEPMDVSSLRSYLGMVNHYQQFIKNMRFVRKPLDDLLKKDAEWNWSDKCKNAFDKIKKILSSKLLLTHYDPQKEIVVAADASDQGIGAVISHKFPDGTMKAIAHASSALTPAEKNYSQIEKEALAIIFAVQKFHKMIYGRKFTLLTDHKPLLAIFGNKKGVRQCSANRLLRWSLILLAYDFNIEYVNTNDFGQADALSRLIAKGKDAEDRVIANTCVDSEVESILIGTIEKLPIKFQNIVESSKSDPNIKKVMKFIRNGWPQNVGNENVEIRIFHQRKEQLSITKDCLMYAERVVIPTQHRAKILQLLHKGHPGMKRMKQLAREYAYWPKMDQEIEQFVENCQPCQNESKAPTKTHLQSWPKTTGPWQRVHIDYAGPFFGKEYLIIVDAYSKYPEVFEMPTKSTISTIEKLRYLFSRHGLPETLVSDNGTQFTSHEFAKFTNINGIKHLFSAPYNPMSNGQAERFVDTFKRTFRKLKGEGAPSKSIVETFLVSYRTTPNDSLEESKSPAEMFLGRKPRTTLDLLKPTPTQPIERNEEMEQRFNRRYGTKIREFAVGDKVFAKHRISQNWKFGEVSKKRGVIYDVDFRDEPSGRFHANQLRPRHTHDETDHLQIFLDAFDIGKQTDRQIANELEAQDEPNQSAQEQGLENDLSQSDNDESVAEEADQQVQPRRYPQRNRRAPQRYSP

SEQ ID NO: 147588 - protein, 20 aa, Heterodera glycines
YCSSINIYLLIVFLKPSDRT

SEQ ID NO: 147589 - protein, 132 aa, Heterodera glycines
IGRQIPRTNQHSLVTAGLGMNDQSDTDRDFYCTIIRCCNLSPSVLANANKFLSDRPQLIDCPRCKVHGFTELKHVIGLFTWVSFLVLLITGLFVLPLFFLWVPFFIDTFKDVEHRCPNCKTHIGTFRRLGKS

SEQ ID NO: 147590 - protein, 158 aa, Heterodera glycines
MLHSEWTLSMVVNRPEILKWPGLDPALGKWTEGTPFFRHYRFRCAVKASEKEVEKAVDECYMEHNVVNVQHKRCECMGNNGPDLYGQKNPKYGRNGAVTKDPQTKDPQTKDPQTRDPQIQRTHGQRTHKDRGPTDKGPTDKGPTKTEDPRTKDPQNNN

SEQ ID NO: 147591 - protein, 117 aa, Heterodera glycines
MNCTATAKTIGMRAGVEVQLGKPHNHDPSPTRCEAAKINRSVRNTALSSRGNMPRTVVNECLAGASNEVIASLPLIPSMEKAVSRVRHAAGVNFKYQNTRRYRDTSGTIYFRPNLFL

SEQ ID NO: 147592 - protein, 162 aa, Heterodera glycines
MAKRTLLRKRQTKNARHTHENKREERRTKMAKATKARLAKKTASQSNPNAEMPQQDEAGPSTSAASAEEAMEPPPPTPGPVPTPEMDEEILEFDDPPPSTPATPIGDLVPFPSTPTAPMERGTASGKSSSTPIKWRPFSRRNGAKKFAKRWHIWGKSKFSPK

SEQ ID NO: 147593 - protein, 113 aa, Heterodera glycines
MACHPDFQDKLRAEIADHFGVATQGETELELTASDVNKLPYLDRCLRETMRMFPVWPRHWEFDPDNFLPERMAKRSPYDYLPFSAGPRNCLGVEQGRKRKILAHVKVLNLLLQ

SEQ ID NO: 147594 - protein, 107 aa, Heterodera glycines
MKKGPDYKFFHHLLGNGVLVSDGDHWLRQVVEDRIRINEANGGIRKDGLMHSEGSLYKGKIMAFLDFLLTLREERKLNTEQVREQVDAFMFGGHDTIAHGMMWSVYT

SEQ ID NO: 147595 - protein, 149 aa, Heterodera glycines
KFHSQAVDRKSAIFSYLHNVSAIFFTSFSSTGPWSRTCASARKRGPKSGRTSLTCRCGNWAKSLAICGITFRRPKKRCTTTSMSRTKSPFLILLFSDLYKKRDRTIEYEKAMKQYNAAYSQYMASKSRVKSAHQQHQQVEFWWKGKTGR

SEQ ID NO: 147596 - protein, 22 aa, Heterodera glycines
MFKKLIEMLKKVCAERPRVDQQ

SEQ ID NO: 147597 - protein, 103 aa, Heterodera glycines
MWYHKRIGASNPNAEPAVQLPVAGPRNTVEEPICGADGQGSQHTRMLLPPGGFNAVPFAGAQDTVGDRERTRWRLLSCSVINRNDDQAQRAKNSTHYEMAFVN

SEQ ID NO: 147598 - protein, 1190 aa, Heterodera glycines
MRDCETRVAGGGGKAAFNLFASRQDQHGPAAAQLLTRAGIDVNRDLYTLDDVQHLQQWINIEHGVGQIRLVVFEKEQEYRIVFKGEGLAAKFNLCLVLERSHFNYIGRVEQLFDVPNYCIDCERRADARYHASGCKVVCRLCLRYGPGYPCQTEQLPNGGSTARKCGDCLFIFPNDGCYNYHLANYAPAPMDGRGQRQRQPICQWRRVCRACWCIAYEGKHQCPRDQAADDDGNCRRCNGPHSVDEPCYIQPVDADSVRQRASIAVDNDDSNDDDDDEDELPLRLCFFDAETSQDRPLQLNNRTAKKHVPLLIVAEVICERCLQAGIGVNDGLGRRAPGCVCMTGLVRGQLLRQWSSPPFVNAAGDNSPAPFGAPAFNQRRFFFHSFDNEGADPVDQFLDFLLHHGPKKAHTVCIAHNGGKYDFHLVLEALHRRNHPPKHLCTTGLKIYSMRLCGRHQRRVTFKDSINYFFCALDALVKSFEVPDHLATVKPFFPYLYIRRQHLLQRLIGLPAQEFYSPGTMKSDKRAQFLQWHANNNNNPGSRFQLREQLVMYCVNDVAILRESVIRFRQLIADNTQGLDPFLHASTAAGLALATFRRCFLPANRLVHSPEGGYLRGRRASAESQRYIRFFELEHPEAQVQCASWSVGEAHIEDSGYRVDGLWRREAPLRPLAIEWLGCYFHGNFAVCLFFLFKSTKLGCPVCFPDRQQQLAAGRTAEDLYERTERRLFELEHDHGCEIHKVWACQWMERLRHDPDLKRRYDAVFVPFPLDPRNDALRGGRTEPFKLHHVCSDDEEIVCIDIVSLYPYVMVWDYDEWDGTLFSSYVNTFVGLKVQATGWPEACETDEQRQAFMDEFERTEGIRLDSTKMEFNPGLRLIAKTLANSLWGKLAQRVGQTEIRYTRTPAEFFALLDDPTVDKLDFVHVSEHMDRCVVRKRPEFARAPPTNCLPVAAFVTSYGRLHLYDYMEQVLAIDGAELLYCGTFVCHIFRGQAHLLDTDSIYYVNKMGGPCVAEGEALGQMKREHIDRRIVEFVAGGPKNYGIRHTARDGTDERANLKIRSFRLSYAAQQLLNFDAMKELTLSTYNIDGQIDDALDNEDLYVYGGGEHRAIRVNFPQIDRNVYADLYTHEAHKDYRPFYAKGRVRPGMQTRPFGYVEDEGPPNDGQRTQRRKRNFVDQDPTQPGHSGWF

SEQ ID NO: 147599 - protein, 198 aa, Heterodera glycines
MDLILATDWINNAYPEMDLEDANKVNKEPTKKQEEEAEDPSWISLIDEEMKREPRFHAIIMRIRTIAGKTVAALVFQSARVVLTGVPHPSSASKMAARVLRRIQHTQSITLDIHQLRVVNIVGVQTYPQRISVERLQNTLGGIYYPTIFPALRCKLLNGVTCLVYISGKVIVTGAKSLDIVHQSFTNLSNIVPEYFRK

SEQ ID NO: 147600 - protein, 80 aa, Heterodera glycines
MDLEDANKEKKELTKKQEEEADDPSWISLIDEEMKREPLAPIGTPKSVVALNAVAPSRSWTISASGSNAVPMNCMCFSKA

SEQ ID NO: 147601 - protein, 302 aa, Heterodera glycines
MKGSQIITINKCFLETLCNAKKAKALIRGASDEQLLCLVEICLNILKGRVPLRPRHLNKLKAHAQHTKRYLLVPEEIYHSLASPPPSDGTPIGLVRTRIKQIKNDDAINEAERAVKYEQEVKRLNKLTKDEDERPVGVKLENLSDVVDAMPKPVNVTRPIVVSTRRHLKVGRARKENVEQLEDTDDDDYQNPRSSSSNKRQPTQTEILKLIYKNAQSLGVSEEGQVLRAGGRPFITSSVDDIVSHLLNKDKRGQNKEPTAFKEFVERARQNPLLSRHLFPEGQSGKGIYKNTPLKFKPSLWI

SEQ ID NO: 147602 - protein, 127 aa, Heterodera glycines
MAAKKAKGETVAVTANAIVNSGGTTTTALTSAETAVEEQSITASTSSAGRQQQSFQRSGTDGDASCRFGHLRLRRLLSEAFSVEERQRHKAFVGQFSSIGSLGARPEAWLCDEFLTSLSGGRSMISG

SEQ ID NO: 147603 - protein, 154 aa, Heterodera glycines
MNVDHLQRTSRRKLADEIAAVIKRDRSRSASRASLERISREVRHKFAHYTPQKKQQLPRQNKSVDPEDALLILGLVGDEALHSVWRRLEQLWKCMPDADQILQQLEHHFVNNWLLDSGKIDELKQRQSDQREEHDEFDQPEEETDELSLINVID

SEQ ID NO: 147604 - protein, 48 aa, Heterodera glycines
MGVLHVFICISGQVAKPFYFHYLSRWFNSLMEQKIFYIFFTIILIEFN

SEQ ID NO: 147605 - protein, 36 aa, Heterodera glycines
MTRKDFRFPTFLGSEFRLPKFLMKSRKFFKFFFSKN

SEQ ID NO: 147606 - protein, 86 aa, Heterodera glycines
MHQILPTEPIFLPTDGFAGQPPTVRLECLLSFTLMAPVRSLAVVQLKSEIALKMKMVIDDETFKSQCHIRDQRTGANSFFHFLNVS

SEQ ID NO: 147607 - protein, 33 aa, Heterodera glycines
MKQYFKTKGKNPEISDKRIAIELKIGAYTLIDN

SEQ ID NO: 147608 - protein, 196 aa, Heterodera glycines
MAKGIRSLLDTVGEALPQVGNLGSLFFLLFFIFAALGVELFGRLECSEEHPCDGLGEHAHFKNFGMAFLTLFRIATGDNWNGIMKDALRDDCDPSDNCERNCCVDPILAPCFFVVFVLISQFVLVNVVVAVLMKHLEESNKRDEATDAKAAEEEKAARVARETDAETEELLEEEAEIEAEEALEEADEQQLGEELL

SEQ ID NO: 147609 - protein, 351 aa, Heterodera glycines
MTFGNYVLFNLLVAILVEGFQESKEEEKRQLEEEAQRRAEEEERERKTELEVLIAETTSPEFLDKRKECSCGQNNLHAVREQLMVRGEQTKRTAEEEEEKGRRKKPSEERRDRERTEDEDERRMKPSEERRYRGKVTEEEDEGEERRNWGKGTEEEDEGEERRNWGKGTEEEDERRMEPPEERRDRGKWTEEEEEKRKTTKGEKRKRMEEEEEGGRRMKPTEERWKRERTEEEEERKDMGIKYTKNSERIRTILKKREESSKEPCSSISFHPHSADEKNKNNRRSAPPQCSAAEAFLSSQVASVSPQIIPLFPRGVFAVSFAPGQFPQGAVPPTDWAQVVRLRHSLLHVCH

SEQ ID NO: 147610 - protein, 147 aa, Heterodera glycines
SHSLADQSLTPSFQNANPFFSLQNANLFLFSILGMNLFGCKFCKFSILGMNLFGCKFCKIEENWRGESVKRCERKNFDSLLWALTTVFQVRTQNEVNAELLLQAKNVPSYGHCERANFDSFLTAFLTVFQVINQLNDSHAFNTFAFI

SEQ ID NO: 147611 - protein, 172 aa, Heterodera glycines
MENSNQEIKTKRNKQKLEHEGALYVLHQLSDGPQRILIFARSSISEWTGVMKNVYADGTLFGAAFFSQIYILLAKLLLVHIQLSSASLTQFDVSKSQLMRTSHDASLELPPANAPKYRAADARILRLLQGYNAINNNPAHQNDHNYHANVNVNPDNINHLLVGVSRNYEMRP

SEQ ID NO: 147612 - protein, 94 aa, Heterodera glycines
MTLSEKRPQQAPRQFPPQMALFRSDSLRNYTVLCQLCHGKTKPRQEESKERTSDRYYQPMQTALSAEAGIANGFERFFNGQPPLRKKRGEDEDK

SEQ ID NO: 147613 - protein, 134 aa, Heterodera glycines
MDETHCQQQLTDQTSRSRCASSEEGADLLILETMDRHYQLRKLSPRDTLCMAFLLSINWDRHLTIFFDLNGETQQRGGTDMAETIGEELAKMVEGQRKVDKEEEERESHKERAKRPEDTNGGNSVNCKMEVTDE

SEQ ID NO: 147614 - protein, 44 aa, Heterodera glycines
MRTYCKGFAPDITWAVENITKNHLLYSSPNLTHPGAMCFQFFEI

SEQ ID NO: 147615 - protein, 101 aa, Heterodera glycines
MKKKPEDAHFLLLPPSDFGVGKHDNESAKKNKMDKERMDNRAKTFAKEQKPKNTKKRANEWNAEKANKATNKLMRKMAEEKTKMANAMLYPTKGKKDAMYR

SEQ ID NO: 147616 - protein, 148 aa, Heterodera glycines
MKNEMSKFFGENIVNFANAIKINFAAPYENFDLLHSLSEYSPTVYEVIKMAKILGNIENDGQILVLRSDSQIFHFILKYLANSTAEESANQTKFAIKYSFCFLAQFVEELLKKAMKVNELKELLNIELIGEAIESFVEKKEQKCANKK

SEQ ID NO: 147617 - protein, 190 aa, Heterodera glycines
MGSYETYLEPREMLTKAVAAAGIEPEAFVTLKHGEIILKNPDFQVQSWKKVQLKFSKHKSRNPMNFIFLVLLSEYSPTFDELIKMANFFANIDDDGHILGIASDFKTLEIVMKFLKKPYYFNSNPKVPDQHLPCIMAYFVEEFLKKAMAENHYLVFFGIESNGMVIENFAEKKERMCGDKRCNLFSYHFH

SEQ ID NO: 147618 - protein, 213 aa, Heterodera glycines
METRITEEWQEIAFTPQGVTPPIAPLLDDYFIISDKDIIYAGKEVRTQLKCNDQNSAQNFECILGTDACKECWLNRTKSEEELVQCECEDSTFEIECNLCKAKQVAPLKGCYECTTGGRLNYTCSTNWGENIAEIKCPGNLIFLAKCNKNGETQIDVLPFTKSKINMDCEVICPGGKTSLKIKGELMYIPVNERKYQSFQFPLSAEGCMASRA

SEQ ID NO: 147619 - protein, 411 aa, Heterodera glycines
MNGHYYPLGGLVFQGYQDELNYFEDFFKLEMDKSDMEIMPQMGLGNEEVTEGENRITIHLDNNSSREWVLEFKNMGENGLKIIGKGKFKAVLNFVCLAICTLALLNGVHGMDRQPNGQKVPSESADDFEDFEMQQWQSELRDLQQIETAESTSGLNTVATNTGTNNQEVSLATDTVMVVPISEPSHQVRDIIENPVVDTNVQCVVEKMGTTRQLSIPTNLDLLNWAQIHRFLPPPNIMLKAQQVSPNVPLDQRPSTSANNIGNPNVSASCAPSCSSIQCGKYGKAIRNWDGRVARPVQTDLCRRERSAPYFRPRPILAAPHQQPRMVANPPFPVESIPPIHVPSGIRREFLRRMSQETDHFFGLAQLVGEWNPTLATLFLALETFCRAILQLCVTEGGDHPVFSRPECRRR

SEQ ID NO: 147620 - protein, 130 aa, Heterodera glycines
MVDQSNKAKERPSLLEEPFIIDITAIESKCAKPKMAGKGRNDFNIDYRIADGATYELLNNDNLCLFRSFEMLRMKFILAQQRFSEYKRDERKQLEGVHALCRGCNIDINLPFYSIEEYGESIQANNLFIN

SEQ ID NO: 147621 - protein, 102 aa, Heterodera glycines
MSQYSDNSLPPTLDGPYSPVGDDGTELMDEAPPLDEVMKRLPISVVPSDNNERKAQKEPSITRELEAELFNGDGFTCLSAAQAEAGRFKGVVVNNTSYKIII

SEQ ID NO: 147622 - protein, 67 aa, Heterodera glycines
MVIRRGTKVIRRGTNLMKRYKCDLKRLVKNIENNVKSHRKIIYTGRIRTYRPHPTEDDSESPITQGF

SEQ ID NO: 147623 - protein, 47 aa, Heterodera glycines
MKLGLHWHATSMPSASMGGPICLPLLTDGNSIIFEIVPVPTYPWSKN

SEQ ID NO: 147624 - protein, 538 aa, Heterodera glycines
NKPKKRNKSVKRIIGMASFYRRHIPNFSTIVEPLTRLTRKNMTFLWEDEQKAAFSKIKEILSQEPSLSFPNYSKPFHIFTDASIVGQAGILMQKNEFGTFSAISYCSRTLSASERKWPPVQIELGAIIYSLREFKPYIFMSDVELHTDHKPLAYLLKKAEAHPNLARWLIELQSYQIKIVHISGKQNSLADALSRAQENITVKEVQDLDELEDIAEFPICLNLSIDQRLLSNCYLKFGGCTELVSDDATAFTSEFFREFCSLLYINKKYAVPHWSQGNAATERTFRTFNNILSKYVTKEQPDFDEFLDYANFCYNTSVHSTTHETPYFLMFGRDPIFCIDQIIDPRIREPIAFTDETEFKQKLVTSLRRAWKITAELHAEAQEKMKIQYDKTMRTPNLKIGDRVLLRNYDGKRNTSKKFHFPWKGAFRIIEIEGIYATITSCNSPQANPRRVHINQLKKCYENLGGPACTSPRLSSEERNSLAELEADEIHNLPGHSHPTDIPKHSFSLIVILMMKYANEPNIDNNEVKTSLTPQNMV

SEQ ID NO: 147625 - protein, 26 aa, Heterodera glycines
MLINKLSRIDLKQLNFLLCLMNIIFN

SEQ ID NO: 147626 - protein, 144 aa, Heterodera glycines
EDREATTKILDHLEVKAEPTAVFLLGRYDPQRTTPRPLKVVMPTPTHQHMALGGWKRERARLRSQQNLARLFVRPALIKEQLMKKFEERLRKRQKTPASLAFATEISKTANDQVPVVAKGPNQKEASEDISKPPGVFDQTIRML

SEQ ID NO: 147627 - protein, 40 aa, Heterodera glycines
MTHTTIGGPRGLKVILITEPISMANDERFSDEKFSDERFS

SEQ ID NO: 147628 - protein, 70 aa, Heterodera glycines
MQENNSSSDEEGQLLSSSSGNEEAANQELIQFIEFKSKRGASLLARNGFEYQFERNSALVDNVEYWKCVK

SEQ ID NO: 147629 - protein, 116 aa, Heterodera glycines
PIVLCFIGIDGAGKTTIVKALQGEDFGTVHSTVGFSRAELRVKKYRITVYDLGGSARIREIWPIYFAEVFGVVFVLDASAASRISENKKMVDSLVGLPDLLGKPILFLLNKKDLSG

SEQ ID NO: 147630 - protein, 117 aa, Heterodera glycines
MENGEKQEREEGARESRGRGGTTEESGKENREIGTAEGSGRKSRGGGTAPEESTRKTKGGERRGGRERTAEESGREAQAVQQGTVEIEMRPTPRAESSRGGSTHGRNAIDVMTTVGS

SEQ ID NO: 147631 - protein, 75 aa, Heterodera glycines
WGQCHSMPPPHLKPSLYKWRLSLAIDRRFVLHSLREQNVAAEEHKYPFIRIIEWINNKRKYLGKGRIFLKKSVKI

SEQ ID NO: 147632 - protein, 314 aa, Heterodera glycines
MDARKMGAKESGVKEAESREADAKEADVKEAESREADAKEADVREADAKEAKMDAREMGAKESGVKEADVREADAMEADYKEANSMEANIKEAAESREADAREADSKEAGAKEADAKEAGAREARVDVKEAGAREARVDGKEAQVGAKEVGAREAQVGAKEAQVGAKEAQVGAKEVGAREAQVGAKEVGAKEAQVGAKEVGAREAQVGAKEADAKEVGAREAQVGAKEVGAREAQVGAKEAQVGAKEAQVGAKEVGAREAQGVFPPLPSPPNGNRGGQPVIFLANRKKLTFIQPCQGDLCGSALQTPPPPLPSE

SEQ ID NO: 147633 - protein, 54 aa, Heterodera glycines
MKKKAGSYEVFTKAVNDPSVFDECEIEAKVRAKLVEEIQKKLTPKALKIRADIE

SEQ ID NO: 147634 - protein, 55 aa, Heterodera glycines
MAEFAHRAGAPLECLCMALKTMITHDRAVKYLKKEPVLDLLVTRATAKPSTEVQM

SEQ ID NO: 147635 - protein, 25 aa, Heterodera glycines
MCKQNEDLYFSCHKFNIFPPKKWVK

SEQ ID NO: 147636 - protein, 297 aa, Heterodera glycines
MGKIIVCTIFCGVLAATVIGLKPRGPPYHKGQERFGPPPNGQHSPGKFGPPPPNSSDLPSPESSSDASARKKRIPFGFRPHGLPPNGQHSPGKFGPPPPNSSDLPPPESSSDASARKKRSPFGFRPHGLPPNGQHSPGKFGPPPPNSSDLPSPESSSDASARKKRIPFGFRPHGLPPNGQHSPGKFGPPPPNSSDLPSPESSSDASARKKRIPFGFRPHGLPPNGQHSPGKFGPPPPNSSDLPPPESSSDASARKKRSPFGFRPHGLPPNGQHGLGKFGPAPCNSSDLPPLSSTDSE

SEQ ID NO: 147637 - protein, 26 aa, Heterodera glycines
MKASFGRWADRMKECFGDGTFSLAPP

SEQ ID NO: 147638 - protein, 191 aa, Heterodera glycines
MYELAMRLRREIQSRAMLQRRSAALSVAYQTMQIDMDEPNICYEPTEYEDDQLLLAADGIERFAGDGAGEDGADRMAVTDFEMVDMQAEEQQIAAAAAAAAAARPLRTRVVITKEDVAQQLLQAEARLALLDADAHMVPPLVDEDILRESLNHKRFDMAWLLIKLDLRITNNFDNFKSVKKTIFSSSGNSS

SEQ ID NO: 147639 - protein, 76 aa, Heterodera glycines
MKENNEWQNGHAHFDKPTESECHFAPGHRVQHTARDTNFCGTETGPVPNSQVFRKRFCYRNAGLSLEPMCRKPTAN

SEQ ID NO: 147640 - protein, 60 aa, Heterodera glycines
MITAGKRINLEDLCDPRFVDTELAKQRRESPFAYTYRIACRMLNTVPWCEMALTFRWLIK

SEQ ID NO: 147641 - protein, 33 aa, Heterodera glycines
MSKNGERKLILLEGMEDYEEKKKIEEKMKFIFI

SEQ ID NO: 147642 - protein, 162 aa, Heterodera glycines
MATLLHGMQRLNIPFHNPRIENEAMIIMEVVNHGKESEPLSDELAHAIKTLWADRNIREKVYPRGQEFHFLESVDRIAKPDYRPTEQDILLSRIKTTGIIEVKFKMKTVDFRVFDVGGQRSERKKWIHCFEDVNAIIFITAISEFDQVLFEDETTNRMVESM

SEQ ID NO: 147643 - protein, 100 aa, Heterodera glycines
MTDSKNDEFNAKGQMVCPPMLNFCLKMSCASAVDSGHVKGCANMDMCAGRGDPHFEVARRDPRCKFDCCTGNLCNGALGTHPSLGSGGAVLVPLVIAILA

SEQ ID NO: 147644 - protein, 75 aa, Heterodera glycines
LISSQKSCQLKTAKKAEFSKFFISTFFYSSKFSVIFSRLIEPVKSFRMISRLFDLVNNFKSYIDSKLAQTELARS

SEQ ID NO: 147645 - protein, 32 aa, Heterodera glycines
MTALNKMAAAYNTSVLPPPPLNTMCMNMRVCD

SEQ ID NO: 147646 - protein, 23 aa, Heterodera glycines
MVFLIEKIFVKICFIFQGIAILH

SEQ ID NO: 147647 - protein, 75 aa, Heterodera glycines
MAPSSLFPMVSLAFIVSMANALECWHGVHNVTAKTSNIPIKSEAEQGKCPDQLNNCAKIDCKYKGQRSFLYEKDH

SEQ ID NO: 147648 - protein, 93 aa, Heterodera glycines
MLPIHGLVSSLYSVFGVVFCSNASLNYFIGSCGAALFAAESSANLFLALDRLVETFSPKYNQILFSVLNFYGKKNMNSDYLKTDRDAWCLLDR

SEQ ID NO: 147649 - protein, 149 aa, Heterodera glycines
DYGGECDGGRGQFGYAGGCDGGRGQFDYGGGCDTERVQFDYGGGCDRGHGQFDYGGGCDGGRRQFDYGGGCDRERRQFDYDGACDRGHGQFDYGGGCDRGRGQFGYGGGCDGGHGQFDYGGGCDGERGQFDYGGDRKQLSYEHRELRKK

SEQ ID NO: 147650 - protein, 63 aa, Heterodera glycines
MPKLAIFCYSKSDCAVLAELFNSHMKVNTIGPLFSNSLRGKKEHLMTNLDKKMMEVDNAYQEM

SEQ ID NO: 147651 - protein, 195 aa, Heterodera glycines
MKNFLTFLAFFLIVPCFKADNEKNKAAPRVFAEHPGPKLVDETTRWSKCQADQNLTIYDFEVETLDGKFTNLEKYKGQIVLLINVATFCAFTQQYLDFNPMLERNRANGVPLTILAFPCNQFHLQEPAENHEILNGVMHVRPGDGWKPHSNLHIHGKLEVNGANAHPLFDFLRDSVLFFDAANKGRSPGVRGISK

SEQ ID NO: 147652 - protein, 47 aa, Heterodera glycines
KKFGTSYLGTRTHFAENKNTFLKNPWVLYPPTKFHLEIPRTPGDLPL

SEQ ID NO: 147653 - protein, 98 aa, Heterodera glycines
MWDSNLRGQKGKAGAQPPHHRTTQTCPQTVPVLGIKESMFYNPITVSDITWNFEKFLIDANGVPRFRFHPTNWSHGKEVQKFIDQLSAEQKKEPVKKA

SEQ ID NO: 147654 - protein, 18 aa, Heterodera glycines
MKMQVNASADELRIAQLT

SEQ ID NO: 147655 - protein, 47 aa, Heterodera glycines
METEEKKQMTWTDNVPDGVGPFRFIGTADSKNLYFFIKLAFLVQNYY

SEQ ID NO: 147656 - protein, 54 aa, Heterodera glycines
MSFCCCGNHQSHKQSVSILNHLKHLRKIFDCTVFFEFENFFGILQINITNIILQ

SEQ ID NO: 147657 - protein, 451 aa, Heterodera glycines
QNFHRFEVLVFQSPIVRIMLEILNITVFMVNINYFTITFFKCFLIWHSVTQELSSRKHMYFQISNFAGMISMFIGSYSSYFFAALPYRRLLPTLLVRAKVRRRHLRHSRHGAEHIAQFRPIATFGGGTIFICGDCWLLVFDFLAPSQLGLEIALINRRFNCIVDEHFKTRKWKLGCMRICHKIGENGTKQLQIVNSNAKPLPIPQNPLPNKVIGFRHIQIHYIDQNVIAFLRRFHRRIFDVCSMVLYIHTDNDRILDYFLLNIWPMFRHSMRLMNLNSISLRRLRQLAGPSLLSDCPSLRFVSFNEAILPAFPPDESVNASDGQALAKWLFTPRPDGQFKWFRGFVNSPDQWSPTMEQLKTAFSNASSPITYRISLAFSSTSIDSVVPFDDLINEVTGEKLTLEQNDTNDCWLSRCPIAWDYRKWKNLSDGIFDQMNPIDILISDGGFDDG

SEQ ID NO: 147658 - protein, 78 aa, Heterodera glycines
MVPSISHDPAKLPSSAVAQFYICFVLCVEMLFVSLLATFCFQPSRCAFFDKQRKRNAKDNANGECAEDGYEPLNDDHT

SEQ ID NO: 147659 - protein, 190 aa, Heterodera glycines
TIRFLDTVKFKIYYLALFEKINGLSKYVDHYETLSYQPVVDRQKRSLETDHEDTQTDVDLHFRSHNRTFHLKLRPLDFTNSLFTDDHIIDVDGVHHTHLIRPNRFLYEGQIVGDSTSFVHGTLLDGIFDGFIFTGDGRTFTVEKAARYFDIGQRPAHFHSFIYADEEINHKRFRRTKREADELGFKLLGL

SEQ ID NO: 147660 - protein, 34 aa, Heterodera glycines
MKLLFTPMFFSVILQTILLLLLVQHVNGGRDRVQ

SEQ ID NO: 147661 - protein, 83 aa, Heterodera glycines
SIYGNFGFRNFLILRIYEHFGPRNSDFYYFISLVFRFLKVLELRFQKFEPRNFLGLGSRFPKIYLNVGLHCLLYCLKNKSLIK

SEQ ID NO: 147662 - protein, 47 aa, Heterodera glycines
MWDTSIMAWATHNALRLTWFCQECNLRNPETFEFSSAGQSRSISKCE

SEQ ID NO: 147663 - protein, 468 aa, Heterodera glycines
MEPSSKAAFDAMVQCVIRQYGRFCPLPAQDGTANCVDGILSQRENVADNGVNGDNFLPPPPSLNIPQKESELTPKFREASEYFEKSVDIAQDPCNNFYEYACNAFDEITHFDRISIQNLITLATELRANNVHQQVKRGTDTRKSNGDRHEKVERGQTRESRTGNRHEKANPFGLCANDYDVVKVGIEPIQKAKLAFEKCTFLMHHQNQVIVQADLPREKFFLFQKKSRLDFPVFAGQTMDWPSREELSKALGALSGSVMVDTLISFFVDTNWADPNSEEMPYALFVDQPTLAFDPYYYSPEVFPIVSHQMERIVDEVLTEMANYLGVEYARKDLNAAVQEVIAFERLLANNFLVSDAIRENDLGSRFNLFTVSDAQLRFPFLNWSLFLRELAQNAPQIVQEKLRQPNFRFAIAEPTLLAKLGDDLGPGNKHNLTANQLLNYLYFRMILFYSPYIPQAFTGKNGKRNSN

SEQ ID NO: 147664 - protein, 50 aa, Heterodera glycines
MGSSQRGPSNWRTNESFGGNTSEQLGAERGVTLEERGQSQPKPKIRHPFS

SEQ ID NO: 147665 - protein, 303 aa, Heterodera glycines
AKSNTLFFHKRHLREGEILNLDFAIFYPGGSAQHKLAVFQWVLNGADRAIFFGSVGDDSEAEMLLEKTVETGVEAKFQRIEGVRTGKCVSLINATNRSLCACLGAASFSLCACLGAASFFSLDFLHLPENAKLIDTAKFFYSSAHFFTVCPEAIKHLATKANEAHFFTVCPEAIKHLATKANELERPFLFNLSADYIPGKFKKELNEIMPFVDILFGNEMEAFAYAKANELKTDHLHQIALFLTEIKRKKTGGKTGGRIVLITRGEKPLIVAQNGTIKEFPVISVDKVDNGAGDAFCGGSFCA

SEQ ID NO: 147666 - protein, 107 aa, Heterodera glycines
MQWAKSVHAYLFDQTIVLCRRDVLRRHQLVFKERMALNGVTVQELHDGKEPITGASLRNAFKVSSQARDYVFSCPDAATKGLWLEALRERPRPQPPTPAERRLAMLM

SEQ ID NO: 147667 - protein, 575 aa, Heterodera glycines
KTNSPPEGANCVPSLDPSLCNDDLKPLQSQHWNTYNIFAVWMTDVHSVAGYLTAGSLFALRVHSVAGYLTAGSLFALRLSGWQVLIALILGILIVHFCCNWVAKPSQVTGVPYPVINRAIFGIRGAVTGVPYPVINRAIFGIRGANVPALLRGSIAIAWYGVQTFLASRALIVVLLKFFPSLVFLHNVFSHGFVGLSPLGWCCFGFMSLAQAHNVFSHGFVGLSPLGWCCFGFMSLAQAVLFWMGMEAIRKFIDWAGPAVYVAMLLLAVYLVANAGVHNLSLNLSGDPLPFVDSLPSMFSADPLPFVDSLPSMFSAVALVVSYFSGPMLNFGDFSRYAKSWKAVKLGNFLGLPINLPINFLFFSLLTVLITSATFPVFGRLITDPIEVVEQIGNRILLGRTDLQIATVGINIVANFISPAFDFSNLAPNYISWRGGGMITAIASVLLTPWNWYNNPAAIHFALGIYNNPAAIHFALGILGALIGPLHGILVSGYFIVRKQKVKQKVWVPDLYSRDVDGRYWFSNGFNPNALGALLLQVILPKISLLLQVILPKISTAFGSLHLFSWFVGCFFGFG

SEQ ID NO: 147668 - protein, 42 aa, Heterodera glycines
REFPGAEMGRRRRESRRPRHVQQKQKVGRRCGGGGRRSRALP

SEQ ID NO: 147669 - protein, 280 aa, Heterodera glycines
MELSYLEAIQNGVCRADLIAEAQNIWSQMLSADELLVKVDPGAFLRLSSSLFHSALGLDYPLTNSLEANIVVCLKKCSNEMGSQNGCDSLYCASVGVLLRMSGQSVIKLNFRNSPRIVPNILGMAFLVIWRIVRAPKMRWLKHSALNLVVQLFDLLSAHLATFCQILPGDVCRAIDNLEILLKQLTKNSAIRCGECCEKVFRSLYDLPMPSPSFNLEEIWSIETKISGKKETQAQKIGWHLGWSLLLSFGTDESQLSWASLLSLSDECLANSLVGVSNAK

SEQ ID NO: 147670 - protein, 171 aa, Heterodera glycines
GEFSIYLELRSSANKKQVPEPCHNRKDDGCGGFGSWSPANFDDSSRRNFQFVLRRMPNIGREQRTEGTTAGGRKVDQLRAGTEPRDIRKHGIGLLPAERGGNAQEPRADQRNVQKPNSDRDVRKLVQTQQKVETVYRKTKRTLFKDEPLPPDVGTQIAAEQCQVILVKCRK

SEQ ID NO: 147671 - protein, 79 aa, Heterodera glycines
LANEIARRVRIFCWILTGKQNHQKRAIHVKATWAKRCNKFVFMSSEDDPTLPAVNLNISEGRWRIKKYFKKFVYAYQNY

SEQ ID NO: 147672 - protein, 157 aa, Heterodera glycines
SESGSCLESTGGGMTFILLMSPSAMSGLTPGEPSSTCGSATSNEPADSEKNHMEEDNRSRRGAEQLKKRREERKAQTEKARQAYLAKKTVQYQQIDDEEGEAEMEQQEMGQAEQVEETYDHAMDFDFQLDNYVQMSQNLTIDDQLPPAWDATAEVGV

SEQ ID NO: 147673 - protein, 33 aa, Heterodera glycines
MDIYGAGQPATHDFGEIVNYDDWQQWDNGWGGQ

SEQ ID NO: 147674 - protein, 114 aa, Heterodera glycines
MYSNISSSGWVSSDHPQQQIGNFYSYDADPTLSPNGGGYNAYFDYPNQQPAASSSNSNFVPLGSGRPFPHTISQHAQLSFSDNSNANFVPLGSGHFLPERVKRGGNTSADGTPQ

SEQ ID NO: 147675 - protein, 296 aa, Heterodera glycines
IFAFIRFSPTLRFIGGGEQRSWKDEDGVEVEIIKKIPDSKCKVKSEAGDESKCKVKSEAGDELEQYFKLTDKEGKLIGSNFGQKPYKFVLGHGQAIRYKFVLGHGQAIRPMDNAMRGMCVGEQRRVTIPAEALAENERPQGVGEEQAMHYFVELKSIFRAVPGEKWMEDDGLSIEVTHKIVTHKIEEDKCRRAEPGDFIKQHYTVHLQDGSYVDSSHDRGATFDFTLGMGQVIKGMDRAMTGMCEGERRKLIIPPTLAYGENGYGENGRPPAIPPNSQLHFQIELQKLVKKDEEKE

SEQ ID NO: 147676 - protein, 160 aa, Heterodera glycines
MGRKNVKTAKKEPTTSSADDNVLLKTEETELDRNDRAESSPSTATQPAMMPKEMYNFCKVWQKQIQNKQKQIMKYVLFLFQSILEIEEKGNVNLTRLKGNTKFSQLLRDNPMFDDSVDIRAKLREFLNSHTDELFEGQIQYLHKEIKNTQKSIEQKVKSH

SEQ ID NO: 147677 - protein, 393 aa, Heterodera glycines
EIHFDLLEMTIEKCFITLCILTLFQFCFYTTKIMELSATSRQLEAEIFSMRRKREALQGEIDNLVRAKVRREGKAEKVEEGRGQLMTIISKINLSLPPIFFITPTSRRVAQKADLTRLGQTLVPVANLFWIIVEDSEHPSPFIGQMMDSEHPSPFIGQMMGRLGIVGIHLAATTPSEWKNKFPKGVAQRNAALNWLRENKAAEKRGVVYFGDDDNENKAAEKRGVVYFGDDDNAYDWAYDWRLFAEMRSISQIGIWPVGIVDQMITEYPLIGSNSKVFGFNSKKVFGFNSKWKRQRPFPIDMASFAVNISRILTNAGGGFSYQTPRGYLESESHFLISLNVTIDEFEAKANNCTKVFVWHTRTEPTPLLAEETAKFASGGGLDETEKDAVGQM

SEQ ID NO: 147678 - protein, 153 aa, Heterodera glycines
MDTQGMFDSVSTFKNCATVFALSTMVSSVQELHPFFHSFASQIFNINKTIQEDHLQHLQLFTEYARLALDEYNNSKPFQSLLFLVRDWSFPYDAEYGPIGGQRILDKRLKAYFEVFSKAELPEPKTILNATAEANHLAAVVSAKAVYMREMEE

SEQ ID NO: 147679 - protein, 24 aa, Heterodera glycines
MREKKEHNIIQYKNRKKFSQIWKQ

SEQ ID NO: 147680 - protein, 54 aa, Heterodera glycines
PSPPFTPFFLSSFPVCPNFLIISSINHSSFATSFIPPRPPHLSARRTFAADVQS

SEQ ID NO: 147681 - protein, 45 aa, Heterodera glycines
MSFTLRLPFLFHPKVAIICCLLSLKCADQFPDFRRRKNYYCRFLA

SEQ ID NO: 147682 - protein, 309 aa, Heterodera glycines
MKGWVLLDICELVLKPRKQGWYQDFGRGYDRAWCESLGKKKEKDRQEEEAEEQGEEEEEEEEEHRPEEERQEQERQEQERPEEERQEQERPEEERPEQERQEQERPEKERPEQERQEQERPEEERQEQERPEEERPEEERQEQERPEEERPEQERPEEQERPEEERPEGERPEEEDRPEGELPEGERPEGERQEKQRQEDGEEEDGDDDDDDDDDDNEDGAVRCKVILRRGGEGDDDDSAGGNSGGNGAKDGGGGDGEKKGNDGKKQEERGGGGEKANEQYKNGSTETAGKASEPYEEAKVQTILSGKK

SEQ ID NO: 147683 - protein, 181 aa, Heterodera glycines
MPFFETPLNTNGNLLQMVGHSLFAQFVLVMILLSNEAVGLWFTRRASVPNSVKAIFRRRTASAIIFISALVSYSVWSCTAVLHGLCINLHFEPSNAPLFTLLLNIVLFCSSIIELNILNSRFRRGRLCNFEASPYTLNNLWLWIERERAHLRFVIRAFFGLNDDQQQRQNDHQMFGQNDDQ

SEQ ID NO: 147684 - protein, 120 aa, Heterodera glycines
RPIFLLPIICASGVVCVFHTLSVANWLSDWWISADQSLDLDWLIIFTSAITFQAISMLVFSLKHLMIFKLLRPFTFKFAAIAFFDSQIQNIPLIVALIIASTAAESELFLKGGSKSFLFP

SEQ ID NO: 147685 - protein, 282 aa, Heterodera glycines
MPAARVADRSPMAHLPLRESARGAQQQQQQGKEQQQQQQQQNQQQQNHHKECDGEEAEQEQNQLRKNNNNGKLIVVADKSAEQCQREREMCAKLMQRRDQLEEQLIARVDELKDICIAEGDLVGQLPTEIYKCLLPGEIEPTVKRRVGTTFKFPQEVLRIRRRNSKDSASGGGEPNEERQMTQLEAEIELNRRIVAAAERLAKDKSVNKSVRKKRRKDLHLAAQRLRGLEKVPSRRASSGGGASAGGSVQSTNSATTAADDGAATTADSRTAEMPRQDSSSH

SEQ ID NO: 147686 - protein, 87 aa, Heterodera glycines
MGVWVGTGSFVSPARMEEISNEITELMDQRTVKVKKFLKEHEVKEIMRINPTCRQFRCRREGQRRTKRNIGVQRRRHGEGTVRGGGK

SEQ ID NO: 147687 - protein, 173 aa, Heterodera glycines
MRRKNMLIHIIYNPNDDLLYRHLFELVDIDKALCALISSDRMINNLKEYVMWTQKELLKDKMFDDVTTSGLMRSMKYLIARSFESRKQCYENENKILLNLRVYFRLFGAIERQISSRKTEDTVKEIGNNTTVEMEWAILYNFVHDFFEKMKQFVKIVAEVGIEQAKQRQCKNL

SEQ ID NO: 147688 - protein, 205 aa, Heterodera glycines
MCCKKLKKPNSDSLIASAILRDGLLDRTYQIIHDKQCKGVPLEQLAAEQIDRSQRRDLVQCSINPKSLWREVFLFIKTRIFFVKGSYRAREHDVAEDIEIEDISGISFNYPNWQSVRSSYYRRRRNHLGDCSDPFNVPERLQLNKRGSIKLLLKKKISEEDMWLRFRDKELGVMLFISHSQIKAASHCKVLGFVMLVSSYFWRKF

SEQ ID NO: 147689 - protein, 60 aa, Heterodera glycines
MKKTENFQLPYDFASIMHYTTQMDGENRIIPFNRFYERTAGQPRLSFKDTLLLNKIYCPG

SEQ ID NO: 147690 - protein, 69 aa, Heterodera glycines
MGTKSTFLVSFDSPICYLLTCKIAKNLVEEHVQIPSGDPLKAGDTLFSKMDAQEMYDQRKEGNAWIVVN

SEQ ID NO: 147691 - protein, 186 aa, Heterodera glycines
MPPPANTSASIGWRLTFRLALPNFRSMSPHHFTKSVVAKWKRKLTFSICQQIIRKREMSSMHAKRYKVCRKFSFKMEDLLQAHLFVPIFFIDFSSDRASTIRGAGKELTINLAKKKNSLSSVLNSIMEESWNGTLAKSLHFIPPENGYIEIFFQVSELHYSKLITREEDLEPYRNNPNIVKTLLKT

SEQ ID NO: 147692 - protein, 81 aa, Heterodera glycines
MPMPSFARLRLFPLFFLLLLSTNSECDWWDNFVNGAHEKIVGAADWLRDKAGPTVREKFNGAKQTLQDPETHEKVQEWVEE

SEQ ID NO: 147693 - protein, 118 aa, Heterodera glycines
LLNNYIGQPRPNGTWSQPLFPPEQWNVYTRTLNGEERTNNHAEAEHHRLQGAFNCRHPSIWHFIDVLRREQKGTDGKYASFLAGLEPPRKAKKYQAADERLIILEFLRGISRNYHMNP

SEQ ID NO: 147694 - protein, 35 aa, Heterodera glycines
MPRRVTTDAHEWSNDIPTVPIYYLAKPQPRERAWK

SEQ ID NO: 147695 - protein, 347 aa, Heterodera glycines
AMDGRAYTDEESWSNVLVECGVNNDQLRERYHQIYHLVTIYHLVTAADGAQSFYQLANNQARTEAMEEAIELDKNTREAWIGHQCLSIIDNAWIGHQCLSIIDNSNCCSFEEKISKLIADVCERLDIPILDRLASNSKNRKWLVSKIDNRKWLVSKIDAFLQMKKEEFLIEDDYLSTEGSTLQVRLRSRSQNGKYTYTLTTRTFEDADGKKVETRKQLDVETRKQLDRREYQSYLKLLDRSRQSIHKKRVCFVFGNVYFNLDIYIAPYFNLDIYIAPLPPALMYNENQLMILETYTTRPIGDPEPRLPDFLEIEREITMESAYSIQSSSEYSSKSNKLIGTVKVRDQ

SEQ ID NO: 147696 - protein, 156 aa, Heterodera glycines
MEFHCSTVLLPDTADELANDVLNALCFGRVASLSHMASMLDDRFKPIQIVRPFRDISSRELEAMHNIERDECSEPVLASCRKESVDESNCKNKCDGSLQALTEDFISELRTDEYSDDDWKTTHTWNEKICQICSQLIAGSGPKFKESIQCIISALL

SEQ ID NO: 147697 - protein, 221 aa, Heterodera glycines
MTIDGDKGSTSEWPTDFWSKILADDQRHMNLAFERTQSMGSASAGLIGMDQQHVDLGFGRSNQFGTDQRHMNLAFERTKSMGSASAGLIGMDQQHVDLGFGRSNQFGTDQRHMNLAFERIKSMGSASAGLIGMDQQHVDLGFGRSNQFDTDKQLMDLGFGRTQTMGSASAGQIGMDKQHVNLGFGRTQSMGSASAGLIGMDQQHVDLGFGMSNQLDTDKQH

SEQ ID NO: 147698 - protein, 26 aa, Heterodera glycines
NVFAVGGCSGPGQHLANAESVQFDGH

SEQ ID NO: 147699 - protein, 1003 aa, Heterodera glycines
MVAQIKNSRANQRPKPRQATDQTIQPFYVAKSGSLNLLGTPAMEAFGFLEEIRRMINPAQINQISSNDADKIQQFVEILPQKYEQIFSDGLGYCSKMKANLVLKEGANPTFKRARPVPYSTLPIINAELDRLEKMNVITPVEHTDWPAPILVVKKANGTARLCADFSTGLNDSLQLNQHPLPLPADIFATLNGGKFFTKLDLSDAYLQIELDGTSKKLCTIATHRGHYQYERLPFGVKSAPGIFQSVMDNMLSDFPFALAYLDDVIIVSATFDQHCQHLNQIFTRISEWGFKVRMDKCSFFKNEIKYLGVIIDQNGRRPDPSKITAIAEMRIPSNVSELRSYLGMVNYYQEFVRNFRFIRQPLDELLKKDAKWDWSPKCQNAFTKIISMLQSELALTHFDPNLPIIVAADASQHGIGGVISHKFANGSIKAVSHFSRSLTPAEQNYGQIEKEALALVEAVKRFHKMIFGRKFTLLTDHQPLKKIFGNKDGVPKHSHNRLVRWPLILTAYDFEIQYVKTDKFGQADALSRLISVQKSKSDDDEVIIASFEVESALDRNLINNVNHLPITFKNLAQETANDQALQQIRQFVKNIWPEPKNFQPIEGLDEAKFIQFYRRRDEISIVKDCLMFGDRTVIPKSLQKQILKMLHQGHPGVKRMKSLARMYVYWPLMDAEIEAFVQKCTSCAAVAKNPIKTTLQSWPKSDGPWKRIHIDYAGPFHGKMYLIVVDSFSKYPEIFEMNSTNASATISKMRSLIAHYGIPETIVSDNGTQFQSHQFEGFVKSNGIDHIFTAPYMPQSNGQAERMVDTFKRAFAKIKGEGVDGNVLDTFLLTYRTTPSDTLDGKCPAELFLGRKPRIGLELLRPPLSIPIVKDDKMEDQFNRKHGAKFRSFEIGQLVFTRRHNSAEWRHGKIIDKKGVIYTVELPNNSRGRFHANQIRARQIPDEDIEDPLDVINGTFGLPIPLRDQNLAEVPPSNQSPPVRRYPIRNRRPVDRLQIDPSRSSY

SEQ ID NO: 147700 - protein, 304 aa, Heterodera glycines
MFRGSTLFRRKAVQIHRTRDRHLPIQRIQTIQPFYVAKSGSLNLLGTPAMEAFGYLEEIRRMINPAKINQISSNDAAKIQQFVEILPQKYEQIFSGGLGFCSKMKANLMLKEGANPTFKRARPVPYSTLPIINAELDRLEKLKVITPVEHTDWSAPILVVKKANGTARLCADFSTGLNDSLQLNQHPLPLPADIFATLNGGKFFTKLDLSDAYLQIELDVESKKLCTIATHRGHFQYERLPFGVKSAPGIFQSVMDNMLSDFPFALAYLDDVIIVSATFDQHCQHLNQIFTRISEWGFKVRMDK

SEQ ID NO: 147701 - protein, 50 aa, Heterodera glycines
MNRNVKKAQKIAKRTGEKGINFWFSNFKNQGITVSPAVPICAAGKIFWKL

SEQ ID NO: 147702 - protein, 19 aa, Heterodera glycines
MENGNGIEKRGLVVEDGDG

SEQ ID NO: 147703 - protein, 263 aa, Heterodera glycines
PVLSSPSSAAISKLTSSAFSSVLDNGVIGDPQVDCLEDRVRLTFRTQRPFTGRIFVKGMVENDKCVNNYQQKGQRIFVKGMVENDKCVNNYQQKGQTKVDFELTNGQCNMRRSRKLGPEQRGVEQSVTIIISFHDIFITKVDRAYRCTCFYMEADKVVTNRFDVSMEADKVVTNRFDVSMMPTTELVDTMMPTTELVDTARMPMCTYTVRIPTLFGVAVKWGRSSETEFPPIFGFVLMPFMISFGFILHAFLLSFVLNCAFDP

SEQ ID NO: 147704 - protein, 311 aa, Heterodera glycines
MFIFCFTLCCLVSLAFGTLLNVGIENVPDQIVINANQLTPLTYHLLKILENLMGIVPKRHSSINFRIIPAVDIPLVEMVYSGRLNVQKILGEIAENFEKNADLAQIFEHFLMFADGYYQPVQTGDVNHHKQEENASRPRELEFHYIFFISQVTPVPHSKLRAVFSQFCIGQSDGFKPVLGEWTTNWATNNFNQNLDQKIHIKFSTEIVNTDGGIFLTKIDKLWPQRTFKKKRIFCGALNVSAAKIQEILDQLAASTEYAYNSIKSPDGNNAFTKMLMHKLASVAGDHQLNISQIQWFSGKKLVPNFARCKI

SEQ ID NO: 147705 - protein, 82 aa, Heterodera glycines
MNRRWICNDVWMDIFPSFDRPQLGLKMALLSPRFNALVDKHFDGKSELTIWRTIEISKDKGPEPKLSVQMDDKSLPFPLPDD

SEQ ID NO: 147706 - protein, 23 aa, Heterodera glycines
MTSDETFGHQLVKLFFQKINKFG

SEQ ID NO: 147707 - protein, 133 aa, Heterodera glycines
MEEQPIWDVFVREIKDGQPKRLRCDNYYEQTDLDWINNFKEHFLRANAISSISYEIHFYVQVSSMLMMPFECVVNESTKEKLTLTKANENKLDNRWIMKRCKIGNKTAAVQQHKEGDCNNVFFWLFADINYIW

SEQ ID NO: 147708 - protein, 46 aa, Heterodera glycines
ARSLRNDCLTAAKFLLNNGRKKEGKNGTSAEHCADRRVLMIKMTSH

SEQ ID NO: 147709 - protein, 33 aa, Heterodera glycines
AASRPRTGALRPFFKFCWAYTGASRPFLNLLGY

SEQ ID NO: 147710 - protein, 104 aa, Heterodera glycines
MPPSENFSNISLDINDLEARPLPEPQQPEQQQAELLIQIVDVEEALLFNVHEGEERREEEEEDEEDEEEEEEEDFVQFEELMRLHAEYVAQIFNEIDDDEINNE

SEQ ID NO: 147711 - protein, 1160 aa, Heterodera glycines
MANRNPFSIESVHEMRNRPRNTRGEVAQVRFVPLEQVQRPDRVLEMLVEQLFARVLGDRPPPSLIGLQLHPPTFENPFTIALRPPEQNNPAAIADYIQRLNDQSAAGIDLTAGTTLTKVLAVWPMHDDRTENGREGACSWDHEHSVVHTVNSLVRIRNPNDRLCLARAVLIGLKDHRSRQYQNTRAGQQMFKNYVGQQRFHGPEARHLLRRAGIKTNKNMYTLDDVRQLQQWVDERYEEAQIRLTVFEKERQYRIVYKGASGRAARFNLCLLLENAHFHYVGRIEQLFRCTSYCVDCERRVTRWYHPQECKVVCRLCLRYGADYPCQQQQFANGRNSKHFCTQCQFVFPNLDCYNYHLSNRAPANLDGRSGRAFRSICEWRRVCRTCGGIVYINFQHVCPPSVRQQQQQQQQQQFASLCHQCGGPHAEDGPCFIQPMDGRRVFGQTRRQQKQQQQQQQSSVENCLNGNDDAADKEDDTDDDNDAEGESQHGAGGGGHRRQASQKTIRYCFFDAETSQDRPLQLRTQIAQKHVPLLIIAEVICERCIADGITIYGGIGKKANGCVCGMPSGPRGRLWCSPPFRNAPNDDTEMPTNITYNPRRLFFHCFEDATKNPVDQFLDFLISTGPRKSHTICLSHNGGKYDMHLVLEALHHRNLPPKRICTTGLKIYSMSLKGNLQRQITFKDTLNFFFCELDALPRTFNLPNEIATAKPWYAYEGAVAKFQLREQLIIYCANDVAILRESVLKFRQLIMENTMGLDLFVIASTGAALALATFRRCFLSRNKLINTPEGGYLRGRRASAESARYIRMYELMNPGEHVQSAQWTVGEAHVEDSGYRLDGLHVRLPPLRNIAIEYMGCFYHGCPKCFPNDRQQTLAGGRSAEELYERTQRRLWELEHTHGFELHVVWGCELKKSLRANPVLRQMYNDAFVPRPLDPREDALRGGRTEPFTLQHICTNDEEIVLIDIVSLYPYVMKAFDFPVGNPRVLTREVWHYDEWDAEMFRGYMNTFVGMKVQASGWPTGCESEERRDDYIDEFERAEGIRLDRGKIANNPGLRMVAKLLANSLWGKFAQRVGRTEVRYASSPSEFHCLLDDPSIEVLDFHHVSPHLDRVVVKTKADFSKAPATNCLPIAIYVTSYARLHLYSYIEKVVQLGHKLLYC

SEQ ID NO: 147712 - protein, 67 aa, Heterodera glycines
YIEQVLSGASPRFDMVEFSQDGSWSFCQSPDTMLDTDSEDEEADTTASPSTDEGLQKQMPIEKIIIK

SEQ ID NO: 147713 - protein, 101 aa, Heterodera glycines
MTRRKTVAVTEQNCSYVAPADVQNVPPGDPQYGDGFMYYKTNDNDTLYSCEGKNKTRVKMGREYFSQFRGGTAFHSILNVGLVKLAIQTETNGTEDDWEGF

SEQ ID NO: 147714 - protein, 36 aa, Heterodera glycines
MTHNFFQFHFYPKFLSDSWVTYREEWIDAKIKKDQE

SEQ ID NO: 147715 - protein, 403 aa, Heterodera glycines
MLSRLIANYPRPPLDILIAKICTETTFHGTILQSRIDQLPVTATEIAEMTQKDEILQKVAKFSKEWSQKCNDPDLAPFFPKRNEILQIENCLLYQNRVIIPTVLRDRTLKALHMAHPGIVRMKALARQHVYWPGMDSAIEKLVKSCEECQIAHKAAPKTLLSPWNATKRPFQRVHIDFAGPCQGPCLSTLLDSFSKWPEVYQMNTMTSKATISVLRLIIHRLGIPEEIVSDNGRQFRSSEFSEFCKEFGIRHTFTPPFHPQSNGQVERFVDTFKRAMQKCSKKKNWAEKMLLSYRTTPNSAINGHSPDQLFFGRKLRTQLFLTHPTGKVNETIDKTIFHQKQEKYRTKIAQNFNEKHGVKSNEFLPTDPVLVLNYQHGKAYWLQGTVIERLNNSLYVVNNARI

SEQ ID NO: 147716 - protein, 309 aa, Heterodera glycines
MDKIRLRQLLLYEFRKNSTPTQALRNICKSEGNDALSLSTVKRWFTKFREGNEQLEDEPRSGRPPSLDSDDLEQHVQQHPCSSSRQLAAEFGVHQTTVLNYLHQLGFINKKGAEVPHTLTQQQKHQRVVTCTELLARLSAGMQLCQLITCDEVGLSQQQNGTKTMAEAKRIERADPQASSTCTEGIAVRLVVFIRRVHDQIRRPPFSAKFRGGVLLHDNARPHVALSTQQKIEQLRWAVLPHPPYSPDISPCDYYLFRSMEHFLRGKEFADQNEVENALDDFLDRKMISFIKRGLKCCPNDGGGSLIKM

SEQ ID NO: 147717 - protein, 64 aa, Heterodera glycines
GELIITVNIVHEKHYERLKKVIAHGGEFIERIVYHTNKDLTKMNNNNNNVFEQLFVAIMNVIIY

SEQ ID NO: 147718 - protein, 237 aa, Heterodera glycines
MAMGGNMANYGMMPTQYPNNGPTFGHTMANYGMVLGATLGNIAENVFERGKELVAKMNNNGNQHPFSGMPGIMVENNTNNNSNYGNMPSLVVGVDSTVEYSVNVRSRMVEDIGIEVQGVAQWPKKLLAKLFEEELFEGLLYKKGTGANRGIGPSMARIPHWEAMLGLSPQTKVNLIGWLAFKKKIITEIKLATKCQANSWKIYDVLNSRNVAKIFTNFWGSYFIILGMKSHKNPKKA

SEQ ID NO: 147719 - protein, 19 aa, Heterodera glycines
MCGRNSLYLSGMGRVKNCL

SEQ ID NO: 147720 - protein, 31 aa, Heterodera glycines
MRKAKCETPKNANNAKGEMRKAKPRPIPDRY

SEQ ID NO: 147721 - protein, 190 aa, Heterodera glycines
MPSSTSGSVLSSGATAQPIISDDESTLKIVNKTLFQGKQPNSTVRFEDVEKVFGELIRLEEGVSRTIRQVNRKANNVQNHLGTLANEVNVGFQTFTAEISKVAGKVKSLENLNSANKNIQQATAVTQPLVPHHAHPPVQQLGHQTGQRPNQNQQSSSSDDEDDQQRNALSFQSVNMIIDAYPMALERLQG

SEQ ID NO: 147722 - protein, 62 aa, Heterodera glycines
MKGKALALNALHGARIRQSMTKEQLAERRKLIEQCAKKRKEDAEDWIIYANQVILRSDIDTF

SEQ ID NO: 147723 - protein, 92 aa, Heterodera glycines
MSLRNVRDNEEKESAFRGICLMVNCNPQGVAAAFIFLCDAIASWQTPSEELRFMFGRIIYAFKSQVGEENWNNFVAQIPEPLKQRLGTQYQL

SEQ ID NO: 147724 - protein, 222 aa, Heterodera glycines
MDKILLLFPILVIVIGLIAADKCNNFPRLNFRSLQQQRKVRESRRCAMPTSRVMFGLETGPYDNATYFVHFLIKNQNGLMSRCSGVLFNPSLVLTCAHCWDEAAKDGDGSIAYAGIEDGQSVEESVSKKVLGFVLHPAFRLLNGAAFDLAVVAVLPFELVPGKLGTIGFPRFEPVYTSSQWVDCQIAGSGQSFTKSGDRCENTKRRLYMTGILTSLSCCNDA

SEQ ID NO: 147725 - protein, 64 aa, Heterodera glycines
MKRLECENQRILMHFLTIFSAKLLSPVQNIIYAFKSQVGEENWNNFVAQIPEPLKQRLGTQYQL

SEQ ID NO: 147726 - protein, 169 aa, Heterodera glycines
MSRCSGVLFNPSLVLTCAHCWDEAAKDGDGSIAYAGIEDGQSVEEGVSKKGKPLGHKFPMGTICFRGHSDAACAGDSGSGVVCKYEPTGDRVLVGVLRAGSHCCAKNGLRLNEPGESNIVPLDVARRSWISRVALHHFRCGSLTPPCAPAMAFAARASIQYDDPEHAYL

SEQ ID NO: 147727 - protein, 70 aa, Heterodera glycines
MTTAWLRCEMTLTHRSMGDDPRLNFRSLQQQRKVRESRRCAMPTSRVMFVRKLALMTTRRTLFIFSSKTK

SEQ ID NO: 147728 - protein, 81 aa, Heterodera glycines
METGRLFFNLLRRGYITGDRQINGDWHIKRVYTTSILTSACFSRFPVALPGPGPELFKIREPGPGPWMTGNSRPGPGPAAL

SEQ ID NO: 147729 - protein, 30 aa, Heterodera glycines
MTKIYHFLASVFDKGIVQRKSTLFATPTSE

SEQ ID NO: 147730 - protein, 170 aa, Heterodera glycines
TLGHRSPIILLMLVLSVPLLFIYSGLGSSRVEHVIGMSLLGVTISGPYNLIVGTIAIDLGSQQALANNAEALSTVTGLIDGIGSAGSALGQLFVPLIQNELGWIWVFHFFILMNFLSSMCLIRRFFHDARLNFLSSMCLIRRFFHDARLISLSFAPRQNSSARERAADFE

SEQ ID NO: 147731 - protein, 141 aa, Heterodera glycines
MGEKNAIISPGLLLRNFCQMALASLGFPFRLLPTLRAKSSRKNLHKLRHCPWSANEKNGTKKRSERRQIEATESVDERKRRFNWRIHLRKSPIEMPKVTLGLNSVIRNQRLVLLPTTILPRSKRKGNEPSVVEETTDKAHG

SEQ ID NO: 147732 - protein, 39 aa, Heterodera glycines
MNATVKSNREKGIKRTARIHTKELACEALDKHILFAFFK

SEQ ID NO: 147733 - protein, 371 aa, Heterodera glycines
APRQDPARRDGRRRNGKPSEAKATGQKRRKKKPGRKTANSAPRQGKQEGEPRRPPGPPRPTTQQPPPGPPQGPGRPKRPPNAQPRDAAEARRHRHRRPARASRRRRPHETRTRGPHGPHPRPGPKGRDRRGQRTRNYAGGLHVEVGTNSATKGPIAAPLEVNEGAEFRDFLGENWQYEDGTTDRLAKSAQNRIQSTACKVQLRNFLHDIAFKRHWPVKEIAKNCDDLFEVPSAANALKFRPFSPGTSHVKILFLLQLNGRDSRQLRRLFRSLFLPRHFYFVHVDSRREFMLKEMLKVEESLRAEGFANFRVAKRRMATIWGGSNLLDLFLWTVAETLGETNSNWAQWDYIVNLSETDMPILSVEELEQNLA

SEQ ID NO: 147734 - protein, 187 aa, Heterodera glycines
RNLPVNLRLDGGSDWVVVHRDLALFAISDSLLPSQLRLLFSSVLLPLETFFHTLALNSDFCRRIVRRNLLALNSDFCRRIVRRNLRFTNWRRRQGCRCAPLKSVVDWCGCSPLAVSANELGKLSLNHSQSKFHFFGRKFDSAVDIASQSKFHFFGRKFDSAVDIAPIAFVERQSLRFRIALLSFPVF

SEQ ID NO: 147735 - protein, 164 aa, Heterodera glycines
MFLSGKDDESSISAIDRKLWQGKTTIKISDLEKAQNDMGKLEDGVNRAFRCLNRSLNQKVNWVKDVVANTNANFETLKVQFETLTERVDMLEQDSDGTDSGGTVSITNLNRASRAPFVTPMGNAQPNQVVPNQVPIHQLSSEDEDDGPTLFDLNMLSSGPTVGS

SEQ ID NO: 147736 - protein, 102 aa, Heterodera glycines
MVRGFRPFSGSMRRDNNKEEEEDEAALAIGEEAARSNLAKETGQATLDAIIVTVLDILRTIAINAVPISEEIPTNRSVKEDGQISNLANLRDNGKIGRILLT

SEQ ID NO: 147737 - protein, 204 aa, Heterodera glycines
MLQMTPSECKQMAENGKCSLGLLINDSGLSHTDKKLDLSPRMWLIGSFSWSTVSTENCYLFKTKIMSQHGSTIMLSPLGSVNNCQFKAGQCEMEDKTLLMWDTHTTRACEFSKIGTWKGLQLDNIWISDEVSFRLTFLNNTKKVNSCGLNLIKSEEGFAVQDLPSDDSNESSKRSRKTRSLESWVTESEMNSKLGYLDEQVREM

SEQ ID NO: 147738 - protein, 567 aa, Heterodera glycines
MDCQVENELAKESSSESPACGPETKTNIPKTSNWERPSVRSKVASLMFITFMLVGMILPFTTANMPHLPMHPLVCQTQNGGKIWQLPAVTGCSKLSIDHSKAPVVRTFDVFSPNLFEHSADAWACRKVRKSVRKYTSITNVTIQETLEPLMLQMTPSECKQMAENGKCSLGLLINDSGLSHTDKKLDLSPRMWLIGSFSWSTVSTENCYLFKTKIMSQHGSTIMLSPLGSVNNCQFKAGQCEMEDKTLLMWDTHTTRACEFSKIGTWKGLQLDNIWISDEVSFRLTFLNNTKKVNSCGLNLIKSEEGFAVQDLPSDDSNESSKRSRKTRSLESWVTESEMNSKLGYLDEQVREMLTISFSQTIKSICDYMLETRRWAATALLSDPTTFARKLFQSGKLVAKVAGPELIKVWPCIELQGHDYEFAKIGNSADSEFECFDKIPIKFRVKDNKRMAFIDPRTMILSSDARLAPCSEYRKQLIFVRGSLYEVDQIDAQVKQVNANRIDGFSLNLSLAPTYARHSFLHIALVNVSDFIGQFYDANLARENELTFQIKSEDAIVTKKSRTMGA

SEQ ID NO: 147739 - protein, 67 aa, Heterodera glycines
MDTCVKENDFLRFDQSKRMENQSKFAYFESAQATILRPPKNYLKSAEIWLSEKQCAGFRYEIAAMLC

SEQ ID NO: 147740 - protein, 71 aa, Heterodera glycines
MHFGTVLSLPLPLFLVVCFSTAAHIAHFNANAEQQNAIEWNAKRDRICEKQKMTDKGTIAWKIAEGRAAFV

SEQ ID NO: 147741 - protein, 136 aa, Heterodera glycines
MESQQQLMFNTSMGSSTNNNNNNIFGHSMQRLTSPDESPLDHVNVHQQYAVSTYANNEQQQQQLLLSPSPPKRSASFTDMCASYQQMNIQDFIKSIYINNWLILCIELDPDGPQPKISLANQQQSAAHFAAFKGIN

SEQ ID NO: 147742 - protein, 32 aa, Heterodera glycines
APEVKRESKNFPNYKKVKNSLMCNHAKMATRK

SEQ ID NO: 147743 - protein, 155 aa, Heterodera glycines
MFIAVFLPQMPHSALPPLPDNRLSRSFNTASVLLTCLNAHCQRVVQPFNNFLCDACFEAQKRELTRTLIGGGGHHNAALAAASSAANISATAISNGGGGEGGNNKGTAIIIIRANDDDDDQNRSGGRKNNATKHDSNISTTTNSHRLHCDISTTC

SEQ ID NO: 147744 - protein, 127 aa, Heterodera glycines
MVEHEFVEPDSAVDNRRKRALDAARKIVCVEKGGVAWKMVEEGKEESEEKEEEKQQQEKDENGWPTENRTWEQQQAVLGKVSIWRDYFRNGTNSTSAFVYAAGQQINQQDGSLRSIMAKFLMRDNQS

SEQ ID NO: 147745 - protein, 45 aa, Heterodera glycines
VYESLECVHVFCARAHFVSAHHCVLVDTILRNAKAEELATIPFGG

SEQ ID NO: 147746 - protein, 134 aa, Heterodera glycines
MSRNSLNNFASLWPPTVAGCPMAIITPKFPEQNASYNVNTFTFQTIVNELKTENPNNRQMVFEEIEYLHKFEHYAVILCLSTTIEFYRTNCGYQKSKIRQKLFNWAKSEENSEKLDNYQLITQSERKTKCKMTK

SEQ ID NO: 147747 - protein, 222 aa, Heterodera glycines
MYEADLNIKRFKLDKIRTKNWECKKVKKTHAAICNEWKKRWTSLTVYLAYYREFGRHKMGTKIEKALRRERGAMAQLANKMAKQIEETGMLDHLAVKPHFKASADGSMLTFTESISQCFSAYNALFLAEKFKFCQFYSCLFGIGGPKKAQIQPISEFINEKECVFVNGWVRAYQRFKRIGDNEPKMGARNLLSSIVLQIENDEPIPEEKLSLIPFHFPASAQ

SEQ ID NO: 147748 - protein, 56 aa, Heterodera glycines
MVIRIAAILPIIFVYGMERYPDTTNKRDNLAMKKKQQGNLSYLYSIGEDEKVLIDY

SEQ ID NO: 147749 - protein, 73 aa, Heterodera glycines
MPIRCLTRQRHKHCLCNVLCAPNFHLTFAHLACVEHIEHILDCYRQLLEDNSLNNSAFLQQQKLITLPSSPFS

SEQ ID NO: 147750 - protein, 245 aa, Heterodera glycines
MPTDKFDAINFSEWKILYESIRQFFDYCDFLKSNADAVLFYEDDYRREEFEHFAFKPQFFYPNGDTMPISDAMRKIVEGFNIILKKGLAKINFFSKKELPQINFINRQICTKVLAWTYSIKKAENIQLAKSTLHIVKLHILISGFHNFTFDLPYPPIDENEMGEFENDLISNGFIGNRQNNTEDNIEENDEDLYWIWAYKMMLDTIEEGNDNKEPMALIDNGIRYSLVMDVLKKEWFDELNDYDN

SEQ ID NO: 147751 - protein, 79 aa, Heterodera glycines
NDLISNGFIGNRQNNTEDNIEENDEDLYWIWAYKMMLDTIEEGNDNKEPMALIDNEIRYSLVMDVLKKEWFDELNDYDN

SEQ ID NO: 147752 - protein, 139 aa, Heterodera glycines
LQLTGDWVQVQIVHLPNEAEGLGFGIVGGHSTGVVVKSIIRGSVADKDMRLRPGDRILQIGHISTQGLNSQQVAALLRQQQVAALLRQQEAVVQLVVVRPIQLQDSEQDTPLCWTMATRAALSADTLDEQVQTRLEAFS

SEQ ID NO: 147753 - protein, 757 aa, Heterodera glycines
MRLIDWLNNKFVTNPWHNRTKHKNGNSISNNGYHHHQYNGTALHSNGGNNKCFAGVMPFSTIRPDGTLCHPFGISSSIPWMPHTRSQMPPLFGTVSPSNNTSRRPWEAAKRLLRAVPLRLSRKASETASHSSSFSEDPFGGGGDRGGTPIWLLRDPAPVAPRTGQRVGVDFAATQRRRTESPRALRRSVRDLRLSRRRRRSGFAQFSAFGWQQQQDGGERHNAERTTVGMDDVLRHKTDRLNQPAKWREDNTAPRKLAIIQMANERQIGTNPTERQDECQKTGLLQHDGTEEKAENGNQSRIKSAFDAVPPKNAVMLNFATELQQRMAEHMKAQYAKKGAVLHTPLSSAHSSGRLSVRWANSVDTPNNLNSSSKNIGQHQQQQSKLALPTDTHSVTTSRKGCQKSASVRSAVEPRVDEERCRRLCNTTPSSRRSSARALLCTGSALIGWRRMTIPDRLELPPPAPTASKCLRLEPPQMERFGSCERWAPPPLVERKRFNLLNKRHGTAGGGCCDSCGSSTWCCPSRRFCRGCASDSRRWWPLINQWQQQLHSVVARPFISSNSAVRKPAQQQKQQLIVGLSSEEKAAADGYAGGVIAMPAEGPKAVPDRVLVIQHDDYAVDDGQQGHHDRDEAVHHDSYESDESVTSADGTDEKATETEQHDADHHYHQVQAEQPLLMPSSEFHQRNLLLLSVIRLLLRRKLTKTAETSTNDRSEYNRLAAERLARAVVNTAQDERWIERRRKRKERERQRIVEARK

SEQ ID NO: 147754 - protein, 158 aa, Heterodera glycines
LHAVLRQSQVHGRLSVLAERLLGPAFGGPQIPHQCSLRCGFGQISPNCRRRSSPWPIPRAQLRPELVVKPGPGFAQQHDSPSAHPLAAPGMAVVRDVCNNPLTKEPKLDSAVRIVSEWTELDNEIKRLLTSSSNNRSAVGKPQDDETAFDDDEKHEEL

SEQ ID NO: 147755 - protein, 137 aa, Heterodera glycines
TGQSYDRINIFSLASGHLYERFLRIMMLSVLKNTKHPVKFWLLNNYLSPQFRESLPVMASHYGFDYQLIEYKWPSWLHQQTEKQRVMWGYKILFLDVLFPLDVKKIIFVDADQIVRTDLMQLMEYDLEGAPYVSDCG

SEQ ID NO: 147756 - protein, 317 aa, Heterodera glycines
MDVVFGGSSTTNGSGAGGGATKIGRTGAGAADCSSGDESNESERSDAPTNTGAGTGAGAALTERRTKRKQQKKGEENEHEEGKNTLKAMFPTILRRKSDACWCPSASSLSLPFIHQHPLNPHPITFANHESEAAAMVISKNNSRRHNTMASAHPGVKTEPKTRATAAASSPCCIKRESCCGGADMPEKRSNNSRMARTENAGADGAGAERKCRVSAGFSVQELQLQRHEQCMLQQQKRIDQLLLELGRSQSALNQHQKMLEDAERRMVEEGGQTGGGMEYWLSQLENGRREFAQQQQQLDKQMDVQKVLCKRDQQMK

SEQ ID NO: 147757 - protein, 168 aa, Heterodera glycines
MANPNNFIAMITTHKRTSIGSTVSRRCGSNLNKSLILLPLFLFSNCLAFFRANAISSVSYQIRFTIRVPSMQIVPFELVNEWTKEKLTLAKANENDWRIDWIMKRCKIIGETAAFHWKDGNWDNNCNRVFFYLFCANNCIGSLSPPPEEVKEKAGQSITNGASYADNE

SEQ ID NO: 147758 - protein, 186 aa, Heterodera glycines
WICNDVLMDILPSFDHAQLGLKLALLSPRFNALVDKHFDGKRELTIWRTVEIHHKDKGSGPKLSVVFDDRAVEFPLPDRPFSCKIRFKHLQIEYIDHYVIAFLRLNHQIFDKRGINLELWNPSSHTMDVQPIWDVLAHEILPIFSANIRHLGFNSGDHLDNLRRLISPTILTELNQLNSIHSFDLF

SEQ ID NO: 147759 - protein, 271 aa, Heterodera glycines
MDTEAGKAQLYANNTVPFPLPERPLPRKIRFQALEILYIDHSVIEFLRANKQIFDNKGTNLVFKLSSYLSGKEDGRTIWQFLCREIWPIFTPNIRQLGFYNGDHLVNLRRLISPTILTDLNQLNPLDSGELFPAGVADDGPNATAGQALTKWLHTPTVDGQPKELYCSDHVWGFKFDWIKTFKEEFLRSTTPASYYILLHLCSMPEKPFELVNEQTQEKLSLAKIEGNVLISYWLLKRWPIAGGETAQRKDENGNKLNNVRFLIRGINCIG

SEQ ID NO: 147760 - protein, 341 aa, Heterodera glycines
MGKTVESQLEQVYYNLNSPASYAGMQKVLAEARKRIPNLKLHDVQKFLHKQRTYTLFKPKRNKFPRLKTVPSGLHTDWQCDLCIMDSLKEHNDGYRYILVCIDVLSRQIYVAEAESKKSEHMIEAFEKVFKKAQVLPNKMYSDSGLEFQAKRMNEYWRSKDIIKHVMYSPHLHAGVVERANRTIKERLYRYFSEKNTHRWVDIIDKIVKNLNNLVNRTTGMRPVDVNFRNATELRNRLYKDVEQQKRIPKFKIDDIVRITKEKGDFSKGYFPNFTDELFKIVRVNPTNPPSYRISDLEGENIKGIFYDQELVKTVAAEQTTHRAEILKSRVRNGVKQHFVR

SEQ ID NO: 147761 - protein, 63 aa, Heterodera glycines
MTWHGVIFCVVPLNISSISIAPLLFFTSTEYHNAFTKEWARLRALFVGLQPSNTIFATTVEIF

SEQ ID NO: 147762 - protein, 111 aa, Heterodera glycines
MHFSEANPIIFALFLQYKDEQPCWPIISCALLLSIIAFFGLIFNTALIYVTVRARTLISPTNRLLAFNAALEIAHQSSYFTFLFLSLTGQTFIDYKMAVKIGTLSIIGYNV

SEQ ID NO: 147763 - protein, 102 aa, Heterodera glycines
MSKEYKQKRKYSPKEWKQNYAEICKKIGVGIGTIENWKRKFGICNKLTKNEKLEKIKIYLQIKSENPKMSDKEIAKTLKIDRKSISRWKNQFGEEILENLNE

SEQ ID NO: 147764 - protein, 78 aa, Heterodera glycines
MQEVIGTAIAFALLSNGRCLNSILFLLNFPSSKNSPLCWRSDHHGGYVHFSADRSLRLSQIGVHFRRSDQHNGHHFWL

SEQ ID NO: 147765 - protein, 310 aa, Heterodera glycines
KLPTNFAMTYSQLKANLNRLRSKPDLLELYHKTILDQDDQGSVEKTDPGSKQKGQKIHYLPHHAVVKETSGRTKLRIVYNANAKSGNNPALNECIEKGVNEYNDLTSIQLWRRLKNILIGSDIANAFHQIELAPEDRYCVRFLWVENPFNPYSLVHYRFKRVTFGVICSPAQLALTIKIHLEKYDHPLIKQLIQNIYVDKLIVSITDKKEFKIVYKMIKQIFCEAGVDVREFLSNDLNKIQKLPKDRIEKETVKLGIWWNFREDEFIIKMPKFETSTKLSQIAKTFDPCGITAPIILAAKLFCQEIENGK

SEQ ID NO: 147766 - protein, 59 aa, Heterodera glycines
MESSKKYSSLCNSCMGKTGKRASLEKNEKDQKFKKNNSEGKPIKELRRKTCRNPIERVV

SEQ ID NO: 147767 - protein, 46 aa, Heterodera glycines
LPTTDRRPRDGTTDAITETTRDGIGTTAEDDETEALTLKNGFHFVK

SEQ ID NO: 147768 - protein, 118 aa, Heterodera glycines
FVHNFRELIFTKKFYNSEKLVLRPPQIDAFWVHFTRHYKGRDKPVQLSTDYLTILHLSKDIEANSTKGYNDKLLTQFDGQLGNGSAFLNDSKIIKVHVLKRTIFVKRKGGCFARKLIF

SEQ ID NO: 147769 - protein, 156 aa, Heterodera glycines
PPYALPPYPSSPSLMCLLLSLLLLFLSPFISLPLFVPFSLALPSPQKRCPSPLFRQSRSSPPPNGTSPHYSTPIHFFAITQDCQFVLARPDQLGQLPSLSVSSSVSDCAPSRINLLWSLNSPVPSLLLLQQRAHKLCLLPIEVPFSVIAHSTELFR

SEQ ID NO: 147770 - protein, 103 aa, Heterodera glycines
MIAQSVPNIGHYYDEEEVMEDEEEYSYEEIDEEEEEEEEEVEKEEKRTVAARALPAAQLAEDGGQNGTAQGNEIGGQIQWRDKGLSALIALELIIWHFLISWD

SEQ ID NO: 147771 - protein, 263 aa, Heterodera glycines
KIKEMEAAKKQIEVEESAEEEGRILKEKARKTEEQKRGQKAKKDGEKWGRTEEEGPKRDGKHCLMRSYVAYYNYPREGSDQSMECPEEARKREENLKMKTVEERDHAFRSFVNADTSLDGRAKVGQRFARNLLAPVERDIIRNPGIPPEGRGFCQSATGWQGLPHPEGRNNWHATGWQGSRKRAWNMSPIRSSPVGATMEEKIERVRSLLFECTHTLRDVVDEMNAKKKKEEEMNKERTRETDEGREHGKKEGSEKSEGTKDK

SEQ ID NO: 147772 - protein, 26 aa, Heterodera glycines
LTSVVLVFGILIVPCFVVPSAVIGEY

SEQ ID NO: 147773 - protein, 74 aa, Heterodera glycines
MVFSDIELTFVTADAVRLVQDKKVWTVIGTDGALLLKHFVIPFSDVEAELCNVRQLRVVPVQGNESRVLDVLVI

SEQ ID NO: 147774 - protein, 34 aa, Heterodera glycines
MFNKCDLINENIHFLPPFFGIQEVVLNLEIVSYD

SEQ ID NO: 147775 - protein, 1763 aa, Heterodera glycines
MPSNKRNLRAKRQERYQRQMEQSVSPDRSPVPDGSADENGVASHPGTTTPNIGALQLSTPASSIGSKRRSMPPKAGAEPFRASQNSVSSVGTQIASATQNDESSPRNKKGKIDDFDRPISALEAIALTPVSTQRSGGRPAKKRGGPGRGKANDSMGESSSMDQSSEAGINAAVLPNVPEKINFSTVQINFATTRNLACKIWKWGATALYECDARRSGPRFIETCWNDLAQFLNDAFIVEYLAYLASISQRKVVVVDPAVWQMGIDRVIEYKNMTFGYDPNVPAEVILLPLHFPGHWTLIVHDVQCGTHFADSLPTPYGRLDVQLTDKIIKIISDILPSTVLTGIFNAVNLTVQHDGNSCGYFVCLYAESWLMNNRTFVLPDLSINYEKKRILWHINELYGSDNVPYHPREGVPTPCPIVYLHADEVQSTSKAAEPMELDEPDDIMIIEPQTSGKAANAILTQCQVAGENQADTLGLVSESCVPQEPIAQADDAIFVRPKTPPRRSVRIGRRQSASISRSSSPAPKRRTSENVPGQVTPLTKRCHLVHKGWCCAAAAAKHYPEYTDSGRLGEKKCSHCGALLFPHENSSLCCRQGRVVLPKLNPHPKELAKLLVDENQSREGKEFVRHMSRYNNLLQFASVSAGNKPCPAGGPMAVILNGEFHRRISSMQAGTTQIPGFGQLYILDPVEAMEQRRKNPTFTGEKITNEEEFVQGHQLNDKTLEILEQMIQAHHPAAQAYKQAHEQLTELLQQQNQEELRFFRMTLLNERRAPAGLKDPKLHPHQIITPSTGEGMFAIHADPTGAPPPKGIWVENKQGQLNEIAPFSPWTDSLTYPLIKPLGDDGYTTGIKYAKPSSRKRKGAQNASGLFDSEAESDNESCETQSIASSDAGSVADSDAESVASASSAYGRIDKSKRFISLRDYCKYRLAIRDENVELKYHHILSCGGGLGQRWILDQAAKIDWQVATFLRRPDMDLRISTPKNLLQYLVNQYNRQQARQNPNAQQKTVDDIGSVVRLSEHNVNSLQYWKKMYEDCNTVFARCHDAKKARLFITFTNNREWPEFKENIYKNGQVFTDRFDMWMRVWTSNIAEFREELYEKKFFGTILGYGESMEFQGRGGPHAHIVAQTDLDAVPHVIQEYIWAHIPSLPDKDDDTPIAKIHREIRETMHMQLHRCSDSWCGPSDPIYGRCKKGFPAPYSKCTVLRPDRPAMYFRPSPSDGGAQLEVNGLIYDNSHVVPYNPYVLLRYRVHHNVLFAYGNKANIKYALKYPFKGPGHCYVECKEESGNKIGIDEPAQYAKMNFRGATEAYAIVHSMPFARLSHHVVKLAIHLPNQQPIVYRAFQLVSKAQQIQQGELPETQCSAYWKQWQNEWKNDPKFKDILFEKVPEQFRWAKDKWVLYKRQQIKRPPIGRIVPVPPSDPERFALYSLMRHFPGDPDHLKMVNGLLCTSFTEAAIMHGLLEDGKIWDKTLAEAALSRWPDQMRWLFVSIMVYGQPSNAIELWNKYKDQMYNPQGIITPAQHKAAELEALADLDWRLHSCFNLSCVHFGLPDPPNSIAKNTDAAIEEFFFGDDDLNLPPGQPNLRPQPNAPPSLNSDQQKVFDAVLLAIQSNPRDPTVPRRFFIYGDGGTGKTFLFGQIIRRLRKAPYTYKVLATASTGCAAILLPYGKTAHSTFRLGREVSLDKLPSIPLESFFARRIREAQLIIIDEITMLHNTVIEVIDRVCKEMAIRQHKDLLFGGKTVIFSGDFKQSLPVVPHEGLTAQ

SEQ ID NO: 147776 - protein, 159 aa, Heterodera glycines
MTLQWTVVAFILYAEIATIIVLLLPWVRPTMWKKVFNSRVVHKLKQFSNVYAYAFIFVLILLFVDATREVRKYSHVDTTREMVGRVAEADAVVHMRLFRIISRIVTLLARCAHLELAAEAAMKQAEGAGKAAQTLLGKVKLKQKWTDNDENFDWFRRAM

SEQ ID NO: 147777 - protein, 147 aa, Heterodera glycines
MVRKKQKLITDDCAPSTSNDQRTNDGFKAPGQKSGQLIETVQSSVQKRSETIHNSIELQSKEKSTERRCLKRKRLQMEEVIDLDDLPDEFFSPSISNEKIKEYDRNRKISRFQMNEEQRKLERELNLTVVQSRRFFYISVLNYCLFV

SEQ ID NO: 147778 - protein, 167 aa, Heterodera glycines
SGSRFGAMLDQLTDRLTFLGVLMTLCHYYPTKMLFFQFVAFLDIAAHWMHLHATDLTGKETHKGSKNPILNVYYTSKTCLFWMCFGNETCLFWMCFGNELFYGLLFVNHFWAGPGLLGIHFVPLLACVVCPVALAKSAINVLHLVTASQTVAEHDREKRGYLVQQSV

SEQ ID NO: 147779 - protein, 276 aa, Heterodera glycines
MSANSVPHSRGWSLNSRTLAIATALGLGSALIYWFYRCRNRNDCEQKSVSILQKAEKKKAQGVEAYRRKDFKEAIRLFGDAIDELRKVGKEFSDQVDEAKIGELMSLCENNNDYLDLTFMENVSKESRNTYHVELDRVAEATISPLLNEIIQVTLTDLVESESLSNEENYKIDETAKQRCHQLVEEGLRINPKNVDPLFAMLLHNNQIVLEACKKTLEKMPNCAYAIYLLGLVDMSDRLDLSQVVQSMENAMRKAIEADPNYWEPYRIMGKICGEK

SEQ ID NO: 147780 - protein, 105 aa, Heterodera glycines
MAESVGIKRCAPLGLREGSVDNETVRLPPYDFVPVSVGCPPPVRPSDENVFLFYPNLLGYVRILLAFGALFAMSYEEKPWSAALLYFASALLDAFDGYLARKFNQ

SEQ ID NO: 147781 - protein, 62 aa, Heterodera glycines
HHRPTPPKCKAMSDFLPFSWTVLLPLIGLLRITKAEIWRTDKRKKGKSDVSLKTIQTQIRLC

SEQ ID NO: 147782 - protein, 83 aa, Heterodera glycines
GTNFSTSQYETADVGVGNQKSICFFVNADTPTIRSYMSSFRRHQKEETLRKEWGKKRESIVKFYKKERKSALRYLKKRAQEKR

SEQ ID NO: 147783 - protein, 103 aa, Heterodera glycines
MVNSGMFYDELGLREFTVKILLLYVLKQFLFEVAPPGPALKNKLDKFVDRKLNECVARVEKLVNNKKDEVKDLAEHLEASDGWHLNEEQIHQFFKRRNANASP

SEQ ID NO: 147784 - protein, 63 aa, Heterodera glycines
MKERTAKKKQIDVEDDSRFMDLAKNPMFREMRKKEHKVQIDDKHKEPFSFLASIGRVYTSDHE

SEQ ID NO: 147785 - protein, 225 aa, Heterodera glycines
MEVMRGISWDEVCELRKKHRKRGDDFYTSNVGLNGCVKHSIAFIFGLGIDNANGDHHLPAGLGMSRMYCINKPNTGRSPRYETMDELAQRFTAVQNLAHAEKLWKEQFNAWEQMCHHRFFYGKCSTEVKGTFCEIGRRMRTYFVLSGSLICMWPELEQILSTDGKGGKRSLRRRMQIVRVRTDSKQRIVVWLDAILGCTIRAPNLGPHELFFIQCKRRAEATAGK

SEQ ID NO: 147786 - protein, 28 aa, Heterodera glycines
EHIGRLVKLEGEHVHSEQLLLLHRLSHL

SEQ ID NO: 147787 - protein, 28 aa, Heterodera glycines
LTSQKFIHKILSIHLVISRNTNQKFHNV

SEQ ID NO: 147788 - protein, 142 aa, Heterodera glycines
RLGPSDWQKTLLEKELEAVGIRLNKRPPNIYFKKKNGGGLKFTHTVPLTHCHEKLIQTVLHEYKIFHTKYLNSPCFSIDELIDVIQGNRVYIPCLHIYNKIDQISLEEVERLARLPHSIVISCELSLNLDDMLEKVCQYLRG

SEQ ID NO: 147789 - protein, 138 aa, Heterodera glycines
SSWEEGDAAQQQQNFPSFGKSTFLTVTTTESVAASYEFTTLTCIPGVIEIPGVIEYEGANIQLLDLYEGANIQLLDLPGIIEGAAQGKGRGGQVISVAKTRGGQVISVAKTADLILMMLDATKGEIQSYLAEKFFKNF

SEQ ID NO: 147790 - protein, 41 aa, Heterodera glycines
MSENFDVGRGNVPEARTEQPVPGGSAALEGASVAGNHFFVT

SEQ ID NO: 147791 - protein, 98 aa, Heterodera glycines
MRFSGSLYFQRIVKIIWLKKFVASFSRTRIREKNSKIFPRQRLRCEEFQFKNKFFVHLCEHDHCVGAQLPHGSPHFVGCLLGPYRLGNDIGFLAYPTL

SEQ ID NO: 147792 - protein, 185 aa, Heterodera glycines
YRICSFYMPSWIREKAYVVTQSVRSKQASNEMWRTVWELGSNTMVMLTKIFDFMRVMCLQYWPQTHFQFGEIHVETLETRTYAHFVIRTFRLRKTGGPGEEERIVKHFHFTEWELEERIVKHFHFTEWELNSNSFPYISAFVELRRRVRHGWKSEVSGRCQKCNFSISSTNPTLHVVEAHKKLAT

SEQ ID NO: 147793 - protein, 88 aa, Heterodera glycines
MVEVAARTGQLDVYEYGRTLANSRQHLIDTVDQYIFIYDVLCEAVLCNIQPIGMHQLKNRSGMYKARKDRELMEVQDSHENKANTMKY

SEQ ID NO: 147794 - protein, 292 aa, Heterodera glycines
KSPYYSLLINIQSLNSAFESTKLQKIQKTHSLQLLLMLHSLQLLLMLTAPLRIGDCAGGHRLENRGKNRDVMVVPPDHSRPYLQTLHGESKDYTYINAVEVDGFTRKSEFIVTEWPKVPTLDSFWTLIFDHNVHTVISLTNQPSDVKQFPQFVHNKGKRNYGPFTVEVVNYQQYPGLQSHMVKISKRTFMISEIMASGASQQQLEAEVRLCCIIQVKMWPIENKVPLSTTALIEVLKMTRSWRKRAPDRPEQRPTIVMSHNGVSRCGIFIAANVCIDQMEMDHEVDVFHAVK

SEQ ID NO: 147795 - protein, 29 aa, Heterodera glycines
MLTDYRICSNYSPVSINTAVSNYPLYSEE

SEQ ID NO: 147796 - protein, 97 aa, Heterodera glycines
MADQFVQPETAEEQQVKAKKPRVDERFLWKITRGQFVLAIRLCSEDWNNLFHNKDKTRRLEDGRVAIGFEMCEECARINCCVSDMIADQKKKPKTTE

SEQ ID NO: 147797 - protein, 179 aa, Heterodera glycines
MVLAIEFCAQILGCSPKSLRDKLNHPEDRVKALKELVGKKVRTTYKDRNGMQKTFFVDGISDKGAALTPAYGRLRQPYNINIAAHFYARHRIKLHLPYVPCVVEKYSGSGEDRYYPMELLEIVDEDYTIKERWLGKLFTEIEEIPVKRLGRVEEVEEIDDNDDDDGGRYECSQPSYVYW

SEQ ID NO: 147798 - protein, 126 aa, Heterodera glycines
MSEDGQITLGLDVFECCPPTAPPFPWPWVPVTIRAESKDSNERVDCVSPSTLYILNSSYGPVFGSVSKSFTCAFSPSSVEECCAELVVPSLLRSLPICLPPLGVHFGGAPAESVCVQWHHRLPQVG

SEQ ID NO: 147799 - protein, 143 aa, Heterodera glycines
  unsure (1)..(143): unsure at all Xaa locations
PLSSIFDFSLSLFLPWLSLFHPFPSFYFLCFLNSLFASVFFSNFLSYCSLFSLFYRRNFFKIXSLTFIETPSSXVKSFCFSFIIYTYIFLFNFEFFHFFILXFYIFSFYDLFVRFVVLSLFCQSSHISIHFVFFIAFCAFGCV

SEQ ID NO: 147800 - protein, 78 aa, Heterodera glycines
MALHRKFTLANANAIETDAEKSRPKITENLEKIQKITFEAKKLRRKRAFFNRTSLIYGAAFGDLCEKTETNKDLWPLS

SEQ ID NO: 147801 - protein, 53 aa, Heterodera glycines
ITENLEKIQKITFEAKKLRRKRAFFNRTSLIYGAAFGDLCEKTETNKDLWPLS

SEQ ID NO: 147802 - protein, 167 aa, Heterodera glycines
MYLKFHNVYPCWNFIIAALAINAVAMFGMVSNFSVIWVTYRTKTLRGTANFLIALCSFFDMLHEHGHLLFLYTALSGQNFLPISSAVRFCSVSLFGVGGIAVSIAFTGLDRLFPRRVKPLPYLSAITLLCLASSVCTLIGYYKKNNETPEFMVTGTFSDLVSVGIFL

SEQ ID NO: 147803 - protein, 597 aa, Heterodera glycines
MEPRKRSSNFSIDHILSAPKKPRQGFLINELLGVVHFLGSVQQGEGTSKQAKDYVKKLENSIEHMAKFHYVKVKSKFTITDLPSTPEALLAGIFQHCIDEAIVESRERNIEPTHLGCMISSPLLEGGDIPIPIRQMTNNTLDTILNQFKKVAQSKQQKNVSLWGEPFTVTITTLDRNGLPSKRRVNGGARRPVKTAVHHRINDQCLIKIRNNDNHFCLFYALQATMVDKTCNWPRWKFFDYVNDRKGQQGQLHHDAVELMQQVNAPMDLDGYDADTFVPHVVDHWNNTQRQHRFAVFIFGSLGQYKPLYKYIDNIYDTPLLLYFNEDHFDGVQKQGGLFGKPYCLECERPYDKMSTHNKTCKARCVLCSRVGPAFPCPSSTGFIKKCKECNKKFTNNGCYQHHLQSGYCKRSKKCKDCGAVWDVHDNTQKGRKGHVCGERFCKMCNNYHNTERGCYIQPIEPKERDPYRIVAFDLETMQHTPSVKPEKREHLPNFIAARVACPDCIENESWREASGGCEVCGPSRTVAFCQRRFTETTVNKQVVAENPLEAFVSWLINDLPLAYDTYAFSHFGGRFDMVLVFRELFKRGYNPDMLRK

SEQ ID NO: 147804 - protein, 228 aa, Heterodera glycines
MKRTNFNNALPMSEKKPKLRRRLPAELNSELISFVPLICLFANVKRTPIGPVCYQFECFRSRRQKNFEYLKGVIALFDVMFEEKRTPKKKKVGRLHLQEELPHDLSRNELLHYLCYGRLGTNLFETYFVMSQATNSIAIGNLFGLLLDFAMSSPTPWHMKRPICCGIFFRQHLPWILQQPMNVMLSHGFFPEVRSDGFEFFWLFNPHLKKYAGNDDTMTDGIFWAKLS

SEQ ID NO: 147805 - protein, 90 aa, Heterodera glycines
  unsure (1)..(90): unsure at all Xaa locations
STGYREAIPDFFGLPINLGASVRGDCPENKKIDFFKCPFGVLKHLWGAKIQRRIXVQAIGKLFPKDSVSPYIWAQSGRGDCPENKKIDFF

SEQ ID NO: 147806 - protein, 99 aa, Heterodera glycines
MNRRWICNDVWMDIFPSFDRPQLGLKMALLSPRFNALVDKHFNGKSELTIWRSIEIHKGKGPEPKLSVWMDDESNNVVEFPLPDRPLPSKIRFDSILIR

SEQ ID NO: 147807 - protein, 144 aa, Heterodera glycines
MPMVPFELLNEWTKEKLTLTKANELDNSWIMKRCKIIGESAAVQQQKKDDNWDNNCNNVFIWLVAGTNCIGALPNSFFCSCAVNANGAIRIGERMDKGKADICQSKGIGQHLDNETMQNYWGDRGGSLGRRKLGQQLEHCDHLA

SEQ ID NO: 147808 - protein, 94 aa, Heterodera glycines
MPMVPFELVNEWTKEKLTLAKANELDNIWIMKRCKIIGETAAVDWKDGNLDNNCNRVFIWLSYGIKSIGPLSPPPEEVEEEAGQSITKGPSADK

SEQ ID NO: 147809 - protein, 102 aa, Heterodera glycines
MLIFELNYEYHQKQQQQKQEVQAVQQQQQILMGIEMKIDNSKNGETRKEVEKMEGNSIGEGGGETEEKERKRKIRRKNEEEKRERNSSKSKLFNFAGANIAN

SEQ ID NO: 147810 - protein, 47 aa, Heterodera glycines
MQMTKRRTALSTPKQGPGLLLFNPSKKGLLIGGGLLPERGLQIADLR

SEQ ID NO: 147811 - protein, 327 aa, Heterodera glycines
MDGAESVILQCATEKGNGVGPSVAADCEANKLAEVTEGLARITATAEGGETFYNRVQEFNRDLTVVVLRAFAAEIPNEKEPKTEEEGPKAKQRKMDEGKAPEANAAQSQPRAFSVLDALSASGLRAIRFALEVPNVTRVVANDFSEKAFEAIRRNVQLNGVQDKVEAVFSDAIDLMMAHRKFGKRFHAVDLDPYGSASAFLDAAVQAVMDGGEQNGPQYTWNELFKGLLMVTCTDTAILCGNTPEACFNKYGSVPLRHKSCHELVPPALAALPMPSLKALRILLRAIDAHANRHKRYIVPLLSVSVDFYVRCFVRIRSGAAMAKDSV

SEQ ID NO: 147812 - protein, 41 aa, Heterodera glycines
MFSQKAENRRNVEQAHFRNLYCKTQKSAKSRTTLMSLRMFK

SEQ ID NO: 147813 - protein, 41 aa, Heterodera glycines
MREKVAQATTIGSEQLFSVALMCLTIVDQNLRLNMPKCSFF

SEQ ID NO: 147814 - protein, 156 aa, Heterodera glycines
KTIANAIELRLKQAEEQKNLVLATILDPRFKTIYLDSSRLNQYKDWLISEATSPSPSALETRQKAEVEVNEYLRDQKIKSRADPALYWEVNSQKWPLIGAVVRKFLSPPATSSESERLFSTAGLISDDLRKSLQAANLAKLLFLHHNLLLTGFSIE

SEQ ID NO: 147815 - protein, 83 aa, Heterodera glycines
MCLTRSHCYLINPSFGPLQMSDVQENASHFRNSSLIFPLTSSLATRAGRKWIYNYGNPQSTIAAIFSVAEIRNYGCPKTPQFP

SEQ ID NO: 147816 - protein, 132 aa, Heterodera glycines
MAKESLRAMQEQVQETAMKLHDAEMSLINVEEECSFLRQRCADFETQMGRQRDDYDALLVKYNSSKTAPPPPPSPSPPFALDAQKEESSEESKRKRWWWANRNNITAASAGDDADDDGIETGGGNANAGRRR

SEQ ID NO: 147817 - protein, 193 aa, Heterodera glycines
IKIVRNPEDDERLAYVNFERPECAKSVRRSLLPRLQKMLGRNIGVDPAGVIRDQEGGDGKFIPDRYNRAVMAAADRSPPPGGPSAAGPVPLRRAATPPMQQPRRPPPRRMEMPVFRKPTTVEQALSAREGQHNKPMRPGEYRCQLGYGKTQPCTSLIIGGLGPWASEDLLEKAFCDYGEIASIQYDGGTHGFI

SEQ ID NO: 147818 - protein, 178 aa, Heterodera glycines
MDQSNGFYDREEDKVKLIIDLTTVDEPKVDKFNLDQSNSKGALFMEIEKVSEFAREIFWSERKSETVHIGGFPWKILAQIGKKKEALTKMRNAETWSCKCSATLRIVSLKSGVSDFRRKLDDHVFDNKNRGWGFNFISFAELMNPSKGFYDQSEDKVTLAIDVTVKEAKRRTKHKCPI

SEQ ID NO: 147819 - protein, 376 aa, Heterodera glycines
MSNSIQSISVRMKHLLSTGEYADVKFLIILAHQIVLKSASKVFEAMFRFDSKNAKADNARFNLFQLAFANCPVVVEIPDVEAAAFKVILSFIYADDLSELNGDNAMGVLCAADKYNIPDLVLPSSQIPISELRNVFLAYAQARLFDFEEYCNDCLDYIDKNADALLKTEEFLQIDQKLLCEILGRDQLQISGEISIWNAALRWADEKCRENGIECSSGNRRSVLGPALFKIRFPNIHEEDFAKCVVPSGVLTVEEVLGVYQFNSHPFLYLRGVPGLYSLKFPSHGRIFNWNKARGNRRGTLSMEIEKMSEFAGESVGRSRYSDAVYINGFPWEIQAEITKGIDEKKYLGFYLWYDAKEGPILITILKIYATEKGAN

SEQ ID NO: 147820 - protein, 532 aa, Heterodera glycines
LSQKLGRIHKIDLIPGSLPFHCRPYRYPPETQKEIERQIKMMLDQNIIRESESEFASPIVMVPKADKKSWRFAIDYRALNKMTKKRVFHLPNIQELLDLMGAKKFYTCMDLQQGFMQIPVAEEDIEKTAFISHLGIFEFITMPFGLTAAPDTFQRVMNSLRRRLTAAMLIYLDDIIIGSETEENHLTDIKNFLLLLKKVGLKLKLEKCHWGMSEIRYLGFLLSEKGVRIDPKQVEVVQNFKAPKSLTELKSLLGALTYFRRFIHNFAHIARPLQTLTRKIEENWGPEQEHAFQTLKQMLTTVPVLQSPRFGRTFTIECDASKKAIGAVLLQENGPVAYISRALNRHETNYPSIEREALALVYAVKEFSPYIVGSGVTKVITDCSALTGMMKAKELKGRLEKYQVTLQSFELEITYRPGKKNKVADFLSRYNIPGNEKDCEPKLEENSDEFEFQPKILSAKNINENLIAKNDGILNENNGAIYFVKGKENMEKPKLIIPHSLRQKLFLIFHSEGHFGFEKTWHEIKKRFYWIG

SEQ ID NO: 147821 - protein, 38 aa, Heterodera glycines
DILNFLILSFSLLSSDHCSPVNVSPGGGPFFSLIETLY

SEQ ID NO: 147822 - protein, 157 aa, Heterodera glycines
QIPAHKALLMAASDVFEAMFAYDSQNGTMAGNSPSNPVEVIDICAVPFKAMLRFIYTNKLSVLDGQNAMAVFYAAKKYAIIGLIEAFADFPIAKLPNVFLAFAQARLLQENALRWADERCRQNGIECSGENRRKMLGPILMAIRFPLMAQDEFLKII

SEQ ID NO: 147823 - protein, 100 aa, Heterodera glycines
MSNQNEVPQLRAKRENHGQSGLSVQALVELLLCFFLPPAAVAIHGGPSFKMHILLNVLLCILGLACPPSFALTPLFRMDPRHSPRRLVLFHQHQLILNGG

SEQ ID NO: 147824 - protein, 34 aa, Heterodera glycines; identical to SEQ ID NO: 124987

SEQ ID NO: 147825 - protein, 70 aa, Heterodera glycines
MLVISGWQTLVQGRQDGEESVWSTDRCPPPRSGSSQATRDQPGQLITSQILRLTKINRPPFSAQTTRNEA

SEQ ID NO: 147826 - protein, 44 aa, Heterodera glycines
CNFIKNGENLNLIGNVPPLRRSIQKIFVCLHSILIHFSHKNVLI

SEQ ID NO: 147827 - protein, 48 aa, Heterodera glycines
MASQLTATFGVSLVLQGVFGVADHESDIHCDQFRTPDPNSNKKSKIKI

SEQ ID NO: 147828 - protein, 120 aa, Heterodera glycines
QAMNYQQSVQQQLGGGMSAQQQQQQARPQNPASAAVPQNMSPNVAPSPQQQQQMYQMPMYNHTNAGGTPFSPHNVYNQQMMTPQMASQQQFPPNAPATPATPQMSQSIGTPLSVHNIQQP

SEQ ID NO: 147829 - protein, 230 aa, Heterodera glycines
MLMDRGRQTEAESRRLFQQIVSADFGFSNYHQPGQLLSTWCGSPPYAAPELLLAQEYDGRQSDVWSLGVILYILVGLFFEKNNGQNAKNAIIIKQVTAGFPFPGDSVDKLKRAVLSDHLKIPFWVSVECADLIRKMLIVQPAKRCTLQYITQHKWFTCDMPEHIKQQLLVPQLSSSAAATTVDNQQENRAPYTVGGGGGRAVQQQQQQLDPTVLIFMQQHTGWSDEQIIE

SEQ ID NO: 147830 - protein, 141 aa, Heterodera glycines
MGGDGGMVLLLGRLHIGTAGDDGAARAAPRVLAVQLQIGATAAHNCVQRHGRRCCACGAAATEDKRRCHHGGRNSTVTTTITITTTAGATGGGNNAGAGGGSSRGGGCNRFRLANVGQTAQQQCVRAKHGRLVVVAQHFLF

SEQ ID NO: 147831 - protein, 151 aa, Heterodera glycines
PTNNCCTLLITVLPLLITVEPLLITLLIAVVPLLFTVVPLLITVEPLLITLIIAVIPLLITVVPLLITVEPLLITLLIDVVPLLITVEPLLITVVPLLITVVPLLITVEPLEPLLITLLIDVVPLLITVEPLLIAVVPLLSTVKNYVFKAF

SEQ ID NO: 147832 - protein, 154 aa, Heterodera glycines
MPLALCRSFPSPLMAPFLFPPNGLGGLCQTRGRTDAPNNVAKSLRTVDQEAEQIQELLRRRNSPVDPRDRPDVWNEGAQIERLLHERQNAFMADDERVEDEFAEGRVPQIVEPAQGTCPGLKKHARIQRKRREWRTLMKAERKRKAVATDPGCV

SEQ ID NO: 147833 - protein, 110 aa, Heterodera glycines
MVENLCASLPGPVGNGPYDTEMCQFLADFFPDLIDICVEMLPETTNHEMAVLMRDLWNFLKSLFSMSSSPTSLHSSDVRPMPPPSPNRMDALTSVNQCTKKTLTHNCFSR

SEQ ID NO: 147834 - protein, 302 aa, Heterodera glycines
VPQRSPIPMDSAPIGARRGQSLANLVSLVIAVLPQLCQHRQQSSGELGLMSAAILLALADARRFGTEWDQFVMATDASGSTDPKNGSKVVENVLTLIRWQQTAPEDSPIRHLGISLPDLRGQLQDALLGWTLDYVDSLLQQSGGTEDIFLESQNGSSVGAPSLRVLDTFYSLMCIIVPQVQLPLRYHNKLLTKICALIVSMLRLVDRSHWGTPADGVDFVCRCFAISGKIFTAQIGASKTHLLAALMDEVFGSYDKLFSTDCGSGDKHCFNPSVGGCRDVGARFNFDAFRCLDFLNTDKKKE

SEQ ID NO: 147835 - protein, 101 aa, Heterodera glycines
MLIVNIRPLKKLETIVHFQFKKCYQKYVKSCAGSNHRVGDEMSRETAANCQRHQQNGTDQRRPPLPQQKGSVIGLTDMRGNAMALSQNQAAYFDQLRKYWN

SEQ ID NO: 147836 - protein, 80 aa, Heterodera glycines
QNALSFPLLAISFLMLLLVAPIQIHGMFGSNGRGRQMSGGRGQMGSNGMGPGMGGGGGSIRRMQQGQGMGGNGGGGGGMF

SEQ ID NO: 147837 - protein, 691 aa, Heterodera glycines
MDIPDNPKGVRRTTSACGHNTVYELRNEEDMSEMTISVINRKFWSGKTAVKVSDLEAAHNELVKLEDGMNRSIRALNRCMDKKTKWVSEVVSNANSNFEIVKAQIETLVDQIDDLERANDGTDANSTVREQDDSSQFEMPLKDNKGTNRGLLSTGGGTTTQTQKGVGTSSNNPAGPTRSFFGINMLSNSLSINSNLELFGEESVYAFDDWAERFKDYLSVSGKNLTEGEKVTRLKLALKDTPRTLFKELEADQIVTLTSALDALRAKLDSPQRRELAKRTLALCRQREDETVGQFLRRMTPLVESSNPSLSGDQRKEKVCEEFLDRLKPNMSFLIRLVDLTQAKNLELVKAQAEELEALFLASKGDDVTRLSHLINALKDKSENEQSNSNPNAENDRNFGRQQRNNTWGFRPFTADDVQRQRASNRGGRGNSNRGWARGRQEHMSQRNWSNNPVCYFCNRVGHLANNCNARKAQFQNRRGGNSNWNQRGNNSWNQRGTNVGWNQRQHQSRQNWREQAHEVNVMQPSTSSSSQGFMEELVKSLITMNIRGSSNHPPMDNGRGNPGSMNLIAHVDSNNEQTAVKTEIENADERPEIGLACGQNTDKVKPKTSNWESRGVGKINSLFFTTAIMTIFFSIFISPVFGTLPDHPILCQTKEEGKVWQLPGVSGCSKMAIDPSKPIVTRILEIFSRK

SEQ ID NO: 147838 - protein, 125 aa, Heterodera glycines
MPDRIGIERVLALSNGRICSGTNASEEVYEMKETLLMKNAQHPSGSQSAMSILMSMAPTSSSSTQQYNHNQQQLQMMSYTRGEETGAGERGPLLPNDGDDEAGIGMAGAGDEEIIKLAKNLINLI

SEQ ID NO: 147839 - protein, 200 aa, Heterodera glycines
MVALHVHVVHRRRVRLLLQHHHLNIVLLSMLRLPLFSYYCFVFSAFPTANAFVVIVIVVVAMIMIMMPPIVVRMAITKLLLLFLLVLVRQLLMMILVRPPLFLFMLQLLRRRLAIVPLVVIVALFNAQPISGGVVVGIGNTKAMPLCHCAVIADDGTVGALERAHRHCNTTSSIATAAANVVILLLANTHVLLMAKYGRC

SEQ ID NO: 147840 - protein, 251 aa, Heterodera glycines
MEHLTDAPQWASAMLELVNQMVGMCRELVTMVREQDGERNPNMVFDEERRLHSVVIAQLPESNSQMPTQRATDDLANVKALMDHCDVECLPTQVYRMGKKQSNGRPRLSLDTGKLPTIWKQSIIIPLHKQGDKSNPMNYRPIALTCSLCKIMEKFIVWAISDFLLKNNLFSEHQFGFIKGRSTTTQLISTLENWYDGIYNNKNIDCVYIDFRKAFDVIPHNLLLYKVHRIGIREIFYSNCFQKMLSAKYSL

SEQ ID NO: 147841 - protein, 115 aa, Heterodera glycines
MKEFVNSGQTHNKQRTNETILPANWYCDRINRTEYEAQSKDSDRHLLDLLDQILSNHHPNSLQRYDQLKKVHPGTFRRLILPIHFQFRLAYPSIYEKRFPTHSSHLVVGTNLNHS

SEQ ID NO: 147842 - protein, 99 aa, Heterodera glycines
IASRFALLSASAWAMGRDGPIARDISPLQWSSFVSLFDCPFPSLSLDAFAHFVLVKKHLTSMAPIIPREQAQCLQNVFKHFAHFEINSATKDWTQEGGH

SEQ ID NO: 147843 - protein, 159 aa, Heterodera glycines
FSRCGSCWPDYCFALCFALQNYTRYYVKDYGKLSGRLQMMSLQMMSEIHNRGPIACAIGATEQFDLNYTGGIFQQTSDAPTNHIVSVSGWGWDESNTEFWIVRNSWGDAWGETGWFRIVGETGWFRIVTSIYRGGRGDQYNLGIERECYFADPDISNLN

SEQ ID NO: 147844 - protein, 190 aa, Heterodera glycines
MGQAGGETNQNGKGDKSPMGQQKRSTAEPQCRNATAGLSRAVNICCIRRRSDGAATTNSSTSANGGDGRVNVGIWRFAAVDISDANRRFGAVPVDTHCTNGHLGFNLEGAKFSGDEALHSVWRRLEQLWKTMPDAEQMRQQLEHHFVSNWLLDTGRLDELKLREEEMREQAAEEKTNEESDQEANIDVVD

SEQ ID NO: 147845 - protein, 126 aa, Heterodera glycines
MNPPMVRWVLFGNGIGWSLGLTNSAPSRSECFICVLLWSALASSLAVQSFSQKVPSVSKRIAFPSTAFPNPNPNNAIPPPNVVRRRAHNIPRDKPPCLRPMDRPFREHRTYPRSWEMPGFEATIPR

SEQ ID NO: 147846 - protein, 24 aa, Heterodera glycines
MAQCLKLFVQFAIFMAAASHATLN

SEQ ID NO: 147847 - protein, 31 aa, Heterodera glycines
MNLKIFMYEHPISKTKQPDEIVLIKPFNFII

SEQ ID NO: 147848 - protein, 222 aa, Heterodera glycines
MDERHTFLGWDQLEDEEGKEEDYWDRGRPDSKKLAELVEHVEQYRKSAILSKSERGGQRDNKPMDKREGTKGRQTNGQKGRDKGTTNQWTKGKGQGRQTNGQKGRDKGTTNQWTKGKGHKGTTNQWTKGKGQRDDKPMDKREGTKGRQTNGQKGRDKGTTNQWTKGKGHKGTTNQWTKGKGQRDDKPMDKREGTKGRQTNGQKGRDKGTTNQWTKGKGQRDE

SEQ ID NO: 147849 - protein, 108 aa, Heterodera glycines
MRRNSSLSMDTFGDLSTKIASTQSAEKVHFACGEQDQRLENEGEAISRGEEEEDEEEVEGGQSSDSSYVKVIAFADGVSSDELGTDLSEFVKEVKLAPDDLCSFSSEP

SEQ ID NO: 147850 - protein, 68 aa, Heterodera glycines
MSMCGSDLVMTVLRHFATSAKRALRDSAKIGHFAKNAKIGHFATVQKWCKNGAFRDSAKMGTSRNVQI

SEQ ID NO: 147851 - protein, 76 aa, Heterodera glycines
MQKLGTSRQCKNGVKMGRFATVQKWALRETCKFNRKRPGLIRCKRKAERNPQSPRKPSPYLAILFSQWKTFRLVFV

SEQ ID NO: 147852 - protein, 54 aa, Heterodera glycines
MVPRFLKRSQSGSSGWRGVAVGKASAYASMKLMSSIPLTFCPMDQDRAASPMFF

SEQ ID NO: 147853 - protein, 611 aa, Heterodera glycines
MQKPTPSNRPNSSVSKTLACGLEKIVNLSGNEPLSVPVLADRSDPLGLKSVQPDPVPMESAEAGTKELEVMEVDEMSGEKGKKGEMGKEKVKSGGIEEEEESECSEGELLGDGGFGNLQLNPSLRAGNKAVEKEDKGKPYLVAQVRSDGVIAARMKLFWDFPELVFVPFSLFDNAQPIEIGDLFRLHKCEWTNNETGWEERGDWLYEATGRLNYQATATDVSQLRQRIPTQAVGILVDVQRARDRHVKVAMVSAPELSCVMRAYRRHFPADFTDNDIRYRSVVRLQLRQINSPPWVLYSQQFAYVLPSDFGKKRGDELLVHHANVIAGVEPEPMGYEFPFSAELSWAKVQLGEKVMAAAVAAQAFDVKADLRKHTLFVEPVVINEISTRSVIIQFVMPVPSIEELTELCKIWEVDLAVGCKVNPATKAKPCAHGYVLSIEKRALCRGYEIDVKVILSYQEAKDQDAQEEFDQMRCGELDGCVELIPQTSVRALQERMFTLRSNDCSKVAMDEGKGKVGRIMSILLGRPVKPESPKGNNPLMTFGALSKLKEGQVDTALCMLDEVPRLVFQQAGPGTGKTFSAASIVATILATDPTARVLALAPPNVAVVKL

SEQ ID NO: 147854 - protein, 46 aa, Heterodera glycines
MPKICIHFEMILDENEDRCKNTLTTFFADYCRMIANFLHENPSGIK

SEQ ID NO: 147855 - protein, 94 aa, Heterodera glycines
MCSLGPVFVSFASSGGLQVRVGLLLPVFHGMDENRFQNSGLSIVNKLTLQVLDETRMHPINLLSLNSQLASLLLFPFWLFTDALKMWSNIHSTN

SEQ ID NO: 147856 - protein, 44 aa, Heterodera glycines
MFFLTGKWIILGIKMFFFDCCGMMGAQNTTRQQTTKEQRMEIEN

SEQ ID NO: 147857 - protein, 236 aa, Heterodera glycines
MMDDNHDDDGDGRGGEEKEMVTAPKKRKKNPVAGMEEEEEEEEEEETNGVPLSSSSSSSSLPFMLPAICGGVAGGYGFGGGGGGVMLKTRCPMLLPSHKKPFVVTAAASALAANASVTINHAVGADCRGGNFVSPPPSSQCRDGTVQPAGGTSSSLLSTTSARSTAQSKYRSKMIKFARSRIHGWGLFALEPIAQDEMIVEYVGDKIRPEVANVRELAYERQGIGSSYLFRIDDHN

SEQ ID NO: 147858 - protein, 167 aa, Heterodera glycines
CHRCVGSGLYLLLARLREAELRSVKQWAKRSPAEEDAMLSEYMRDGLELEEIEYLKMAFKDLDLADLCADINESAFQNVRRMPCADAADVQAQQPFVWVEPEGICETPNVFPKPYTDARRPGSIYYYVDAELEGVMPNRTGSARTEGHYTRKRDLEKEQLLAQVGGQ

SEQ ID NO: 147859 - protein, 108 aa, Heterodera glycines
MKGGDGHGAEVTSKWTPTTTVGEAVTIVMPPPSPVAAVSAEQSCAKHPWQVHHDEAVTAPAAAAGRHQLPQQLQAVHHHHLPVIGTGPEDGGGTVSPQPPAAAVAAVT

SEQ ID NO: 147860 - protein, 332 aa, Heterodera glycines
MAQWGPKKGETEARKELEEEARKEAEKKAQKEAEEAKEKSQKEAEEAKEKTQKEAEEAKAQKEREEKVKREEEEKRKKEKEAKTKPKKKAEREENDTIIARGIKKRRLTEAEKEERSQKDAEEKARREITDIVKEVEEEAKQRQIRNKIEELTAKLAGKPREEMGEEEAKELGKEKERFENPPEPPRERRPFYSSAVARFECQSELDSASKPRGREERGDRERNLGMSGKRLFTNMLKSAVGTVNDRPCIPPEGLNREMLKRRPTPAPVPQFTTRSAERSPVRKTYAPFRKGMPLERAEEAIYKIRKSLLQAADAFRARRRTVPARRSARER

SEQ ID NO: 147861 - protein, 207 aa, Heterodera glycines
MPTATPATFGGAAGGDQNKQSCANGSSNTSPARHGHQTQMTTTSRSSTTPPSTAPSLCPLNGVGCDGEAAQQKQDTIQPANCVAGASSSSSSSSFSVPNEHFAQKASKFCKSLSKFVINGLKMETFGLFCVPFYGCTPFFGQKSLRTTESQCQPMEEAIADMPMDDDEKEDEDDDDIDVESVLVNQKLQQQPNCITTTYMPLIDTDS

SEQ ID NO: 147862 - protein, 121 aa, Heterodera glycines
MLYRTPALPLKTRSTPLYSLVLDLHFIASPEARRSVGRIERHNLRVGAIVGAATAHPTKIGGFCREKILKKLIVNAVSFVLATTAQELFSPDVATMISFAMVQFAFLRFLVMFSLPSLLVH

SEQ ID NO: 147863 - protein, 464 aa, Heterodera glycines
MPSKQHAKRKKEQERYQRQMEQSVSPGRSPVPDGSADENGVASHPGITTPNISALQLSTPASSFGSKRKGRPPKAGAVSIMTSQHSVSSSDTQITSAPQNIDSSPRKKREKVDEVDHHISANESIASTPVSRQKSRGGRPTKKRGGPGRGQTNYSMSNGSSMNHGSEAATSVVDLPTVPEKINFSTVQINFATSRNMACKIRRWADIGLYECDERRSGPRFIETCWNDLTQFLNDGFVVEYLAYLASISQRKVVVVDPMVWQMGIDRVMPYKNMTFGYDPNVPAEVILLPVHFPGHWTLIVHDVQCGTHFADSLPTPYGRLDWQLTDKIGKIISDILPSAVLTGIVNAVNLTVQHDGNSCGYFVCLYAESWLMNNRTFVLPDLSINYEKRRLLWHINELYGTDNVPYHPREGVPTPCPIVCRQVQSTSKTAEPMEIDEHDDITIIEPQTSGQAVNAVSTQAQVA

SEQ ID NO: 147864 - protein, 220 aa, Heterodera glycines
MHWDEHNNAAEEDQCFGPMVEFGGCEAKETPEKVELNESSETLVDDLNQQLKELKEKLTSANEKLVTVANQMDKTLDESFVGMEQQNEWANKESANGTREKTTTNKGLKGKSTQTMGSWSMGFGAPFGKDNSAVPRMSSDLECKMRMECRELMRKHIETLREHMKVRVFLLHAKRKGMAAAEKKKCQTKFKALMDEFDEAKRKIKADFKRGNADKVGNRS

SEQ ID NO: 147865 - protein, 220 aa, Heterodera glycines
MHWDEHNNAAEEDQCFGPMVEFGGCEAKETPEKVELNESSETLVDDLNQQLKELKEKLTSANEKLVTVANQMDKTLDESFVGMEQQNEWANKESANGTREKTTTNKGLKGKSTQTMGSWSMGFGAPFGKDNSAVPKMSSDLECKMRMECRELMRKHIETLREHMKVRVFLLHAKRKGMAAAEKKKCQTKFKALMDEFDEAKRKIKADFKRGNADKVGNRS

SEQ ID NO: 147866 - protein, 573 aa, Heterodera glycines
MPQPFQATISPQIPPLNFDQLSVNDIEYDDNDGGGEGLLNKTFTLPEEQNDNVHEEEAENENGSNADEGIWQEQIVVSNLSTSHSEVGNVTQNSDKISNEVQMVECHADGVEHSKEGCGDNVSFSELTSIAGGNTSDDITSIPYPSEADKRANKDEDNVANDDKANGEEQQGLVSSQNSGSTPTSSRRVKYKICAEERGTKVEVSAHGRQMDVERTHCVVQQQQPIEAIERSKTGQNEIQPMDDGSADDDEPSERTAAEDSTQSREVADSVFEETTQNSNSSPTNKIGESGGPTNTGECTPNAQSVHGKRQRGEEEEEEVEVISAKSLVRSSALTQRTLAEVESIPEELSMASHSAKSLPNSSVSTMSSGKGMVVAVEPVAEHQQQQQTDDSIAEEVFSEDIVSTFKPSEKSLHSILSLRSNSMSTSARDSMGKLRRDSASEALLKLRTMNCVPELRSPRESKSPPKPLRSPRGIDRFMAKFPHNSSREASFSEELSVKGEMLEELPNASQIGMLFDVSGASVEGTLSKLDSTADSKRGQSDIFLGTDKRTDSVESNKMERGNSLGGFGVPEG

SEQ ID NO: 147867 - protein, 149 aa, Heterodera glycines
MSISNNSMNCGDDFTPAAENGEVNGDSISLDNDGQFDGNSESIADQQQLKEFREKFAKMEMELKMAKLELENKALEQKLKHQEMMGEQKALKEKVTKIEQEKEKNAIIPNLSTSEEMSVLIARIAELYRAKTIEASVASSSDLFGQVGN

SEQ ID NO: 147868 - protein, 241 aa, Heterodera glycines
MSSNFIGSPNCFFRPTADQAAAEEVDKYEVFSWHGDLSDQLAAQFLVSDQQLLKECREKLASAELRETKLLCKNGELNAENKALKAELEKQKLMSENSELKAKVDKMDQEKQQQLDKKYVSVDVFNSLVERIKQLENRQNKEEGRKAEEKQQKESVGQQNKNTEQKLDGKYAVVDKNNVLVALVTSSGDHSPPAVVSAKVAKEVPNSQQQNGWDAKVCHKDIEIIGEKQLTINCKGSRFGI

SEQ ID NO: 147869 - protein, 166 aa, Heterodera glycines
MTPNLLPTLYLTALPLRHQDGPGAEHQQQHQQVTRVFYPDSLADEKEVTVDGLHEKCWYYLCIEWENFNRHNETTGTDCRLFRTLDRLGKGADSTVSELEPTDFSSQMMQFRLRSVSDFPMRFLRQLMDYGQLCTVEEPMVIRYTALGRLVSGISIRKCHFRRTKY

SEQ ID NO: 147870 - protein, 94 aa, Heterodera glycines
MKASFGRWADRMKECFGDGTFSLAPPMFYQINCFHFFILLIIIFNEKFAWRQNVGAKTTLAPKRRRQIVGAKTSAPKRPGPFKIVSDAQQIMCQ

SEQ ID NO: 147871 - protein, 412 aa, Heterodera glycines
KCKEHNMADRLVNLALIAGGAELVDAADFYRELPGHADKVVMLYHKAGLIGRALDFAFRTEQFGAGLIGRALDFAFRTEQFGALDLITQELNEHSDPSVLARAAEFFSANQQDGQAVRLLVYAKKYSQAVALCADYSQAVALCADKNVQITEELENVLTPNKLGKSLPSGSLPSGERSLLLEQIARCALQQGNYHIAAKKFTQSGNKIEAMRALLKSGDAMRALLKSGDTQRVLLFAQTARVGAIYRMAGNRVLLFAQTARVGAIYRMAGNYLQTLNWKEDAQLMRQIEAFYVKAGAMDLLSNFYESCAQVEIDEYHDYEKAAAAYGEAWKNLAKRWTSPLDKRVHLGWGNLIMGRNLELFSLYETDPGEAISQLSELAQRKGIDEHVRLGDIYALMVAHYYKRENYRKVGQ

SEQ ID NO: 147872 - protein, 378 aa, Heterodera glycines
HDSTRDLIMLNQSRMQVELNRRLEETTRNLKCLRRLEETTRNLKCLANALKAEKQRTEGLLCEGLLCELMPPSVAESLRRGATVDAAEFSEATVLFTDIVTFTNICSFCTPYDVIKLLNDLYQRFDRIDVIKLLNDLYQRFDRIVGLHDVYKVETIGDAYMIVDAYMIVGGVPKESQNHAEKILNVAIGFLMESRFVTNPTNELAISIRIGVVTNPTNELAISIRIGVHSGPVVAGVVGVKVVRYCLFGDTIHLANRMESLGMPSKIHVSKTAKALAIRNNPNRMESLGMPSKIHVSKTAKALAIRNNPSFLFTERGAIKIKGKEKLRTYFLERNDGKEKLRTYFLERNDRQSVWEICGRVREMDQSIDGYQVDEAGG

SEQ ID NO: 147873 - protein, 303 aa, Heterodera glycines
QFGWIHESFRQLMTRKYGREIWTKILEIAKFEEGTENEIGKYYKDEEIAKFEEGTENEIGKYYKDEESFRIVSAMGSVIGIPVEEVWEIPVEEVWEAYGGFLIQFTMETGWDELLRALSPDLEGFLDALDALHYGFLDALDALHYFIDHVVYRTKLKFIDHVVYRTKLKGPAFRCEPQSDGSLILHYYSRRCGLYPIVKGVIREVARRIYDTEVVIREVARRIYDTEVIMKVQERKQEHMDTMMTEHVIFVINQVGRSHKANNMSDAPIDRSRTAHKPTDRAVLPREVSFHPPDQSMFFLLFL

SEQ ID NO: 147874 - protein, 122 aa, Heterodera glycines
PLILLPLSVPSLFIFPSPPPPPPSFVNSFIHQRAKGHLPKGQRQMAGKVANKLKNIVLLKRIHTGEKPFRCEHCGRAFRQPGNLTRHAYTHTTVKPFVCAECGKAFNRASNLQAHLRVHSTG

SEQ ID NO: 147875 - protein, 131 aa, Heterodera glycines
MPMNEKCHLRPKRAERQLWSLIGWPPFETSTKKFSPLSDEAPNSEESEGTAEGQRPIEKPNDENGDAFEDGSEEKDMAIPLLGEGSVGSAKSSPRKAKAAEGGGTLWRKHSPAMVKQLNALTAPSLRKSKF

SEQ ID NO: 147876 - protein, 77 aa, Heterodera glycines
MPVRLDQLPKTFNLDCAEKPFFPYAFNRRFFPKAVTFVKKIMLLRENYDVRLPHLPPIEDYCAGSMKQEKYDKFVSW

SEQ ID NO: 147877 - protein, 111 aa, Heterodera glycines
MDNGKKEELKDRKNVKRRYPFPLVSARAQDSWRIKLEQMEEKYAKMEEEMSSEDSDDAIDFFQDTIEDIVENSGVDNGEIDDMDDQQDDDDAPTSTVYLNLGKDERTAKNS

SEQ ID NO: 147878 - protein, 422 aa, Heterodera glycines
MADEMCVNWTRPEQLPYRGILRVRVVPPRGLRVPVLPVKIDERLLFCCCHHCATMFRKKSTRRPHKCPHTDAQRSFTGSYTHIELERALEHGYKIDRLWRAWHYDEWSDQIFKDYVRLLIKLKIESSGFPEGVSSVDQKQRYADEYRRIYEVNIELENVKKNPGLRFIAKLMLNSLWGKFSMRNELGANKVITRPQEFFSLLFDHKIEVSAIVPFSDQALRVLYKPKKNFVSEHTTSNIVISLWTTSCARLKLHDYMVQVDQREDSDLLYTDTDSVIVLHKRDTTPLETGEFLGQMSEEYLDCDIKTFICGGAKQYAFRMRHRRTNELEFVQKIRGITFDVNNSKALQFEKFVEKVLNYGRVDDNDDDDDNSAVSPAVFSYQKIMPTRDSKVITRKQLKKYLPVCQKGIINNSYEVFPFGYE

SEQ ID NO: 147879 - protein, 189 aa, Heterodera glycines
MLSQAEDRGCSVERTSVRGTEGSDDLSGRLAGMSLTLRTSEQQQQLLPASGGRVGPAQRKQQRRRQRERRDLVRVLCRFNRCSPTWLHKMLQKRKEENLKFLNKQSLATHHLKRNVAVSADALSRHGANMMFAYRGFMGITVQQHLYARHRIVLKYPQLPCVVQFGGSSHQDNFPLELLHVVSEEHETD

SEQ ID NO: 147880 - protein, 127 aa, Heterodera glycines
MQQVQQQRAAMGIDDGTTQRKNAGITARVPLASSNIRQAEETSGIAGPKPPKSKKARKNANFYGQNLLAPKNASDQFMSFAFQFVINFLVIVGVAVSWALSVQFRKSTLVIDPSHFYAPFSLVSLIY

SEQ ID NO: 147881 - protein, 82 aa, Heterodera glycines
MKGCLLTSLFVFLITILISNNYVGSVKKKLEQKSFEEIFGEKWEEKRNEEQKRREIIGKFYKIKEKIKQKGRKYSTKGGHHR

SEQ ID NO: 147882 - protein, 143 aa, Heterodera glycines
MCVPKRMRCESANRSVQPHKSLKWNKVEKMSFIQKIKHFVFADIRAKTRQKAEVEVNEYLRDPKIKSRADPSLYWEVNSQKWPMIGAVVRKFLSPPATSSESERLFSTAGLISDDLRKSLLPENLAKLLFLHHNLLLTGFSIE

SEQ ID NO: 147883 - protein, 113 aa, Heterodera glycines
MPNIFKILLIVLLAVVSFRLSASTETANDGSGNNSSAGIGTKIKRIVTAGLLFTSLATGGAEAIGRSNAQGGKAAGLAPPPPPAQFEKRATRVEKMRAHLLELSEKMTDKEPK

SEQ ID NO: 147884 - protein, 88 aa, Heterodera glycines
MVTFEQFIKGAQLALRERMNTAGRLKRVQSEGKLFGSDLENGKSGESNRAKKRIVFKKISLIFTLPIKMVLLRPTKMEMMSKLFIDQK

SEQ ID NO: 147885 - protein, 92 aa, Heterodera glycines
MQSSPLSAVNGQNGIHKRQNSAIQSNGTTNNYADELQPQVAKHERLLDEEFNIVKMGTKKAQELMDWYADRAESLEKRKRMLNKGMVALVAN

SEQ ID NO: 147886 - protein, 65 aa, Heterodera glycines
MLFICAKLLLKLLILLKLIGGIFSTRQQQLFYFARTWQKELLRIFEHENYTDMLELRNHVKVNWF

SEQ ID NO: 147887 - protein, 46 aa, Heterodera glycines
MLLINKLTNFLILRLFALVAGVLGIARQRVTETLILEKKLTSINNY

SEQ ID NO: 147888 - protein, 45 aa, Heterodera glycines
RVQRDREIWTRPGLFCLKNRDFLAGKTGKKAGNFPVPVKTGQNRD

SEQ ID NO: 147889 - protein, 97 aa, Heterodera glycines
MTFENSSTKTDRDGKSGLDAVPVVLQCRDPNQLQTSAAGPGNLDETGTFLFEKPGLFGWENREKSREFPGPGQNWSKPGPWYSVVRVQSSYPPRFWG

SEQ ID NO: 147890 - protein, 171 aa, Heterodera glycines
MEFEEFDPFLNMFVGPEKDLEYDPLFDLFLSNGKKINFDQGFLDYLLNNDDAEPVYMDLDNVPTAPPQFTIPQSPKHLADLGNLLANPAPQLTSQVSPIFPPHNEYEVEQIIDQRKKKGKEEFLVLWKGFLPEESTWEPVEHLESGHALLEEFKKMKKKPKKPAKATKLVK

SEQ ID NO: 147891 - protein, 191 aa, Heterodera glycines
MKVYNPNATAIIFSTGKFVCTGAANEKECTQAVEHVTERIRQCGYQEALIHKFDVKNLIATADVGFHIRLGELSDFLGVKCCSFTPELFPGLAYRNINPKMSIIVFSSGKLNFTGNNSIDDIKIAFNQFYPILYKFIHSPQRLDHFQSFAQAQADRIDRAHSYSSLLHTDCLHNGDKFYAVHKSAGQRSHS

SEQ ID NO: 147892 - protein, 83 aa, Heterodera glycines
MDSGKRTPGKGQWESDTGERDSGKGTTGKGQLERDTRERDNGKGTVGEGHWGKRQLKRDSGKGHDKVIYFLILFLQFKSDHEF

SEQ ID NO: 147893 - protein, 199 aa, Heterodera glycines
MDTATINRILTMNEKTKEHYLGCFPCNKIPLNINKFPSVLVANNDPSNKEGTHWVSIFIKDYKTVYYFDSFGRTPNKCIEKFLSQFKTVEEHKEFIYGGITKDNARKQMAYKGFKNVTVDQHFYVRHRICLRYANNPCVIEKNKNGHDRFYPLELVRMIENDQADIYFGQNFTKVVPSAQESSNNAHFIKNYYDSYPLW

SEQ ID NO: 147894 - protein, 513 aa, Heterodera glycines
MATKEELKIILEAQQKQFLDLISKILPKNTAPSASSSDLFSQINSQLPQFHYDPEADETFSLWWDRFGQFVEKDGKDLTGDMKLTISTLKALFGDTKSIFVRRFECFQLSCGLLQNVMEFGAMVNARCERADMTLSKEEVKCLIFITGLSDAHKELRQECLRQMEKARKSTPPRSMTLEALLEECRSIQSLQNSAAALSGPGQVHSVQVRPQRVSDGSKKSNRGKMVNQKGNISVPNSKEYNFPFNSNRTDEDQQQKCKRCGQFHVNDCPYAEDVNCYRCGKRGHIRPVCPERTQSNAVTVASTFCVTQKCHDWIWTHPLINGHPVKLAADTCSHLTIIQESLWISLGSPKLRSQVANTGAPNIMGLDWIVPIEKATQSPIATTLDLSSAPTKVNTIDERPCHFKIGDTVRVLNYGKTGKSNWFEGKIVAGKGLIWKVKIPLLNITVKRHVNQMRSFVPYQSETTFPNDTIEQVPQQQSPCHRSVATTPPTNLPVQPTQRPQRQRRPPIRYSP

SEQ ID NO: 147895 - protein, 285 aa, Heterodera glycines
MERHDDDQFNENANQGDPPPSDQQDERRAIGAQPAKPKTVLEAHGLGTSQPGVTPAVTKNLRSGLIAVRSARDQIERAAGTLAARIVEARELMDDDYTRGEALEHAARMMAMERGLGEVKRIFEGHFEKGIAEAGAAPDERQDFFYDSIAAPLPAATKYLRLREHPTPAELLQIAAEHLGDLRAMRQTFEDEERESISRSSRSVETENNQAEEELPRAMPRRSMQEWETSFREAYVRQHDELFGQQQPLVNQAERVATPVMSNLAALIQRRSNAPSVASVRVNNP

SEQ ID NO: 147896 - protein, 348 aa, Heterodera glycines
MPSVKAIEQFWSVEAIGIRDDPTQDADTEAIIQFERSVRQHDDGRYSIRLPWREEHPELPSNYAVAYRRLIGLLQRLQRTPGVLEQYQGVIEEQLRAGVIEEATVGTGSTEYFIPHQAVITPKKLRVVYDASAHAKGVPSLNDCLLRGPVWLPDLAGMLIRFRACQVPVLADVEKAFLMVGIEEADREVCKFLWVRDPLGPLTTANLVPYRFRRLAFGLTPSPFCLAAVVRHHLRKYNSEFAEQLIRDTYVDNVLIPADTIEEATTKAQEAKRMFTDAKMNLREFLTNDQGLNDSFSEADALGKTTAKVLGLEWDSVDDSIQISFPGVTPEGECRQTRRTVLKTIARL

SEQ ID NO: 147897 - protein, 117 aa, Heterodera glycines
DTVQPQLLIGIRRFWDFVQGFRKTAEGTYLIDTVFGTVICGEQFQTTTGVTPDSSVFAIPPCGEDERDQMPSVKAIEQFWSVEAIGIRDDPTQDADTEAIIQFERSVRQHDDGRYSI

SEQ ID NO: 147898 - protein, 354 aa, Heterodera glycines
MICSPPARQPAAATDSVMGVKFFMCRVNGGAADQRQYVFLADAMRNDDANANLNDAALAKCFVHFYTVKTDRKGRFLLRSDGKLADRSSIFNQQYNVHLIALNDNSQPIVDDVSYAASTKVVAQRVYVNDMRNSVDTICQHIDERCVINFYPTGYDREKQMKEMTKRWLTDQQHYQEMSEMVNFFLIAVFRELITSAKEKSALNVGTLTSNEAQLIGHFWNKFASTKKNGLLHKRLRLIDHQMVRLIDDFCKIDDSFLRSHHELKSALSLSNQPEKFCENWPKVKETSNKYTNLDIVMEAFGHWLHTSEQLNNDEENIIFFWIEVFSKRLQSRCYNWPFLDQNLFKEIGNFLDD

SEQ ID NO: 147899 - protein, 81 aa, Heterodera glycines
MMFVTVKDEHKLTLDKIVRIKNINNMLDNICRKIFQISANEQFNPVPWKEQLCTGSYFQKKISYLFLIMPLNSFGNPCLFN

SEQ ID NO: 147900 - protein, 107 aa, Heterodera glycines
MSRISIASYEALLAEFNKQVMSQCHLSASTAKSEHISALIAMRNAASAGHNPTKAHQTMAAKNAQQSSTTATAAEQPSQQQQPQQLYSSKRPMTLLKIQPPAPAVKA

SEQ ID NO: 147901 - protein, 321 aa, Heterodera glycines
MAEETQSHREKTTRGKSQENSERGRSANVRQVRSNSSSSNTSTDTYSQKGYTPKPPPTATAAVNCSLRRLCLRFELIKHTTNTKGVVPLPHPPIPTRPAHVPPVQAIRHPTLGPNSLSENSDSELSSSENEAEQEQSSTRRSHRSRKDGFTDEPSQVDTRQPSIKRETPNAQAVHIKSEQVPLVTPIESTTIVTKNIVQNAERGNEKIMQNETKEENTEKSKDTKGDEQSKQKNQTASEKDETAPKKTTAVAPSLPVQPPQTVGKVQVPRPSQRTVVCIPLDVQSTSSPPTDPRQMRPKQQRPSAVTESIMCLDLPRFVHK

SEQ ID NO: 147902 - protein, 37 aa, Heterodera glycines
MMAQNHQAHRDSEALTMSKNFWNNFFHIYVRKAKYNP

SEQ ID NO: 147903 - protein, 60 aa, Heterodera glycines
MSWPENRVMKYHKKRNVVHKKHINRVEILIFSNLIGLSKDFFHQCIPFLLNLKIPLALGN

SEQ ID NO: 147904 - protein, 119 aa, Heterodera glycines
MGTKSRKSLNTENEGKNELEKGKARENVQWESEEQTKKTHEKRSVSRGPEKGEVAFGSVKPIPKESGKEGTEKDVADDSDHLQKTEFDKGGRKGRSTYPGGQFIVRNEGIQEMIHEEIK

SEQ ID NO: 147905 - protein, 43 aa, Heterodera glycines
MGVWHLFICISGQVAKPSDFIICRLGSIPHSDRIFFIFSLPLF

SEQ ID NO: 147906 - protein, 149 aa, Heterodera glycines
MLYFTKGYDENFDDVLNEAVFDEDTDEMVIVRDIEMFSLCEHHLVPFLGKVHIGYLPNKKVLGLSKLARIVEMFSRRLQVQERLTKQIASAILQAVHPTGVGVVIEASHMCMVMRGVQKINATTTTSCMMGVFRDDPKTREEFLTLIKK

SEQ ID NO: 147907 - protein, 65 aa, Heterodera glycines
MCVRRRSFLCSPQKIWFFSLDVVKGLFDALSTNMTSISTNFEPGPEYEQKVEYSIFQFRTYSTID

SEQ ID NO: 147908 - protein, 143 aa, Heterodera glycines
MSSTTSREYYFVIVGRQDQPLFEMDFPPKKREQQQETHHLLQFIAHAALDIVDEQTLRETQMYFKIVDKFNEWFVSAFVTASRIRFLMLHTQKNEDGIKQFFQEIYEMYIKFSMNPFYRQDTPIRSPSFEQKAAMYGRKFLGV

SEQ ID NO: 147909 - protein, 257 aa, Heterodera glycines
MFTPNVPYQTHLLQSVPYSSTAAHQQNQFSSPAAAAAWTTTSASSAGISRWSQQQQQQNNESLIRKHRSLEGVHQLLADNPSCSSAPSMFPPPAPSTVVQQFSESLPSSHCHHNHLQQHNIMPQNLNGPTMPNLNGPLPPSLLQPLLPAAGGPSPYFGASGYAHVPQPTTAATTAPIATTTTTKTAAFINDSSSTASRQFFSQPTTQHHHSLWMPSSSGTVPQQQGIHPWGNEGMVPIGDVEDGQSALRIDEDDDGR

SEQ ID NO: 147910 - protein, 108 aa, Heterodera glycines
MSLLVFSRLRTLPRLAPLLTNSPCALSTSAVRKDIDSAAKYVGAGAATVGVAGSGAGIGNVFGSLVIGYARNPSLKQQLFQYAILGFALSEAMGLFCLTMGFLILFAF

SEQ ID NO: 147911 - protein, 168 aa, Heterodera glycines
KRRMDTDVLKLIESNHEVVITGGLNEFLIESNHEVVITGGLNEFLVKFYGPKGTAYEGGVWRVRVDAYEGGVWRVRVDLPEKYPFKSPSIGFMNSPSIGFMNRIYHPNIDEASGTVCLDVINQSWTALYDLSNIFESFLPQLLTYPNPADPLNGETASLYMHKPDEFK

SEQ ID NO: 147912 - protein, 127 aa, Heterodera glycines
MNFTDYERKFMPAKIHFISLIGTVRFKVNGAHSSSNKIPFICECNSRFYTHCESELFCWRNARRSQFVIALTLALLATTEQPTALVGWFFGGPVNWTPKENWTLSEFWTPKENWTLENWTLNSSFKI

SEQ ID NO: 147913 - protein, 350 aa, Heterodera glycines
MGNCEFELGFSDTASVNFPPSSGQPGGGGPVVVHGGNAVNFAAAAAHQQQQQQAAGDPSQHVAAVHHHHQQQQQLPPQQNKTLFTPAANPAMVSATPAMQQHLQQQAQTIFHQTSATAVPQFPSYNMPYMYSPVATAQTLQGPNAEIDRFLIQQYGTPYSQLDLQMGAMSIGPPTTLAPNHHRATLESYMENKFGQQQQNVNQAANNGHYQQTQQSQQQQRGLAQSEQATLLGGPPSHVGPPPGFGMPTAPTQPSYVQPANIHSLFQMPTYPHPYQHPQYMMSNANRFQAAQRPAQTSPPEANVQNQRRGGGDAQGYAGGAVPDSTSEQHSAAVSQQYGNNFNHKYRSYM

SEQ ID NO: 147914 - protein, 251 aa, Heterodera glycines
SAGPRVRTERQGQGFKGQNRTFTAGGAYRRDNVAANKQTTNKVVGTGTNTGDFSSTVEQSYGETAGHENDEWKNGPRVFMPSSAATVVMAETSTNGGVKWPALDNFTPSVEPAEPAAVHKPKTFAAVAAAKKASPQPSPPQHQQQQQQQQTITYESREPDWTKENWTTEPTNWSSENWASTGKLESTEILDNPEKLDTTEKLENTDMLGTAGNIEAANNLDTSVMLDTSCKLDTAGIMDNHCDTAGMADTN

SEQ ID NO: 147915 - protein, 95 aa, Heterodera glycines
MELQKQPVMATKEQLRLAELTQIGHDATIAHDDIAEQKPVKVSFSVKLDLAFSWTHVQSVFFFVIWVFLGVFLDAEYEPGLLFGQFRIPNPNSNI

SEQ ID NO: 147916 - protein, 156 aa, Heterodera glycines
MRNFLLLLCFAIILQVLCDEHDHIYNPNAEVVLWMNTIYNPNAEVVLWMNTVGPYNNRQETVGPYNNRQETYSYFSLPFCQGYKKGYKKTIEHYHETLGEALLGVELEFSGLDIRFTVDQPKTVYCNYCNTKLTPTDIDALIFAVEHNYCFAFFID

SEQ ID NO: 147917 - protein, 34 aa, Heterodera glycines
DEAESSSNSESLESGLPCVAIYAGKGAPKPHGEC

SEQ ID NO: 147918 - protein, 24 aa, Heterodera glycines
TPSEKTRCVPINRECQRKTLSFFS

SEQ ID NO: 147919 - protein, 21 aa, Heterodera glycines
TKEGPQVSVGFPNEISWVDRA

SEQ ID NO: 147920 - protein, 31 aa, Heterodera glycines
LLINDFLIFFSFSFRFLKLLSLMFNCLCLMC

SEQ ID NO: 147921 - protein, 37 aa, Heterodera glycines
LIADVQKSPGRNGQIRQTMAVEGKSFRRMPCRERVKI

SEQ ID NO: 147922 - protein, 187 aa, Heterodera glycines
MSSNNALTQMMRREKRKLLGNVDVQNPLAFVIPATLREKGVLCDFEKAEIAAVRTAFPTAQIKCCMFHYGQSLYRNFKRLGLVHLYGEKTERGEEVRNTFRFLRPVPVPVFQKWPVPVFSVQKYRKIQVQEKYRLPNNGLYLYLDPGKIQVAEQWPVPVPGSRKNTGLDPDTGRSLVPTIISTCQKC

SEQ ID NO: 147923 - protein, 171 aa, Heterodera glycines
MPFALFSGMTCTAIIYTAINFAFFVVLSVCDIQNSTAVAMTFADQTMGYFTKLMPFIISLVLLNALNASVFMGSRHTVFIMIGLFLGNVNELISYVSFAAIRMPIVLPFLFLAICFSLSIITIIKDFSTAYIGLTLIGSALIIYGIFIWEKALNRISAYREQSSNWNGQWK

SEQ ID NO: 147924 - protein, 54 aa, Heterodera glycines
MRFFFLLTIALLSVVLLLSPSALAKKRARRSMPVNAAMPEWKILSAEVENDGTA

SEQ ID NO: 147925 - protein, 129 aa, Heterodera glycines
MEEYEASSVRQRAKIEERDGKRAKANAQKAPKNGEKSLQIGWIVCFVLFTFAIGILMYQSRETPTNYQKEVNRECDEGTGQCIAIADYTRDSGKTWHRGIFYVNETTFDFEKMLEKKIGAEAILKCPAN

SEQ ID NO: 147926 - protein, 15 aa, Heterodera glycines
MISKHFRLIHEKVTF

SEQ ID NO: 147927 - protein, 128 aa, Heterodera glycines
MANLFGQKQSVAVVGMLKCKGKPSAGTKVKLYDNDHFTTDDLMAQSKTDNYGRFKLSGTAKEITKIDPKLNLYHDCNGDFPFTPCKWKITIKIPKSYITTGPHAPKVFDIGVLNLEGKFSGQKRDCIN

SEQ ID NO: 147928 - protein, 17 aa, Heterodera glycines
MPKELRLAYVRSHEESK

SEQ ID NO: 147929 - protein, 88 aa, Heterodera glycines
MTLQRRKNDCSYYPNKILLKNSNICSVRKIYYNQNNGGEREDDNPSTGFIYTDIALKEMLEEKAKEKKQAYDENGEPKSKRSIMKDTD

SEQ ID NO: 147930 - protein, 136 aa, Heterodera glycines
SMACGLQQRALDEAVKYTTKRRTFGQPMIEYHGVSFKLAEMAMHLEASKGLVKRAGKKVDAQAEDAVYFASMAKCFACDAAFQLLCSFEIFGGNGFNEQFPVEKLLRDSKTLQIYGGTSEIQRVVIARELRKKYGN

SEQ ID NO: 147931 - protein, 326 aa, Heterodera glycines
MAFHGKLCHFLLTHMVFDHRLAKCPSFRCVFDPPHPTRAVAVRRPLRLKKSTRKKTNFNKDVHNGEVSQIGNINVHKREEKKTGNINVAQQNDDVGPNTESQNTNTQPNDDVGQNTGRQNTNVHNVEQTKNENTNLAQPNDDVGPNTESQNTNTQPNDDVGQNTRRQNTNVHNVEQTKNDTGRQNTYVHNVEQTKNENTNLAQPNDDVDQNTERQNTNEEETQTENTNVAQLNDDVGQNIKSQNTNDHNVEKTLKGNTKNVKQQKFDVGQTTEGQQIKAENETAKESVNSNSIQKTIGRKSVGTQTDETYVGTLVHYKVTQNIKGH

SEQ ID NO: 147932 - protein, 90 aa, Heterodera glycines
MLSFRMTPKCWVWMTKKKAIVEKHAGPNRVGRTEKKYFPNKKALGMPHRMQSIWPLTQNKRRPPPARPPFCPPASQGLWTPPNAWPFQRV

SEQ ID NO: 147933 - protein, 268 aa, Heterodera glycines
DVLMDSLPFFNHAQLGLKLALVSPRFDALVDKHFDGKSALTIWRQIRIDKIGTMPRLSVFINYVKSVPFPLPDRPLPNKIHFKDLQIAYIDHFVIAFLRANKQIFDGNGTALKFSIWSAKNDVVPIWDVFANQIWPIFAPNIRHMGLTNADHLDNLRRLISPTILSDLKWLNSINSYRLLPDAIGGDFDQSNATGGQILSKWLHTPTTNGQPKRFNCVYYQEPAINIDEWINTFKEVCGHIFLKQLINDCLLILFPIGYVGIWWMAEV

SEQ ID NO: 147934 - protein, 45 aa, Heterodera glycines
MKNDKRPKIVTKSELPCTKGLRDPNPTSISAPRTRTLKKMSKNRI

SEQ ID NO: 147935 - protein, 183 aa, Heterodera glycines
MEEGGLPPETAPGSATAEQQQQQQQATQPSGNEAPLDDGLAMLQELYQRRHAELLAQFQQSQSIAQQDYLLNLQLLQSALPAAAAMVVLQQQQIAVMPSAASQHRPLLGSLAHTSSEQSTEEFDVSAQQTAQQPQHHQQTCSSVPLAKEHAAGGIAATARNRRTFSGSGQTISQHTRDRLKSM

SEQ ID NO: 147936 - protein, 48 aa, Heterodera glycines
MDRNSHRPCGIMDKAFDFESKDCSTALPMIIYPKGSFSNFMPFQIFYD

SEQ ID NO: 147937 - protein, 276 aa, Heterodera glycines
MVWKEWVDGGGDGDTLIQLCYPKCEQSDTGTYSIRIVNEFGSASVDLRLKVVDRPAPPEGTLKERTASSSRRRRVGSTAADRSAQAAAAACAAGEEAKDEVYNNEEERQNMAVVTKRMAILDLETSGTPARIVEIPENVTVVEGELAIIKCVVEGNPAPTIVWKKGGRKMPLTDDRVRCQTDGDTGHVSLIISKCRPQDGGEYTLMVKNAHGKHKVGAKLLVTPAAESNLDIRAKQKKRGTGISNSEQEKQRQRSDAEPKSKQKSGAQAGDLLVRR

SEQ ID NO: 147938 - protein, 153 aa, Heterodera glycines
LFLAHFSFFCFLALFYFEREKKEERNGTDRNKKERKKKEKRLEEVRDRERVFRVLPGPGPGFFFHIGPGPGFPGQKSRKIQCHEKSKMPKNDLDLDLDPTKIQAWIQDQAEIKSKAYCITDSFSIVPLRYVTEMIGDLFTSIFMIIFSFILKS

SEQ ID NO: 147939 - protein, 174 aa, Heterodera glycines
MKLLNKIEQLRNCKNETIDTEAVAIERNKFDWKIGNALVKLAAIEETLKSRAAKKRKEEAFTIPDKLRLKDGEDIVLYDSRTVRIGEKDVVLVFGSERTLDILSKNSATWHLDGTFKAAPNMWEQCFVVGASVNHRMCIGVWGLLPGKHRRYYEEVLNFLRNRISPVAPRKGEN

SEQ ID NO: 147940 - protein, 333 aa, Heterodera glycines
MTHRTQHELMCDNNDLFLDNKSEKNAEMGEPFVVRRWHLEIVQWQKWDNFGGKWLHKAPHLLPKRNGQKQKNRKTFWGGQRNNWQIEICGMCRRDCRRPMARSDHFQAPRRNAEPLGNELQEALSSAAFLDDFMPFVLAFEFGTKFCAENGGTNKFALQRHRLLAQPNPMAKQQQQLQSRQPPKNKHFRFNHFPNLCPILALIVRKLFSPWRHAELNACYKSMNPVVPSNNAIAKLCQDHLNESNAAGFAVQICIHRDEMEQKLVFETFLNLSTTDKLYAIGIGTVLNDIKAENFAKMIHLVPPVADRMKAFFQIPTPNFNKLISAQKPYEND

SEQ ID NO: 147941 - protein, 108 aa, Heterodera glycines
MQRRINECQQTRKKKVTFRETVEEINGTTTEIVHMETSSHGNRRQSSDISTSIRELQQLHEIVLSIQNLAAPNSRRRHYSSADDGEHGEASVAIHQLQQATQQLQQVG

SEQ ID NO: 147942 - protein, 198 aa, Heterodera glycines
MRKNGNYQNVCRNAFHFTPSPITCDQRVQQKDGLFAIHLKNCWDKYACHIGLKILGTQFLKVQKTDQSVGWSSVFATCCVPAESAGIFYFEVRIFHVLSCFTIGLATKQMPLAPQFALPAHNASSAAASAPGGTTHLFGGNDHFLLMISMSSIKPTQQGSTTTNTTTTGFACGDIVGFGIELANRRIFVTKNGRRLGE

SEQ ID NO: 147943 - protein, 46 aa, Heterodera glycines
MVVETQEQLNIDHHPSAFHRVGSATVAPQPPAAVVETNVVAGTMPT

SEQ ID NO: 147944 - protein, 248 aa, Heterodera glycines
MYNKLRILRPINCCCLINFANCCLAYIGKNADTLLKSDAFLQIDQKLLCEILECDELQIRGEISIWNAALRWADEKCRENGIDCSAENRRQMLGPALFKIRFPLLSNEEFTKKIVPFGVLSKDEVIAVYQFKSLPNCHGISDGIFPMPFSTNGRISDRKKGTLLLDIEKVSEFAREEVESSRYSEKVYINGLPWKIVAEISQLTESTDNIEKCLDFSLWCDASEEVKLLTNFVQKMNYNWLIYGLMAI

SEQ ID NO: 147945 - protein, 78 aa, Heterodera glycines
MNVMKTGEEQDITNFKLGKTQKAQCNRLKEANETLQEANEKQKEEIGELQKQLDAIFQTMLSRAEAEQRGGEKEDPPE

SEQ ID NO: 147946 - protein, 70 aa, Heterodera glycines
PNSVTVRWKYCTNVRRVAKKRTEIMSASKRMTMNNFELVEHKYDVMSNVWMGNYYKTSDEWTNDLIRRLL

SEQ ID NO: 147947 - protein, 700 aa, Heterodera glycines
MNNRTFVLPDLSINYEKKRILWHINELYGSDNVPYHPREGVPTPCPIVYRHTDETQSTSKAAELMEVDEHDDIMIIEPQTRGQAVDAILTQAQVAGENQADTLGLVSESCIPQEPIAQADDVIFIRPKTPPRRSMRVQKRLSASVSRSPSPAPKRPPPANSLGVATPITRRCSAFHKGWQCAAAAAKHFPEYCDSGKLGDKKCADCGAHLFSHEDSSICCRKGRVVLPMLNPHPDELKQLIVGNKQSREGKEFVRHMSRYNNLFQFASVSAGNKPSPAGGPMAVILNGEFHRRISSMQAGTTQIPGFGQLYILDPVEAMEQRRNNPRFTGEKITNEDEFVQGHQLNEQTLEILEQMIQVHHPAAQAYKQAREQLTELLQQQNQEELRFFRMTLLDSRRAPAGLKDPKLHPHQIITPSTGEGMFAIHADPTGAPPPKGIWVENKQGQLNEIAPFSPWTDSLTYPLIKPMGDDGYTTGIKYAKPPSRKRKGAQNASGLFDSEAESDNESCETQSIASSDVGSVADSDAESVASVSSPHRRIDKSKQFISLRDYCKYYLAIRDENVELQYHHILSCGGGLGQRWILDQAAKIDWQIATFLRRPDMDLRISTPKNLLQYLVNQYNGQQARQNPNAQQKTVDDIGSVVRLSEHNVNSLQYWKKMYEDCNTVFARCHDAKKARLFITFTNNREWPEFKENLHKNDK

SEQ ID NO: 147948 - protein, 124 aa, Heterodera glycines
MGGGKGKTVKKVSETEQHEKEKVKCAEDVISLDSGEFYDDQAILYSPKAQFDRFGFWDSCVNTEAKRDLKELKEKEKIVKSELDTPSIEKWGIRVQKLREHEKKTKEARSTPMPFKNSRKGTHG

SEQ ID NO: 147949 - protein, 27 aa, Heterodera glycines
MTFQIKNLISNRASDKQEFVAFYRQKD

SEQ ID NO: 147950 - protein, 290 aa, Heterodera glycines
MDNSRQNSLNHMYPNLFGSGGNSSSGNLGQGQNLYSTQSSSVGQYGTAPLQQYQPMPSSLGQGAATSGDMLHNVQMMATNNQQIGTSGSGSYNYFKDQKDLFDEVNPFASPNASFAHTHQEVVQQQQQPQTQTPSLNAMVQQQSQQKQKLKKKTTIKQQSTLATGQMGNLSINESNTASSHTAVPVPLSSQANQPSIQTSPLQHTGGRTSFQNLPPGGNQQSHPQMLAHSPLGNMAGSTSMGHASAGPIQGGQHPLGNMAGKASIGQASALPAQTGHIGLSPLGQAAGNN

SEQ ID NO: 147951 - protein, 174 aa, Heterodera glycines
MTGSGPIQFGLHSPQPSTPTIPLSEESSLQLIPRWEQDIVCPPRFPISFWNVYTRAQMAIERTNNGMEAAHGQFARELNHHPSLSDFIAAFTKDINKQLDIGRAEQLQKSTKRRQRYVIKEQNVVRILDEADFESEEGLTNASHLIGLVMQVFAEGLHVRGNSESGEETEADEN

SEQ ID NO: 147952 - protein, 27 aa, Heterodera glycines
MAAQNKGNMAEIGIRFGLLMNLLLDTL

SEQ ID NO: 147953 - protein, 35 aa, Heterodera glycines
LANHGSFALFHFTRMGFRVAKCAQNVGTVKRRGQK

SEQ ID NO: 147954 - protein, 36 aa, Heterodera glycines
INFLVCFTLNVYQYSTLLVWKWPKCLSRELAVGNWR

SEQ ID NO: 147955 - protein, 73 aa, Heterodera glycines
MERIENWHQILEGKMKEERDDDEEERIDWKKKGTNKRRWKKRRRMINEEEDERELEERMEEKRKSSTADRCIK

SEQ ID NO: 147956 - protein, 88 aa, Heterodera glycines
MLSMEMVATEEDGEGQQLQQMEEEDNDNADILTHYIKPERNLWLLKRRPTVGGGKWQKQWAQWEAEAIGWNWTNAWNVIEVANEEDVD

SEQ ID NO: 147957 - protein, 226 aa, Heterodera glycines
QFFFQKIRLVNVYEPGHGIPLHLDAHSAFEEPIYSLSLLSDVVMEFRDCANSARRASAHLPRRSILSLRGDVRYRHKHGILTRQYDVHPSSNRLLKRQRRISITFRTVRRVPCQCPYVEFCDWDRAGRLRIPSEECDGRQMEQRYVTKVYDAIAPHFDLTRHSNWHCVVAFLASLPSGASLLDVGCGNKYLHSDALDKVGHDILFFIPLPLRHFCKWILLRIGYFF

SEQ ID NO: 147958 - protein, 253 aa, Heterodera glycines
TDYVMYVLIVAEKPTIAEEIAKILSNGNYKKLRGWNSHTFVFECLGKFYQQIVTFRITSTFGHIMNTSFPQKFTSWHREEPKALFKCPIEPRVANPMHNLNEFLAAEAANCEFILLWLDCDREGENICFEVIDAVRKEMCRAKGLTEEEFMDRVFRARFSSITAKEIKRAMADLGKPNFSVSQSVLVRQELDLRIGCAFTRFLTTHFRRGYCDFDDNYVSLGPCQTPTLAFCVRRHDAIGQFKPHAVLGGASR

SEQ ID NO: 147959 - protein, 81 aa, Heterodera glycines
MCCILLNIHHDGDSDDNQLDELYADHQLVQIHANGNNDHPENDNLYDNNNTDKSKIIDHDKELRDQSPELTKVPELNGGEL

SEQ ID NO: 147960 - protein, 143 aa, Heterodera glycines
PELGAYGRVDAWIRNRIQNNGLQGRSASFPQEMWNMSERVEQNLMRTNNSIEGWHRSFNSQFRFLHPPLSYFVKKMKEEDRHWNLIKQDYNNNPQNGMRGRGMARKNIYVQQDQAIRAIFLDRHNRPFLAYLRAIAYRMPEPN

SEQ ID NO: 147961 - protein, 119 aa, Heterodera glycines
MGGKERKREEKKEQKLKRKKKIAAEHHQKRLPDNPTVDNSTVDNPTVDNPTVDNSTVDNPTVGQSDSEDNPTEVDNPTVGQSDSEDNPTEVDNPTVGQSDSEDNPTEVDNPTVDNPILQ

SEQ ID NO: 147962 - protein, 84 aa, Heterodera glycines
MNGSDLCFSEAETVQQQQQILMGNEMKMDNSKNGETREEEGNSIGEGGETEEKERKRKNSAEGRGERGKNEAEKRKEQQQIDTF

SEQ ID NO: 147963 - protein, 166 aa, Heterodera glycines
MSFLTNSINYGDAFTQAAANGEVNGDAINLDNDGQLFDGKNSESITDQQQLKEFREKFARMEMELEMAKLELETKTLEQKLKQQQELIGEQKALKEKLAKIEQEKEKNDAKYLTVHHREKEKAIIPNLSTSEEMSVLIARIAELNRANTAEPSIASSADLFGQDGN

SEQ ID NO: 147964 - protein, 143 aa, Heterodera glycines
MNYTGRLKHDGSRTRPRFDPNIWSVYTRTLQGDDRTNNHSEAANRRLQCAFACSHPSIWHFIDLLRMDQKLSDDDFAKCSTGQDPPQKAKKYREADRRILTMVQNYLPLNNGDPNVFPLEQRFNHLFIITFLIGISRNYEMRP

SEQ ID NO: 147965 - protein, 532 aa, Heterodera glycines
MASKQPEFATVVPPIAESGFSNIHWLLLEWTADMVMNRIVGLVVLAGPFTTQSDINGFDVRLIFDQQNMDHELAMHGWQECVARMNNISPGQIVEFTRLKVREQGRNGNVKGSFPFTLLYNGESRHRVLGQAPTAVTNAVCSPNFNTPIIVEANDQHQHSSSNGTIIGGGDRDGNDLNNPSNNDSADNDALPAQLTNRPDQVNISDIGDEQRLRIQSNNEDAEDDDFDRAGHSGGGSSTMSNGALFSAMAAPGTVVVRNEDSGSSSAWLSAARPPPRSRPVASTSPSPSPRPNSPSLPGRSSPPPVRACSLTAQRTMTAIVQRMNVIEAEVARDERLSRERDRRRRRRRQLLQDCPRSTPRSSRGQHSGQQQHQQQRHENVITIESDGEEAALLGVQQQQPLASDDEVYYNDELLTIEDQVAQGLVEGAANEVVMMGNHPLAAADRAWLISTAFNLRALPSSVKGVVELDEEGRRNLACCICREWLVGGSQRVVRPSCDHFLHVGCFEAEAKLRRVCPLCAGHFISGKRMSP

SEQ ID NO: 147966 - protein, 378 aa, Heterodera glycines
PAQKRQLTDQSPATPRMKCERVFSGDKALVRRMVRRRRKMSDPAELEMNCEAIKARIYTIYTVSDQSTGPLSQPLTFPKDYLFLEAELLVNYASNNWYCYVLDSKSSTVFQLRMRQLASCFDNVIVVDQMFDIEGLGANMNKAVMECVRTLSDERNWKYLVTLQNHDVQAKTNAEMAQINHDVQAKTNAEMAQIFTWLGGANDVEVELQLTDEEAFGTLPKKVQLDFRTNADKEGKPLALALSKDKEGKPLALALSKGYMAVSLSRQFVDFVVNKLNVTPLLEQLNKGLFGVDEHFWQSLSSSESLDAPGGFPHECFVKGIDEKDTDRFALWADPSSKCRSGNWRHAVCVFGLEDFNEIRRLPHLFVNKLMQEFDFDA

SEQ ID NO: 147967 - protein, 36 aa, Heterodera glycines
MAFDQMDCDDEKLLDFEEETPVNESVKSLTKEEEEK

SEQ ID NO: 147968 - protein, 721 aa, Heterodera glycines
MESTGFQQRYNFRVRRPINYMEQEESSHSRHSRRNGTEQNNGLNLAPQNILDNVQNPNPFPRNFENSIPQQVGMQQNVEEQMQLAMFRPPNQNAVQSFGNPRAHSTPQNGSPHISYNGGQQNFEQNQNRNPDANRFGNEIHGQNMQFHRRQNPRIFVNSQMTNNHQFSAINFEQNRELRAQPVRHAHNFGYEEMFGEQNQNFPNPNYGREIGVNHPIQNTRDFGNGPNFQNFHPVRNINQPNYQQRPNPNFENLAPQPNHFPNVQNFEFVPQQNFQQNQIPDIVMELHKVTLSNQYANTLREIPNLYGTEGRDKIKDFFLNVQMCAGEWRPEKQKELLQTKLKGKALKAYHIALNKFGNEATFGILKTEIMSILRETDYKEANAFSELTQNGKRKPNEDIIKFGERIQRLVNCSYIGLDENQLDEVSKKHFISNINDVNLARFLECQTKANQTFDELLMMANRLSLIEDEKTGKETNQPNRQSGFRNEAFRQENQNFPSNRNFDFQNRNYIPTSQNTQNFEATGANRTPLFQSNKRAQNKESNMIMVKEVIPENSDSKTVSLNHVGHGEIPTYEKFFNSLILHSNEFPSQNPANAECSESPTTEVNIVGMKAIGLIDSAAEINAANPKFLHKIANEKGVDLLKWGFCPNKGNSKLSFEVASFTGGKIPIIGVLNVPMRRGNFECEINCVVTNNSFPYDFVFGPKALNSLGYYIGNTLHTYK

SEQ ID NO: 147969 - protein, 112 aa, Heterodera glycines
MYDEVEKYYRRALEIYESKLGPDDSNVAKTKNNLSSAFLKQGKYKPGPHPSVQQSGAAGDDDAQLLAGGDQMSQSLITSVSMTPSQSSNKLKNRLLNVLGFSGEGAGGAPQQ

SEQ ID NO: 147970 - protein, 149 aa, Heterodera glycines
  unsure (1)..(149): unsure at all Xaa locations
SRACRWNASFAWRRCECVSGARQVHKLCPARGQLRVAIKXHFXHSRLYSDVLLTGVDFKVYKGGMDGIMAGAIRKMVSFLIPRAIWPKIQQRLRLVVNYKGVQIPRLCSVEFNHLHLDYIAHAAIISGDFDVDLPLFIRSFKEFMDEKQ

SEQ ID NO: 147971 - protein, 87 aa, Heterodera glycines
MLDDQAHLMQVLWREKEQLKKEVALMDEYLYMDPERDERNDMILTRPKRRYYDRVEDLPQNVVARWRKEREQFQPPTDPYAGKEDEE

SEQ ID NO: 147972 - protein, 83 aa, Heterodera glycines
MSSTIAPVSSADGTAGSAAAVASAGPSSVEPMPPVEQLMEGIEEKCPPSLDQRLNAMDEVDMRIDDLLTVVAEVMAGLDKDKP

SEQ ID NO: 147973 - protein, 104 aa, Heterodera glycines
MTVIIIKLINLILISPFVLAICCRATVPPVFASICDDEQYPQVNGHCAAIKLTHFGSVQRWAFVGQSDGRPGTFKSRHPEFTLENLAKLLFLHHNLLLTGFSIE

SEQ ID NO: 147974 - protein, 425 aa, Heterodera glycines
MLPPKGLLSILGHVCKPFNHREFEFYSRMDAKLAPFTAKLCSKIKVQCLNQNVEDGTLMMSTEQIVNCHRHPPENVADLPTSIGCSFQKSIATASINANGKRKHSMTFRVKSGRVEAEKSVTANNWAWQCQSKVYCTEIAERTRQKLHTPRGFGQQIQPALCDRPENGHSSARRRRKRTKTTNANAKMPTVDKFRNWRPIGRMQLFDREVGEYIFMNKYEGRRMDRMQFIMRSFTFSKLLQEQGQCVLLRQELLKLRKTLLNAEGFRFFSSSLLIAFDGSGHKSKANEGVTVKMIDFAHSTFNGFLDDQPYSSTDDGYLLGMDSLLRILNVFQQNRLIVPIGGIKQSIELLAIGEKKKSGTKRKYSEEDEESRSSITSSMYTSDSCTGEEETEDCGGGCSTPEAPKTTENALNCGINDIPLVKLN

SEQ ID NO: 147975 - protein, 110 aa, Heterodera glycines
MDICAAQQKWTFAPLSKVDTCVAPFAPRHLLRLSEATNYQQDQSSSNSNGGGGTPNNVVALPRTGGSYPATAIRQKREHTPMASAPFVGPLLPNVAAAADELSRHYSMWI

SEQ ID NO: 147976 - protein, 50 aa, Heterodera glycines; identical to SEQ ID NO: 128481

SEQ ID NO: 147977 - protein, 135 aa, Heterodera glycines
MELPSGGHRRTFGHCYSFLLICQCHYRRAVAHTVVVMLLSSSAFAAVAVNFGKMFLTIMMPRDDRGRPVIVVSFGAIAIPAAGDGPTCEATPVDDGHVIEKGKASQGQCQRDEHGTGGDQKLNDERNFLVKKCAT

SEQ ID NO: 147978 - protein, 35 aa, Heterodera glycines
MACPNICFTSGAIDLDTTKNESVCSMELAVYCFDV

SEQ ID NO: 147979 - protein, 206 aa, Heterodera glycines
MAKIFLMGPQMICRFILAATIFTGVLLNFVAFASARHHHRHQVRAVPVEQQSAEKQQQRHQQQYFFDIDGPMLEGQQRHQRWRHNLRLLMTMQQQQHEQQRHGLPKYRREIDDTLLDDVEGSAENAYEGLIGENDGSIDELIGGQDNGNSDQRGGLGIAADADHDDGGDDDLPQWWRRSEHFATTAQQHRQQQTMSQSFLVSASDC

SEQ ID NO: 147980 - protein, 1159 aa, Heterodera glycines
MLISGPSGSGKSSFLVKSMLESSELIGPKPASILYAFGEMSSIVPTLQKCGISVYSGVPPEELIKRLPKPLLLILDDLLLSIDEAYLSALFTKKSHHQNFAVVFVTQNLFERRIKVARQNAQYLVLMRAPNSALAVRNIGVQLFPGKLDYFLSAYRIATNKPYGYLLIDMHAASNPLLRLRSGIFKEDEEDGEKITRGLKALIKRGDESDEEQVFDFGADGVQRPASQSRRRLRRHRHYNDDEEMPLMPPSPPLQVENRGQKRKANEFYFSWEEGAKRQSRHEDAPVPSSSKIANRQGRRKLPPVSWRREEEQIPADIQQEEPFQPAPQPSIPIHPQLNRKRKAQHALNDVRESKKSLIGLEELRPPSLQQEASLRFKQKRTSKSRVTLPQHSNSLALAKLRNPPRDLLAEAASAPLPDDDTHDFDLSQNPGVAAQVEPLPPGPPLPSKAKKRKSNKAEKENERKRIKIGSRKRDLLAEAASAPLPDDFELSQQPGTSDQVEPLPPGPPRIYRKKKKQNWFLKEIIFTKCYQKSAKKAKELGIPNSQLTNEQKRRRLQFVFNRKPAKYGVQGDTILNSAGNPITDSSVAQALDYIIERREGRIPQFRQPPGTKLIRDRINQDLILRTWTAPPRNETGESQGARRIDASVSNEGSQAEVDGPANSRNGNPNQKPASQATKMEKSIENVLERLYNDPKSPAAFAGVDRLWLEAKKELGNKIRKNDVKHYLEGHRTYTLMRPRRVNFLRARTTAAGFMTDCQVDLADFQALSRHNFGNRYLMVVIDVLSKRIYVTPLRTKKSDDMVEGFKRVFSTMPMKPHRIFSDKGTEFRNQQLKKLFDEEVEKYESAHSEKKAALAERAIRQIKNRVYRYFAQTKTLNWVDVIDQIVDGINKSPSRVHGMRPIDVNFKNSQQIWEKMFGEDQHRALFGKHRKRAKFVPGQTVRMSIAKGQFEKGYIPNYATLKNHAESLESIIKDNTPIRRKRGAVEPTTPPSARIVPKSPPNVTKKVIVPTSPPRVGQEHQENTEEISDSLTNVTKPPEKQPKIEKQPEVVKPKNEQINQTENISHQNAPSPKPPPPASIPTTKKHEELKSTIDPTPSVSKPPPPLPVSNPVNQNKNVSINQSVSQKITIPNENGILVVDDGICLLFSVRVSTYSLLC

SEQ ID NO: 147981 - protein, 123 aa, Heterodera glycines
MVLVFRELFMEGLNPSMIRKGNRLFEMKVKSRKNLNPNVTFRDSWNLIPGPLASMGPMFGLDVQDKPFFPHMANKPDNYGCQIFPSKADYLADGMNPEKRKQFDQWYQQNKNIPFLLDESLAR

SEQ ID NO: 147982 - protein, 102 aa, Heterodera glycines
MGAHAEQKWTTETIVLRRFGGRRKKRQLGQQFQGVHTSIEPFEAVNERTKEKLTLGKVPSPAFYWLLKRCPISEKAAAVTLEYDEFWDDNLNSVTIDHTIGI

SEQ ID NO: 147983 - protein, 163 aa, Heterodera glycines
MNTYATTGEFEGPFAGRSFAFAVRKRSPKKLCGAKKPNKHLRKGDCGKIGVIGGSPDYTEFVRLYTQMFPNQQKGEETDKLKIQCEMAEQLAKHLEVTVMRKGEIDIISNGSAAQTRIVQAETSMRRCGGQGDILSGATALRILGKESLRCRHLFLRAFAGRG

SEQ ID NO: 147984 - protein, 210 aa, Heterodera glycines
MPQKQRRCSLIVKYRQLIQLQSLANEFGARFVDLRLLGFKADFFAVLADSTTMECVLLDAAVHPANVTLNAFSQFITMLFSAVRDGFYTEMRRLRRTSNSFTINPNAPNTMMKKLSVDDNMKVSRALQGARSISPSPELETCQKSAHSSPIGHGSQESITDRQSQQNNNNGTNSRKISPESLQAKEEIRLLTAEFMGRAMVVGGKECQRD

SEQ ID NO: 147985 - protein, 73 aa, Heterodera glycines
MNIYLYSIIISIGIHSAVVAAQFEEQWVNACKEILVKIKSSAEKAEKCDGELKGNLTELEQKVKEMHFFVPSK

SEQ ID NO: 147986 - protein, 52 aa, Heterodera glycines
MIFHACFLFKKKLTMLYKAYDVNDVESLPFPLKYNICVNMYASIFLLHRLMT

SEQ ID NO: 147987 - protein, 140 aa, Heterodera glycines
MAQQFDRNHGTKAIEFLPTDPVLLLNYRLGKSHWLPGTIVERLNNSPTYRVHVPTLGRIVHRHANQLRRRLDFEDNSNWEPPIQEQMAIEPNQRTPPRQHAAIDQRTPPVVDQARQKAKSPIGVRRSQRVPKPVKRFTPG

SEQ ID NO: 147988 - protein, 421 aa, Heterodera glycines
MGEAPDQRVEAVQEEELGAVAGTEAEGQPGEDNNAPRGLSGSEGEKTVEAEEVAQDEAEEGPIPPSFVQNEVGSTSPASQTNEQIRETVNQKTEAEKADSPEGSNSMREVEPRRSRRVRRTREVWSPDRCATKRRGIGGPLVSLAMMIMLVYPTLTSGCQPTIRPEIVGQQSQELPTTMLPCHMRCTERGVKVLSGQRLEKMEICCPDGCWAIVPISTEISYELPTELLVHDYHCSGQCWRGSGPPYNITQRCPARAECDLINCSFCWEQLANPTCNPRWASSLFGFGAAILLAIISCFCSIFGRFLSGAKLLSKAVAWGVRYPIGLINWATGRDFRKPTTEQIERKVRKGARKARTEIRELQQQLQLGRRARAMARAWQNPDGTRKAFPAKAVAALIPLLLIIDPAFLQFSPYNPSTSRI

SEQ ID NO: 147989 - protein, 67 aa, Heterodera glycines
MIFALNCGLMAIFVLLLIAFLLHSSIFIKYKFSYLLGLLFICVMYGALIQYFVVDYAFENAGKYDAI

SEQ ID NO: 147990 - protein, 62 aa, Heterodera glycines
MPSINTSSDNAPYLAYRFVGPSADLIVPAVALYLVAFVGIVMHGTVLVVTVKSRQMPLAFLF

SEQ ID NO: 147991 - protein, 53 aa, Heterodera glycines
TFENFSQVLIGYLASGSTIYYPWRTNSESMVCNVTLSEQMFMLFIKILNYFKG

SEQ ID NO: 147992 - protein, 19 aa, Heterodera glycines
MFQAIFCLCDSLFIGIISY

SEQ ID NO: 147993 - protein, 69 aa, Heterodera glycines
MAISAHFSEETAQSSLHALQRLEDAVAQSLRGALALKWHLTRTRVTINPIIKYPVKELFCHYSEKCFRA

SEQ ID NO: 147994 - protein, 58 aa, Heterodera glycines; identical to SEQ ID NO: 128482

SEQ ID NO: 147995 - protein, 85 aa, Heterodera glycines
MSIEATYKKVSQLEHVLLRPDTYIGSVEYTKMASWVYDSEDDKLVFREISFVPGLYKIFDEILVNAADNKQRDPKMNLIKVDIDK

SEQ ID NO: 147996 - protein, 122 aa, Heterodera glycines
PTSDDFIIRRTVAEQCGGVHVVHIVDCAVSAIKVDELQLEFVLLEIGPQLAQQFLCSADRRSERPRNANAHHGQIGIGSAGSEDQIEGFVWVLQVGVGTAQFVQLDSLKMDKARQRFIPLEK

SEQ ID NO: 147997 - protein, 280 aa, Heterodera glycines
MLFPFRFVLSIRIGAALPHSFCSFSDAFPSSGDRILIRRENFNRNKPRLLKRNEKSLLAENRQGIPTATDCATLVLFCQLGSPSAEERCVLFTQRAKRMKHHANEISFPGGRIEQGESVETAAIREAEEEIGLDRNDVELWGTLRPLFFGEAGVVTPVVATIGQNVEQRLASLRCADAEVQNIFMASVSDLLARIHYTTFRFSGKPSDDKMPFFFRMPIFHSTKPRLLCNSSLVNCPEKFRIWGLTARTLLEALNAFLPEDAKEREASELLRKGKTDNSC

SEQ ID NO: 147998 - protein, 222 aa, Heterodera glycines
MRSPINEFKILFINILVLYFFHSLTWFVYFLRYRWLASLLYLACIVGLALADPQISGHPQGVVYLTSDYNANLIFWAMLFTMLLVVATALCDWRIYLLNKRLNRVGNGPSTEYNLSLKYQINENTLSLMLIFPLDLLYALIYPIYNVIVLVLRAYRQMLSTANYVSYYHMANTLLFLHSLVTLVVYIRFIKYVSRVRKPSIVKSQPNEEANIHFKQLQAQWK

SEQ ID NO: 147999 - protein, 94 aa, Heterodera glycines
MNGQKEAFGISSPENDKKKLEEKQTKSTKCYHQLVNYHQSAQTMKEEEEEEVVQLYFEAKQSKKRKIQWPKNTVKRQHNLRKDQTNTTTHSLSN

SEQ ID NO: 148000 - protein, 102 aa, Heterodera glycines
MAIQTLTFGEYFFDGLRPFWPSLEQSETMAFVLKRLIGYLAIWLICFINLFSLQKIAARFQVILTVLKLLVIALIILTGLYQLFALIVLSFICDLENLIGYM

SEQ ID NO: 148001 - protein, 22 aa, Heterodera glycines
MKELIVLYFYGHPKNRICRATF

SEQ ID NO: 148002 - protein, 130 aa, Heterodera glycines
MPGNSVQQFTTPSAPVANNQTVIKVAMLVAQNDTDFGLPRKNSMLRNAGGAIPMALEQLWADEVLPKSVNFSFEWVYEKCNEATAMGLTYQFIHDFGADAIIPTTCMEVVLSRPDANPDPDFFKNQGFIN

SEQ ID NO: 148003 - protein, 272 aa, Heterodera glycines
AFICFSICLLLFSKSFQFKNFVYIIPDNDMTLSFNLSLDPFWNLSLDPFWVQTSVNSNGLDGRDADAEVIGRVNSNGLDGRDADAEVIGRLAFWWHYDITLSALSNRNYYGFYGRVVNRTYGWPFYCPESECNTVANGSLNSVLLYDAIYNYGMALNGSLNSVLLYDAIYNYGMALNESFKQFGIRRETYRNGSLLAANNRRPFMGLTGYATVELTGYATVETDRNTRVFVLSNRKSDSKQSPLRILMQLAWTNGELNVAMRDGRSMMWFSL

SEQ ID NO: 148004 - protein, 243 aa, Heterodera glycines
MVANAGIDASEAVMPLDQTDLLFAETLYEAWKQFGDKKAVILFVHNQPSHIKLDSRKVQYQLEKIATERIMCRFITLSEGLKRLKIDPNNFNLILDDKFVVGVVFDRLGGPITRAEAALNFSFERTTAIKTPPYVFAVAHTKKMQQKVYENPQDYVLKTNECGSPNQRMFFNDDIPKKLARMTPAEHNYFYIMEKLRPMVVKYSNRKICQPGFFMGWVFLGFCPGNQGPTWNTGPGFFTNTDL

SEQ ID NO: 148005 - protein, 256 aa, Heterodera glycines
MRRIIDAKRNLGEDLQKCRELKGKRKTEGEESSADEGDDDSDFVDVEEKEGPRYEPDFSHNDCNKSSDKKAKCAIILDERPGPSGLKVQKEKPKEDEEKGRKSDEINGKKRIPKLAMGLDLKYWGEEHIKPAERVRVQAEGHHFWRPMDEDEDENLQNSTDEADEQREESEAEFLQDLQEATGVKLTENSKKVKKKTTKRRKKKTTTKKKKGKRKKKKTARERPKPKSEKSRERLVLKIFVRIIFSFNREYNQSTK

SEQ ID NO: 148006 - protein, 79 aa, Heterodera glycines
TLIKHQHSFIISDQIEENQKLQFFPQFPASPHKKIFEGHSFVLSSFVHSTPKIHLICAHFTEETFVPKNCLLISQISNK

SEQ ID NO: 148007 - protein, 54 aa, Heterodera glycines
MDQELTELAKIGQDGTGMDFALCIICILVIRATKLCQENLNLVVSKKGYDQSME

SEQ ID NO: 148008 - protein, 28 aa, Heterodera glycines
MDFFFQSPPKPLQAHSMPKGVAISLVHQ

SEQ ID NO: 148009 - protein, 93 aa, Heterodera glycines
LWPTPKVDLSAVEPSFRAQLESLSWYSCVSDWATDKPSPFGAARSTRVCRCCCFPFRPNPKTLKCEHIPGAPEAPGEEQLEEDETERRSREWK

SEQ ID NO: 148010 - protein, 119 aa, Heterodera glycines
MVERKMALKEYQKALREVTDPTERDQIIAQMFAREPWYMRQLAPLCVSETQKAKLENLVGLREMRHILVNLKTQCYEKVTKSENTRGTQTEQSEEEEEEDEAEEQTKLTHTEQKEDGQK

SEQ ID NO: 148011 - protein, 316 aa, Heterodera glycines
LLLYFCWFVWDFATPSRGSHFWPFFYNSPVWRHLATYFPISVIKTADLSADRNYLFSAHPHGIVGSSSFIFFAHPHGIVGSSSFIFFATNGANFASLFPGLRMHSVTLDLNFWFPLRREMIMASGMIPSDSKMIPSDSKSIEWVLSRPGGGFAVGIVPGGAAEALESFPGTNRLITSRRKGFVKLAIKHGKGFVKLAIKHGVAIVPVFHFGETDVYEQVAIVPVFHFGETDVYEQKESREGSTLKKTQAALFGIFPYRRKIVTIVGEPMEIEENANCEDEQTVDRIHAEYCQRLRKLFDENKVKLGGPEDSEIEFV

SEQ ID NO: 148012 - protein, 70 aa, Heterodera glycines
MAISTHLTRQVPMERLNFGDRFNTEPIFAESAKMLISIAFIPIADLTEAVNVLDVAFRNFRTCNRCWILC

SEQ ID NO: 148013 - protein, 516 aa, Heterodera glycines
EYGYKSKKKKQIFKVVLTGGPCAGKTTGQARLSSFFESIGWKVYTVPARLSSFFESIGWKVYTVPETASILLSPGRIRFPDLSRDQAAQFQIDLLKTLIQIENVFFNQAEVFFNQAELSEAEKIMIILDRGAMDGSAYIDMESWSDVLSACKVTNEQLRERYHQICHLVTAADGAQSFYQLICHLVTAADGAQSFYQLANNQARTESMDEAIQLDKKTKEAWVGHEYLSIVDNSSGSFDEKISKEAWVGHEYLSIVDNSSGSFDEKISKLIADVCERFGISISDRLAPNSKKRKWLVSSIDDSAFLKMKKEVFNSKKRKWLVSSIDDSAFLKMKKEVFVIEDAYLHMEGSTLQVRLRSRSQNGKYTYTHTTRTIEDADGKKVETRKQLDWHEYQIYLKLLVETRKQLDWHEYQIYLKLLDKDYQAIRKKRVCFLFGNVFNLDIYIAPLPPALMYNARLTFQTYTTRPIGDPEPRLPDFLEIDREITMESAYSIRSTKFKSMTNTKLSFDARLYNSK

SEQ ID NO: 148014 - protein, 38 aa, Heterodera glycines
MQMNKYLLMPKLNPNLNGCLNDFIFLPKFNFLLNITTI

SEQ ID NO: 148015 - protein, 24 aa, Heterodera glycines
MTLLFIIFLKLLTPQINFLIELLI

SEQ ID NO: 148016 - protein, 1236 aa, Heterodera glycines
MQRLEFEDGSESNMDPANEGHRNGAQHDENVQDGDGPVASTNEEQQKVARVNEATRGSNMATGLATNQQGMLPFPSRNLRSVSIPVRTARDRIERASGTLVARIAEAREVIDQDLTEGEAGYQAARLLAMERGLKEATQIFQGHFEIGMAAAGAEPAGHQDFFYDILTAPLPAATKELQLRNHPTPAELLQIADEHIGDLRTMRLALEDEEEAIARSRLSGSFGTNNSHPVGDDPPPLENRNMEEWERSFQVAAKRWQNDGQGVLQHNRRPMGRVATPVMSNLDGIFQRRAKVPSVASMRVTNPAREWINRNRDEMGAFPPATAHRPALMQPKIEKQQAHVNDDYRERQTYPIRRHARDEGEHDRKHGRDEITGMTTFETVRLQPPTFSGKPEDWTTFWAYFKRAVDDKPIPGFEKQLHLLRCLKEGSPARRAVEVYPPSDGNYPVVVQLLKERFGDTDDLQRAIRARLLHLAPAKDNVNSLTTMIDEFERCVCQLEQLGANVDDDSFGPLLEAKLPVRVLTELRIRESMMGSKWSVREFRRAVAAQVRCMRSAESALAAMKDPEVRTDHKTERDQTGLDVQAGREPFQRAFMVRDSQPTRAQSNGTRSEERYGTNARFARRSITHANENESSGGNWPRVASNGPIATTEIWNCSLCLRSGHRPSKCQAYPTAQARRKRLIEQKRCLRCMSSDHLFKQCQRVNRCNAFRKDDHHWLLCWKSISGGQSRSFTEHERRAKNHATLISGMDRPTHFTEVRDEQNVRDGIETNAGEQRAFTTFGSRLPAQQMICRVIAAAEEGEDECQTTLLLDPGSHVDGADTELIQQLGPQPIDKRPLTVQVFGGKKQRIRSATYRLRLKRTDGKWESIEVSEVPQICTPIRTELIESGATPDSDPRTITQTTQPQIMIGIRKFWDYVIGFRKIESGAHVIDTVFGQVLCGEGTQASSGATPAASILTTMPCGNIHQTRTNKRQQIGEVRRNWKRKRKSRKNNSRGIVSRDRHNSPAELGPDRSGANEVITSREEPIGEMDPKQRKWPIGRIVETKGASEHNRNAMIRMANGRTRRRPIKKIWPLKEARPKTGETDDRADEAVHERLEEQRATETQSKMRDRNAPSAATENEKKEAKRKNIEKRGREVKAVQPDEKANRQIRNDNSRGNGPHDSDEKYGSATTTEKSAVFEKAAEVPSATQEEAGNSANPHSVQRHEKKYLGDSSMAPSLLNDRAKLQTNSTESQGGD

SEQ ID NO: 148017 - protein, 195 aa, Heterodera glycines
NARRGQQNLNLKGGLAFIPKQQQFGFSQRDSASGHIEPGSTFTLTMPNWGFDPFPLLRLLSTGQWLLIAVASGIIALAALFVFIKFNPHFRLYRSLAALAFVALIGKGEAVGTGFNSRLITNSDISSIHPTISSLRPTFSPKFSHFFTSLIYSKIVGPKTTGQQQKTAFPFINNSDLDKNLCPSNKRRATGDVYP

SEQ ID NO: 148018 - protein, 3078 aa, Heterodera glycines
MQRLEFEDGSESNMDPANEGHRNGAQHDENVQDGDGPVASTNEEQQKIARVNEATRGSNMATGVATNQQGMLPFPSRNLRSVSIPVRTARDRIERASGTLAARIAEAREVIDQDLTEGEAGYQAARLLAMERGLKEATQIFQGHFEIGMAAAGAEPAGHQDFFYDLLTAPLPAATKELQLRNHPTPAELLQIADEHIGDLRTMRQALEDEEEAIARSRLSGSFGTNNSHPVGDDPPPLENRNMEEWERSFQVAAKRWQNDGQGVPQHNRRPMGRVATPVMSNLDGIFQRRAKVPSVASMRVTNPAREWINRNRDEMGAFPPATAHRPALMQPKIEKHQAHVNDDYRERQTYPIRRHARDEGEHDRKHGRDEITGMTTFETVRLQPPTFSGKPEDWTTFWAYFKRAVDDKPIPGFEKQLHLLRCLKEGSPARRAVEVYPPSDGNYPVVVQLLKERFGDTDDLQRAIRARLLHLAPAKDNVNSLTTMIDEFERCVCQLEQLGANVDDDSFGPLLEAKLPVRVLTELRIRESMMGSKWSVREFRRAVAAQVRCMRSAESALAAMKDPEVRTDHRTERDQTGRGGKAGREPFQRAFMVRDNQQTRAQPNGTRKEEQYGMNARITGRTVARGNENGHKGGNGPRFTPNGPPPSCGRGNCSLCLKSGHRPSECRAYSTPQARRKRLIEQKRCLRCLGSDHSFEQCQRPVRCDTCRSDDHHWLMCWKNQPGNQSRPVGEPERKENNHAMLISGINQPTRFTAAREEQVNREVAEMNAGEQRAFTAFGSRVPAQQMIRKVTAAAEEGDDECLTTLLFDPGSHLDCAETELIQHLGPKPTERRPLTVQVFGGKKQRIRSATYRLRLKRIDGGWESIEVAEVPLICTPIRTELIESGAVPESDLRTVTQTTQPQLLIGIRKFWDFVTGFRKTESGTYIVDTVFGPILCGERFQVSSGATPASSVFMTLPCGEDERDQMPPIRAVEQFWSLEAIGIRDDPTDDADAQAVIQFERSVRQLNDGRYSLRLPWRECHPALPNNFSMAYRRLTTMLQRLQRTPEVLKQYTTVITDQLNAAIIEETTIGAGKREHFIPHQAVITPKKLRVVYDASAHTRGAPSLNDCLLRGPVWLPDLAGMLIRFRACRVPVIADVEKAFLMVGIEEDDRDVCKFLWVRDPFRPVTTDNLVTYRFRRLAFGLTPSPFCLAAVVRHHLRKYDSNFAEELIRDTYVDNVLIPADTAEEAAIKGREAKRMFADARMNLREFLSNDETLNSSFSDAEFLGKTTAKVLGLEWNAETDKIRMKYPGSEPGTPISTTRRTVLSSVASLFDPLGLVCPATLKAKLFFQKLWDDNHEWDTPLSREEAREWEHILASWEGESNVIPRGVTAGRGHPLQLHVFTDASEIAYAAAAYIRTGGESGCNSRLIMAKSRLKPKKAATTFTIPRMELMGILLGVRLAAFIEKQLHHPIAGQHIWSDSMIALHWVRTASAQPQFVANRLFEIRKATATTFHYIRTNENPADLATRGEVPTLLQHNDQWWNGPQWLRGPRTEWPSELEFQPDQEGLPSPAGQEEGQSAFIVRNEASTGLESEQFPSSLLTRCSKWSRVQRATAWMQRFIGIVKKRIKKRRGSEIGGPPIIETEKAVTRGSKGNLEIESRRIVGQGLHNVPAKFEPDRSGTNEVITPEAERIGEMDPNQRMIKIEGKHLASLRACELREATWALIRAVQGQGSMTGSVKTEPDHRGIQRLISRIGQCDEPGLSSPIILPRKSRAGALIIDGIHERLHHSGVDGTLAEFLRGWWSPSARQQVRKVIGQCRTCRRMQMGAYSLPPMPPLPADRVQRRLPFESVGLDYLGPTAISDENGQRRKSWVLLITCLTTRAIYIEATRDLTAQSFIMVLRRFIARRGAPSRIISDNAPTFTIVGKTLADFGITNADPISFADSKGIQWRFTPQHTPWAGGVFERAVQLVKRALQKTLSGTVLNYDALSTILAEIEATINSRPLTYVNSTAGDPLPLRPIDLIQENTRLAIEPPPEPQIQAVQREPPHLQLARQWRDSQQRLEHFWKRWHREYLLVLRDKAGWAHPARRVNAHGTPQIGDVVLIEDKFHPRNLWPIGRIVEIKGSNEHIRSVMIKMANGRIWGRPINKICPLEEAPPKMAEMDDQADQAVQERHRDDARAAETRREMRDRDAPSAATKDEGDESEESDEKRGQEVGAVQPDGRANREIREDSSREEGPNDSDGKNGGEMAPQKSAVFEKAAEVPSAAQGKAGTLAHLHSAQRHEKKYLGDSSMAPSLLKVPTKFQPNSTRSEGGDRFGADGPQAVRAGEIGGEFPEAPAVEQHQNELEQTPNKPVEEVHDGKDVREVQAVPGAEQRKSARTRRNREIWSPERHVPRKRGVIKPKTGMALLIMLISIVGTFGCQPSIRSSGMDPNLPFQEGPKMPCTMECAKRGVIIMSGRELNKLEICCADGCWATMPKSTDVNYELPAEELIHGYHCHGKCWWGNNAPFNTTRRCPAKSECDLIQCAICWEQFANPRCFPRWTMTMVGIGMAFLLAIMGCICPILGRFWSGAAALGKAIAWGAKYPIRLFNWATGRQISPPTAAQVEIKLKRGARKARTRVRELQQQLQLSRRARAAAHAWRQPERNQLTVRGTVAAGLLPLLLLIGTTFASKPLSVTVRSEDCARTAKGLQCAGTAATIITLLPADQVNSFVIRTQQDELLGTVRLRLASITMVCVPKTESWLRSYTISTVAVKRCPSAGSCRDNNCSTMNSRVMVPELNELNHRPGHSMCMSSTSFWHNSCGLPSASCLFYRWAAVPTSTTVFEEFSCIEWDLQLSAWIEIETNNGKIETQRLILHPGVPEKWGNMTIAVIPTSLPPMPILSAYFISDGRAMAMGKPISSDLHCSDEEAARGFDKCQLAIGSCQKCAPNHENGTVHCHCRNLEIERVLNNPEHRLPLDVGRLHVHNKGPTVQAEFQYTPVQVQIQLNELELVSEYSNTKCWVGSPQLSGCYRCISGATFEAMCRTDYGTALAKIKCADGTMFGLHCGGNGTTTTESIPFDRSEIFTECQVKCPAGTTKFKLKRGACFHP

SEQ ID NO: 148019 - protein, 219 aa, Heterodera glycines
EDCARTAKGLQCAGTAATIITLLPADQVNSFVIRTQQDELLGTVRLRLASITMVCVPKTESWLRSYTISTVAVKRCPSAGSCRDNNCSTMNSRVMVPELNELNHRPGHSMCMSSTSFWHNSCGLPSASCLFYRWAAVPTSTTVFEEFSCIEWDLQLSAWIEIETNNGKIETQRLILHPGVPEKWGNMTIAVIPTSLPPMPILSAYFISDGRAMAMGKPI

SEQ ID NO: 148020 - protein, 212 aa, Heterodera glycines
MLRFRKSALNFTKAFAIVDQFIRAQMALPRGAGVSFVRLDRDDFHPLYQVYYHLPIEYQPTDSAEFFDIRPKCSIQLGILHWKTVFKAIGFIVLVGIVLGLMTYSYYRHSPSFRLFVHDLLSREHHAIQVSWRRTHEHVEVIREEIEEQKVDGNGGGGGASFLAEFANRAFSWKMERKDNDDDNDDEAKEEAADVNSQKEALAADEKGQQEK

SEQ ID NO: 148021 - protein, 45 aa, Heterodera glycines
MNNHTGVRVICKWVIEWGRLNGTLPVAPKTRNSATLWNSFLLSKR

SEQ ID NO: 148022 - protein, 109 aa, Heterodera glycines
MFKIFILLNAFLLIKFAITDEEQEVHGPPDVHYADSEKIEELASRAVDQINQETNNTFLFFPVKVLCAKSSRVAGINFELRVLVGQSNCAKNVYERECVAAIFEEFGVD

SEQ ID NO: 148023 - protein, 193 aa, Heterodera glycines
MSSSSKQENPIERMKHLLSSGEDADIHFLILSAHKLILKHASDVFEAMFRFDSQKEKTENASAVSPVEVPDVEPAAFKIMLSFIYSEDLSELNGDNAMAVLYTAKKYVIDRLVSPAVEIPIAQLRSVFEAFALTRLYDLEHFSHQCLRYICQNAAKLFKSEGFLQIDQNLLCELFDRDQLMISSEFEIWKAVI

SEQ ID NO: 148024 - protein, 51 aa, Heterodera glycines
MPLAMPLVKFLNLCPPLHERKFLNFHRQCASAAVSFGCVPIRNPSLGNFNG

SEQ ID NO: 148025 - protein, 74 aa, Heterodera glycines
MNPEVQAGLAHFSLLTHGFGGPSVQTVLETMVSVINECNGVLTRNCQSPINAAAATVGQQNAVPSVGIWSPFNS

SEQ ID NO: 148026 - protein, 125 aa, Heterodera glycines
MHGYIVGFTSSVETDQKELMCQNVISDVKYIKQQLATMNKCVAGGGAKIVREIDVQLTLMDPCAYALSFVRALFELAAKATGHLKSAKWETLSNNFTNQIDVVDGVGHSFNVNINKNVHFTSPAN

SEQ ID NO: 148027 - protein, 17 aa, Heterodera glycines
MVSLAWHRSSDQNGNSR

SEQ ID NO: 148028 - protein, 67 aa, Heterodera glycines
MPYTQLFNVLGFPALVCPVGLNGDEAIWTRNVCRRSQKNLAFGSLKSEHKNVSKRKSAFQYIADLDS

SEQ ID NO: 148029 - protein, 115 aa, Heterodera glycines
DNQRVSEHVIEKVRQERKEREGRRRDRERERGKRERERGEGERREKERKREREGRERERREKEREGRRREREREREEGEIGGNEREERERERREKEREGRRREREREREEGEIGG

SEQ ID NO: 148030 - protein, 36 aa, Heterodera glycines
MGSCFSGDKTDQSDSKHYVKKRGTDQQHQQKQALSA

SEQ ID NO: 148031 - protein, 80 aa, Heterodera glycines
LISSQKSCQLKTAKKAEFSKFFISIFFYSSKFSVIFSRLIEPVKSFRMISRLFDSVNNFKSYIDSKLAQTELARRSWPVP

SEQ ID NO: 148032 - protein, 292 aa, Heterodera glycines
MIAKLNIPRIKPGQPGKVGPAGDRGRLLNGAAPGRAGQMGPYGPRGTPGPPGKDGQPGGDGARGMRGPTGDRGDDGSQGPQGPAGMPGLLGEPGGCGHCQRGSTTAGGAIQAGQQRNNVAPVPVPQSSATNNEGRPVNAAVQMTNQQQQPQQVQQQQKQELQEPQPFRQHAEQSSSAALGQQGSDVQATQVYKAQAHAAPISSNMPKAAAQIGRPAIPLPMAPPGQLPPSTVMPTVTVSGKFVGTGYSNNNNNGGGYGAAVMAANQNEEMMEYLEEVQQASLTLNDIILYTN

SEQ ID NO: 148033 - protein, 69 aa, Heterodera glycines
MSMMLSNVQQCQHQSAKLWHQLITPDDAQLLSGTTERQKRRNGMPFEEESRSTGGFRGSCCACTQCVIL

SEQ ID NO: 148034 - protein, 41 aa, Heterodera glycines
MPFTFKDGSFYIKKASAWITENFYGFLYSIIVYTTFLVNQN

SEQ ID NO: 148035 - protein, 200 aa, Heterodera glycines
MKTSTGVELLTRNTNTDYQNTLFVSGSGLLNGACDVKNAKLKNLMILTDGVTIENAIFDTPGYGIYCKGSCTLKNIYYKKLCYHAVGLAYTDTSKSYTYKVIGGAGQGTADKYFTQSGKGTTIIQNFCGEAVNLNYGDTVLFSGLTLYGQSSSSTATKYACQNVNALTYVAQLFAASSFKPTESGTGSCTYKASSIKIAN

SEQ ID NO: 148036 - protein, 26 aa, Heterodera glycines
MAPRIRNFVQEFVIEGENFSKFEWTA

SEQ ID NO: 148037 - protein, 78 aa, Heterodera glycines
MATTVASIGLQLLILGTVVQLSYEFGCMHSLRAVGHTKGQPLPAEYKPLLEFVSADIVNERLRGCFDGNSCVTASCVR

SEQ ID NO: 148038 - protein, 99 aa, Heterodera glycines
MVVIENIRKHIEIAVAPATGAHETEKWMNNLDIASASKLFRINIIVCERLQERIFRWQLYSPDLETSLSNLSQKESTASIFLYFNDGHFELIKQPMKIN

SEQ ID NO: 148039 - protein, 459 aa, Heterodera glycines
LEWAQFPAEAELLEIEANGNEMRSIGTEDEARRGRKLRKLEAFDILLTKRGGPSPNFKFKLRRNHLANLAMDSLPPSLEELDVRENRLTEVTFGTAYELADTAMAQLKKVDLRSNKLSTIPRELYERFVVANAPFGELWVGDNPLECSCEMNWLLNASASAVGTAISRKQINAAKGGVMDIESAKCVVPLDGQRKRIIETTAFDFLCTYSLFCAIGCQCCQFNGCDCKGFANACFSCFPLGTESSRAEQQRIFRPEKAARVAPQPIGHSEDRAKRIRIAGQFNGKRTKRRLIGTQPLFIPPFVEQPTDAFQWQRMHRNRKHSFVGPQRKRIDRNGHRIGRSAAQFGDTSFSGQRNGGKSLLCQFASRFACGQSVPLRLRQRRTVGGGAAEAPADGRGPLAGGQQRARDRRAGDAMRGKCDAGEGTQRKHSVGQSVRVAQPRGRPPLLNANARVSARGEQ

SEQ ID NO: 148040 - protein, 74 aa, Heterodera glycines
MRQCRAGQSEPFQRVKTVKEMGTQTEERRHLGEMKQPKTGRGKEKPTRRGEKPTEENGRRGAILNKHTVTRAIT

SEQ ID NO: 148041 - protein, 577 aa, Heterodera glycines
MEGGGRLLAENFRLAFSRLSALIRRLKESPQLFSGCNDIIQEYLEKGIIEKAHRAKTTTFLAHHTVMGKKLRIVFDASSHEKGAQSLNEMLFSGPNLYPDLAGKLIQFRATKCPIWADIEKAFLMVSLKESDREFSKFLWVKNIFAPLSGENLLVFRFRRITFGIVSCPFLLAAKLQHHLEAFPSELAEEIRDLLYVDNLLLLADSPEEARRKSRSTEIFAAAKMRLCEFIVADPSSLDEIPENDRLQNEAPTVLGVKWTICEDNLSLTFPTVLSPDGLTRRTVLKTVASFFDPLGLCSPCLVGAKLFFQKLWDGSKSWDDPIPVEETKEWDEIKALWAAKMMRIARFTPRINTGEIQLHVFTDASPNAFACTIYLRAEMPQGILSSLAYARSRLRPKKTDGLTIPRLELLGILIGSRAVKFVHKHLNYEIGQINLWSDSRIALSWLASTDKMPIFIANRVREIRANRHIFRYVRSADNPADLATRPVTPDVLKLSELWWRGPNWLGKPENWPDELTVSLPPEESAISEPIVCAPTAMYALKFLSETGKKTAMYALKFLSETGKKRKGSPIRDKFSP

SEQ ID NO: 148042 - protein, 38 aa, Heterodera glycines
MATSMATAIADQIRLLWLWLRPFDAVQQKQRDDVVIAF

SEQ ID NO: 148043 - protein, 130 aa, Heterodera glycines
MPRLPKYSSSVCRTFSEPKVCSNKCNRSKGTKRANTTCYTTLPVQKLASFMDIPDSELDSFIGKLLTYKMIVTELGKETIDKTEGDMILIADTKVARRVSEYFIKQIGKLREISRKIKSSVTPVGQIHKN

SEQ ID NO: 148044 - protein, 69 aa, Heterodera glycines
MSSQNGTDSSLLDDGQWLDGHFPLHHAVFDNDVPRLGQLLKEAAAAAGPCTSAVCLATEVPLTIIWLIS

SEQ ID NO: 148045 - protein, 93 aa, Heterodera glycines
MSTKPIHFVQAKNFLNFPKWDKIDNYKAFLYHIKGMQLITMKRREHLSREDLERNKKMQLFFSSGKMPKGDDNTLEDINTEIPEHDPVKFSEI

SEQ ID NO: 148046 - protein, 80 aa, Heterodera glycines
LLSRILPSDTFKIYKKGHRLRFDFSLVDFNNNGPLPKWERGDVSLLLDILSTDGRKAVLMDNRKKVYQVLREKNQNLSDE

SEQ ID NO: 148047 - protein, 207 aa, Heterodera glycines
VVYFIAVQQQFVNGCMRTATTTISRTTTIASISTTTIPIQTTATTTPSTVTLTPTTTSTTTTIPTTTTTTPTTTTTTPTTTTTTPTTTTTTPTTTSTTTTTTTTTTTTTTTTTLCTACTATLVFDRQQGGIAAPTQPACPVTACPGGTNAEPLPRGTTPFDVQQNAQCANPCVCDAANVCYQPSGERNGDILVRLTTQCPDSCATTD

SEQ ID NO: 148048 - protein, 257 aa, Heterodera glycines
TAILAPTTTSTTTTTATPTTTTPTTITTTPTTTTTTPTITTTTPTTTTTTPTTTTTTPTTTTTPTTTSTTTTTTTTTTTTTTTTTTCTLKIIINIVPGLEFGEFALCTACTATLVFDRHQGGIAAPTQPACPVTACPGGTNAEPLPRGAAAFDVQQNAQCASPCVCDTANVCYQPSGVLNGNILVRLTTQCPDDCATTDGCTIQALVRGTSPNTRGCLARQGTTVCAYQIGSTFNVKSVSCNGCPNLDTLTCGGLIP

SEQ ID NO: 148049 - protein, 191 aa, Heterodera glycines
MRKMGDTVKCQQFVNEQAEQSGDVARVRDLQQQVNELEEKAKKIVIGRNSRVNTQMVIFEEHQRTKNLSAISAINQRNRDHMKQTFLGAGMVREEQEKDDDPFTRKSARMKVVSGSVKSKTAGEGSGGSVGISLFLLYNTFGSSQCRVIRYGHDGFFVGFVVVFVGVLSKQKSATSLNSRFIQRTWNRHKY

SEQ ID NO: 148050 - protein, 179 aa, Heterodera glycines
MNAKVKFIPESRKGQLNTQYLATLPGLLKIVELILGFVAFILAICARRSTNSAWVEHITFETTIVVSVLIILYVVFPHLTFADERTREGLIVVIWLMVHLSASFTAEGRGAAILGSILCLALCVIYAGEAYIKFKVWTNPAGKVQQSKSQAQGHNQVPPAPTHYEEKTIRRNEMEERAV

SEQ ID NO: 148051 - protein, 130 aa, Heterodera glycines
MKTNKRQKVSSSEEEFDPNQKDEDYDLLMDDEEREKFDKMTEKEREIEIYKRLEQREIMKTREKIKKKLEMAAGKKADGEVAARQKKRKRKMSDESNGDDESDEKDSASEAEEGLFYCAEHESDLIFDRF

SEQ ID NO: 148052 - protein, 98 aa, Heterodera glycines
MKKFLFLTIIILLLPNTHSSNKQRHRKQRAVSALARLTVALSRIGTYIKAHPYITASTILMEMGSVSLNIYLLIQEIKACEEKQILKDFFPFVLTLNF

SEQ ID NO: 148053 - protein, 52 aa, Heterodera glycines
MNQIKVDQEESTKLWDWPLQSHDELVSIYDGRDRWEVGLDTGFFTPNEIEAC

SEQ ID NO: 148054 - protein, 75 aa, Heterodera glycines
MQFGTGADPVLEECAFCGEKVLFGPCRKLCNDSGGTKRCKTEGERAQRQEVQEGQKMIGWNLQKLCDHSLIGKSM

SEQ ID NO: 148055 - protein, 49 aa, Heterodera glycines
MELSFYNRYGPRWYCSGSAGGCALTPVSEKDAKLKEKGMNTKKFKKAKK

SEQ ID NO: 148056 - protein, 57 aa, Heterodera glycines
MASVNGQTALFADHGRHFLHRFGGEHRWTSARITIGHRRWYGIITNAKILGPYEFEI

SEQ ID NO: 148057 - protein, 223 aa, Heterodera glycines
PWLRRCLFIGIGVAMCNQLAGVNSIMYYGTNILIEQGLMTNVALTANIANGAISVLATGLGIMLIGKIGRRPMLLSGQIGTVLAHLAIGTCSLLMAKGMARPFVVLSLTVTFLLFQQCGISPITWLMQSEMFPLRIRGLAMGLSTSILWLVNCLLTFGFPILISWVGMTATFYAFAVIGCCAMLFVFHFMPETRRKTLEELERQFQTKDIKALKKHGPVEGAD

SEQ ID NO: 148058 - protein, 99 aa, Heterodera glycines
MDNSTIATDPQTVLNSPVLQLPDYLPYLELCLNWIALISHGITALTMGFLVLIKINKQDKLCLFREFVTNIMYYFSLKHYKSDQIIERQRYDSKKSDEL

SEQ ID NO: 148059 - protein, 47 aa, Heterodera glycines
MSFNFKSAEVHERLIPKTKSDIANMKFYTDPYIFKRVLIFISCLSWE

SEQ ID NO: 148060 - protein, 59 aa, Heterodera glycines
MEVDKPMASPRMRNGNISDCISQVIGEMPHCWNRRKVTKKLQSCFKNMVYNFAKYNEID

SEQ ID NO: 148061 - protein, 750 aa, Heterodera glycines
MNKEEWNNEWKVQKIFREKHDYLKTIKEIDEILDTLKDVNLEVKRRLKLLKAKSSSDSDLEDESNDYEHENEDEVEEQEEEKEYESDNEDESPELSLNDQIHHDRTPFVNYRSRIKLPPQTLTHFNGKFSQWPSFWDDFKSSVDNDPNLENIQKLKYLRGLLHDEPYRIVSPYPLTNKNYTIVIKLLKSRYGNPQLIRENLHSELRNLKRPTESTIELRRFILLIDRIILQMKSQGEDINHPQIKQSIETKLPYNIRLKLKEKFKIYSTKEIMEFLNDHTQAREDIERMEESNRQIRNFPSNRPPQNGVQRQFYPNFPHNQMKPNPRNQQNTSSSPFPYTSAFTTKSNPVRLAQFKSNPTQTRTQNKIFCRFCERENHASKECKIYSTPEKRNERVRELKLCLNCLNKGHMVNDCKSTYLCFNCKYKHNTLLCTRKQTQYKPKEQKTRVNMAKNYENHEETQTFMTMDYDKNLSNYEEEELLMTAEVNCINPDKHKVKKEIILFDNGSQKSYITEECAQSLQLTTIEEKLLVISTFNQNKPKIIKSRLVKVGIKTLKGEVEYIILQTVEKITDVTKMVNKENVDVLGVKIPISHASPQILIGIDHYWHFMLPNSQIQLLPSGFYSINTKLGKILSGKGTIEDTNCNSVTEKRKKDETNQILQKFWELENIGIIDSPHMTDEDAAMIHFDKNVTFKNNRYHVRWPYKRENPNLLTNFGLCMGRLRNVVKQLIKNKQLDKKDRICKNKWILM

SEQ ID NO: 148062 - protein, 181 aa, Heterodera glycines
MDTLDGWAKDAAKLGLGQAELGAFNALREVLSSSDSKQILGMAANERGIDGADEAARRRLSTIKGGVDSPRVRTLTELPKITLRAKKKLWSEGYDKETSSAEEDQDNAKRRVKTVLAKLEEGEESELFEKITPTDYKRLARLDDTFTTERFEDILTDLNGKSVVELPGGLSLALKDAAGCE

SEQ ID NO: 148063 - protein, 87 aa, Heterodera glycines
MRFLECAAHVQPYEQGEGAIIRRRRDRRRRRGNGQRRFKYAFWILITIKSEYVANSVILLCQRHGLFSDVTLPTINQRRDVESATSP

SEQ ID NO: 148064 - protein, 56 aa, Heterodera glycines
MSPQLQKASIVRHIERDHPGRSSEEFDYNYPAFSRKIHHKLAECFPMRNAEVSQQF

SEQ ID NO: 148065 - protein, 58 aa, Heterodera glycines
MNKRLKFADELAQNRMARAAYDTLCSFYKLAESKINQAYVEERIGPVWMNLPLCCVRK

SEQ ID NO: 148066 - protein, 143 aa, Heterodera glycines
MAGGKGKAGKDSGKAKSKVISRSARAGLQFPVGRIHRFLKKRTTSTGRVGATAAVYSAAIATAAVYSAAILEYLTAEVLELAGNASKDLKVKRVTPRHLHLAIRGDEEVSERVRHPGIGAKKFLNRLGTFAVGGPRKNAKGGT

SEQ ID NO: 148067 - protein, 177 aa, Heterodera glycines
MSRVLAITEFSESHTGKNIALKIEDLLLKWGIPKERVHAIISDSAANMKRAFVERDENENRILPMPNGPCAAHLLNLAVQEALKKDESISSLLAKSRHIVGRFKHSNTAFSELKKIQKLLDAPSHTFCRWYVSGGIVCLQLIKFLKRRGHISPSEAETMIEEMKNIQRQPPIFFQSK

SEQ ID NO: 148068 - protein, 179 aa, Heterodera glycines
MNNTTKEGIEVLRSSDETNDTLFHLLLLSHYAFAFPVFLLSICLECQSNEKPKYEFKLTKGTVKSLHTHLHCFHENSEFSEKLNALESKAEKEKQKQKPISDFQSSCGPTFSDSQLSSFDKKILHFLVTKNISFGAVDHQTFHSLFPHQKVKSESFYRKTALPIVYQRVRHKIKDELKE

SEQ ID NO: 148069 - protein, 176 aa, Heterodera glycines
KAEREGKAKEKPKEKKRKRKAKKSQSKRKGKAKREGKAKEKPKEKKRKRKAKKSQSKRKGKAKGEGKAEGKAKGKEKRRKAKVKEKEKPKGKEKRRKSGRKSRKGRKSEGKGKGKEKEKPKGKEKRKEKPKEKKRKRKAKKSQSKRKGKAKREGKAKREGKAKEKPKEKKSEEKPK

SEQ ID NO: 148070 - protein, 85 aa, Heterodera glycines
MHLEVRYCAIGQIFMNGRCKHPQSRYKRQGVAGSEQCAAVWPESRCEKSRCECPEDVNGIPYVQSKTRDGVVCILHSGEDGDPVR

SEQ ID NO: 148071 - protein, 290 aa, Heterodera glycines
GNGTGAEEGMGDKGNGTGAEEGMGDKGNGTGAEEGMGTTNGEWHGSRGGLNGGQPMGNGGSRGGLNGGQGEWHGSRGGLNGGQPMGNGTGAGGLNGGQPMGNGTGTEEGMGDKGNGTGAEEGMGTTNGEWHGNRGGLNGGQGEWHGSRGGLNGGQPMGNGTGTEEGGGQPMGNGTGTGGLNGGQPMGNGTGAEEGMGDKGNGTGAEEGKWGTTNGEWHGNRGGLNGGQGEWHGSRGGLNGGQPMGNGTGTEEGMGTTNGEWHGNRGGLNGGQPMGNGTGAEEGLTFPLNP

SEQ ID NO: 148072 - protein, 218 aa, Heterodera glycines
MTHFQHLQQQVHLLTQKLEDEEKRANILAKTYGDTQKKLARSEDNFELNNELERWRNMKQSSVTLDDGLEVWDNDEENKTEDEEEMRELEEQGKGKTEQEDEHMELLQREIDNLLVAIGNASLFSQIQMNHFLKTDSGTFSSRSCDTNGVNYCDQNNGTTVEESGSAIGPFDIFGGFSPFIKASLSRSQSESKPTNSFGSLAIKPPTLANTHCQFNYN

SEQ ID NO: 148073 - protein, 170 aa, Heterodera glycines
QLRMIMPQPSVVSKKNSPTSQNDKRMDKLENGETNTSSLCGDEEEKPAKNYLHKTQICLFWKAYVSGKSRTKCRNGVNCNFAHGEKELKKLDPFYFKTELCEFWNLDEPCPYGDGCNFAHGPDELRQMGVKGPFPLRFSKFDLFDPSNFQKPLASYGKPVEQKVTIINGH

SEQ ID NO: 148074 - protein, 39 aa, Heterodera glycines
LLTLLQAHNAQILEEQKQRRSAEWRGEQRGGQGKVIGWQ

SEQ ID NO: 148075 - protein, 131 aa, Heterodera glycines
MSIDANFVLNIHSPTTTTNKREKAGGSNSSRSASDGTNSLNSAAFTVIRTPTPAEQQRHQQKDEKQHQQQRDSRDSAKNGDDDGGTFMERSESDNSTASVVVEHFPHQQQNAKSRQQPPNIGEGSKVKKHF

SEQ ID NO: 148076 - protein, 19 aa, Heterodera glycines
MFVVIFVFVVLLFIVLAKV

SEQ ID NO: 148077 - protein, 69 aa, Heterodera glycines
MGSLKGGGAAKADGTNWAMTGKHQQWHDRPDIVCRLFIGKRDELLNALNKKMILGYITAWFFSLEFQLR

SEQ ID NO: 148078 - protein, 131 aa, Heterodera glycines
MLLTPLFLLVMAFMALLVVQCSSAAAGDVSPALDNQEEKRVLSADESGPLQNFRTVLEGRHKRSLMGRYRNSTGRKRNSNGRNRNSTGRRRNSTGRKRNSYGRNRNSNGRNRNSFGRGKRSPMAFPPAADK

SEQ ID NO: 148079 - protein, 91 aa, Heterodera glycines
MAYLKWKVKKSLMIIKKEIKWLSFGQYAKHRAVIDSQPITLSYASMEDIFRGMGGLDTYNLCKFNCQDWSREFMANAQFSNATITLKFIVL

SEQ ID NO: 148080 - protein, 170 aa, Heterodera glycines
CGRSTKSSVWAFHKKLSVGVPQKAQCGRSTKSSVWAFHKKSSVWAFHKKFSVGVPQKAQCGRSTKSSVWAFHKKSSVWAFHKKLSVGVPQKAQCGRSTKSSVWAFHKKLSVGVPQKKLSVGVPQKAQCGRSTKSSVWAFHKKLSVGVPQKKLSVGVPQKAQCGRSTKNAQ

SEQ ID NO: 148081 - protein, 207 aa, Heterodera glycines
MNKTFIFIFLLFRFEYSTSTNSGFEEFIKNHKAIELVKSYQNKEIKTLKKLHEQMQLKGIDLSFCTLRRYVSRLTIVSAHTNKNDASNSNASSHEMPKHELRFEKCFSKTLRKNVFIIGNESAWRKYVQTNENNEDIYISCSKCRYFREQEKNVNVKSIVASAVLRQGTQLVMLQSNHNANCKPEKLEKLEAEQVDREQRRENYKFL

SEQ ID NO: 148082 - protein, 90 aa, Heterodera glycines
MPKVEFLIGHLILNCSAGSFNLLKNLSEKRTYYYIFGGQGRFRVAIFAWGRFRNKLRSHFIVSGNTKHIYPKSLISNVNMFMYNHNIKHF

SEQ ID NO: 148083 - protein, 30 aa, Heterodera glycines
MKIFPKDSFPKFLFLISCNCKGEMNNEWDL

SEQ ID NO: 148084 - protein, 326 aa, Heterodera glycines
MVLAEPARVGPGDGRAVLLRVAERHIGGHGEHFGGWGCHWFQGGGWRCRWHTATAEPKRRRCGHCIRRMPVPHYNWNFAAAVPTSTTGTRHWAAITQPAEVAPSVVGIPKLTRTPDDVGHAHTGEQNEQRVIWGTPNKFNPYSNSNCHSDGLGSSGGGGGLNACAPTSFLNIVGAGRLFKRQMCKALGQAPGIVTREGIAKGVRGSLTTADSPKRQLCIFRRPAAATASTSAAVLPLAGALVAAAGDHRHNNLCVILEKTRKTADTTVEAYLIILPIFLQFRLYEPVHRHLPCPARNDQLVAKAELLDRIRSADELAQNQMAAAAG

SEQ ID NO: 148085 - protein, 120 aa, Heterodera glycines
LGQQQLALTDGSAVAMDHLQWETIREWVIKADTVPRLVDSLIDADGQMDSKQQQYLDLECIWNNVWSKNESVRALYPPAVYVSLKSFMVGLLCREDNRIMLDGQSPAQPRNVWINQNFLN

SEQ ID NO: 148086 - protein, 32 aa, Heterodera glycines
MYVVNIRVRHFAKSLDNMDSMLDLDFEYGLDP

SEQ ID NO: 148087 - protein, 202 aa, Heterodera glycines
MRQFAPSMLIDCPPLRCVSFEGDILPEFPPDDSANATDGQAVAKWLFSPRPDGVPNLLHCHDFSVPQWSSRMEQIKTAFSDASSHVCFIIYFEFSTFPSLDFVVPFELTNALTGEQLTLSQYYDFDQCFVLIRCPIGQKEMALEQFKKAGTSRGSRIFIGIGADGLKMGEQFQKIFGFNFLSFFQTSQRFPWAEWSASERSE

SEQ ID NO: 148088 - protein, 45 aa, Heterodera glycines
MAEWQKALGIVEKLRAQLSQRQYVTVRVLLLEERFKELIERGERF

SEQ ID NO: 148089 - protein, 168 aa, Heterodera glycines
MYFLVVFLATDAELQHFALHFQDLLLLLERQRHPRVERLDRLKELRKKKSQYYRMSDLTTPSPEVTTDDGTTPQSSKAAEKTGQDGCNSAAASVDDDLACAQMVLSPAFENISEDSSSPTTDSAHIVDAHAQKVVFCDSEKYSGVSRALITNLTPPCHKNNLIYDFSS

SEQ ID NO: 148090 - protein, 123 aa, Heterodera glycines
MKKHVTFTPSIGDDVHSTNVSSVAESEFSVKECAEVPEIFKKLADDAFQILPLPDIDPTVTSTPAVVNNLIEAVESLDSRMPLAFQEQQQILKMQSEMLQLGVSCKEHYKKIHEQSVMRYNLE

SEQ ID NO: 148091 - protein, 72 aa, Heterodera glycines
MNDRQFFGRKHGTVHVDGQTVVRRVERAQKGGAELVVVGLDEGGAGARAESAQVGGEAGAKSGLKRAWGRTR

SEQ ID NO: 148092 - protein, 280 aa, Heterodera glycines
FHSVRKAIDRMAAKTTLGSGFPSDLGGLGTGTGTTFVQPHNYQFGTALLGSFHSSDDSLSVNMNCAMFAPEELTVSVVGNQIVVVGNHGEKQDSLGSIVARYRYRYWPKSVFLQSLESLSNSAKLLPEEIFEQNEELFNYRIQCMLTFILTIISIRYVKRSTEWQQRLANLRYSGFSPMAPLVVSFVAFFNFPVFRSQGPSTSVETAPEEVRHQRDRNQHLLKAVCDGTVVITREHCEVNPKNEWMYAQYAYRDFENIYKLTFNVIPRRMSNTFKLISEE

SEQ ID NO: 148093 - protein, 138 aa, Heterodera glycines
MEAPNSPMASAQNRGHGVDPSTVSADLNDICGDTDGMANEEEADDSIVKEIVTALLSGGPFPAAEENDEQSQAMEQQQTNGTAMDGQSPNLVEKSWSAVAICIDGVGTGATAFIGAVTKTGATAVPVRRGQWAKRREP

SEQ ID NO: 148094 - protein, 248 aa, Heterodera glycines
RRELPSFVGCFSLLISFRNQLEWAPPMRIIAVITLLASTLDLMADFLLCSRLAEYLHNFQTEFARYCALTEFARYCALGYFFFTGVSILVYVFEMVDVCLTLKYDEENVFFARMAKSMVLVLEEVPLPALLYLLFTSEPRLSLANPMHIASWIKLITLSWAIVKFAKLRFFWPLLPFNPKHDKRENIRRCFHLNHDKRENIRRCFHLNLYRMTMIVVNAFHLLAIFIVINNLVVSRRGGRSIQAQSSL

SEQ ID NO: 148095 - protein, 98 aa, Heterodera glycines
MSRGTSRSRSEFGISTTLGCPMMQKKSSHRQATRRHQRFTWHLTGSTDRGRKFRDHQIIRGANETMKDGRNDQEDAGLSVDDDVELYAVGDDDEFFVC

SEQ ID NO: 148096 - protein, 27 aa, Heterodera glycines
IWQHGKSYSELIAFSKPLNSFALLICT

SEQ ID NO: 148097 - protein, 30 aa, Heterodera glycines
MRCSDHHEGVIGSSILRFEARLFPLIFGHL

SEQ ID NO: 148098 - protein, 31 aa, Heterodera glycines
WRPHKVSKPRNVQKSKNPGNVQNFSIFINTK

SEQ ID NO: 148099 - protein, 96 aa, Heterodera glycines
MIMIDYNRHIVSDSKLGKMNNTTKEGIEVLRSSDETNDTLLLLSHYAFAFPVFLLCWFIIIKFLKRRGHISPSEAETMIEEMKNIQRQPPIFFQSK

SEQ ID NO: 148100 - protein, 338 aa, Heterodera glycines
MAIRQHKDLLFGGKTVIFSGDFKQSLPVVPHEGLTAQVTACFQTSPLFGQFTTMKLTINQRLGKGQQAYLQMCRQIGLGETGEHFWIPRQFLVKSKEELIDYVYPNFQQLLGNDKELLNRLILAPHIDTCDEVNDIMMANVPGHMREYLSTDKPLDDRPLDIDEIESEVAALNRRTDSGMPPHSLRLKVGCVVVLLINKSDKEGLINGTRIVLEELGDDRLIGRVINSNAIGGQVKFFLERTRNVYEDKSPGGIKYERLQFPIKPAFAMTIQKGQGQTIHTVGIDLEREVFSHGQLYTAFSRATDGNNVRVHAPNRDVDAQGQAKVLNIVATNMLKLQ

SEQ ID NO: 148101 - protein, 159 aa, Heterodera glycines
MFVLLSCVLPISSSLLVSCYLLRLMCYKRGQQLRTDSIQSNSSSQRTVKNANFVPLAPAFSHKLRSLVFIFTTTVWTAISLLPFRILIIIRLNFIDAISLLSNCELLRFMVIAAWILHYILMLSPVINPFITAIIYHPYRVTFVKQLSFSGSSIRSTQL

SEQ ID NO: 148102 - protein, 45 aa, Heterodera glycines
MLNGTYHLWSRPFAILDDDEGIWPISGPNDCTIEKLKVRKMRMHF

SEQ ID NO: 148103 - protein, 333 aa, Heterodera glycines
VEVNIGPIGGNVSAQAVRQVHGRVFSKLGLSEDNLPENRASTAIGEALVKAWELFEDPSAVVVIMSIKNNHGHFALRHIQYEIEQASAYKIKVIRLTLAECDEKLILDPNDSSLRFNGRKVAVVYQRTYLSEKDWPTEKHWDIRRKIERSTAIVTFNVNIHLAGSKKVQQTLALPGMLEQFLPDVDEGMISSIRKTFADLLALDKEDEATEAVIRKAIENPENYVLKTNRDGGGNNFFGEEIAKKLSGLPLDERSSMILMEKLKPMEVKNFPIRRLRDHTVRNMVSCQQLSMSSELGIVGYFLGNGQTMATIANVQQGHLLRTKFAESNEGGV

SEQ ID NO: 148104 - protein, 72 aa, Heterodera glycines
MPPGENIGGIHPPAKYQLPKDYGRDEWVALAWHFTFFLAIPKGILSLNILVNQPVKLRTKRRSDQTGRNLSK

SEQ ID NO: 148105 - protein, 102 aa, Heterodera glycines
MPLVSTGHGNHRFRWCQTLPPAYFVIPANVPLERPIYDQNDSAIEDELAEEAKAKRAQTFVRFGKRAQTFVRFGKRAQTFVRFGRDAQRQQEMANEQAQKKE

SEQ ID NO: 148106 - protein, 317 aa, Heterodera glycines
LSPSRRCGGFRGCVLSVPSAGLCPYESAHLAQTYTSLCILLILGDDFSRLDRRAILRAVADSQGADGSFFDGDRSNENDMRFLYCACAICYLLDDFSPINIPSLLDFVRRSVSYDGGIAQGPSLESHGGSTFCAVSALLLTGHLWDGSVLDSAKMERLKKWALMKQEEGFHGRTNKLDDSCYAFWVGATLSVHAQRPPLGGLARFAFFSAPCSGRDHRRLSPGRRLGPLRPFAHVFLIGCARNFRRTAHSSAVRSAEHFRTDLRTLATDSTPMARRNGDGGGKAGKKKMNGGKAAPKTDRLTALFSPECLKIESNFY

SEQ ID NO: 148107 - protein, 102 aa, Heterodera glycines
MPLVFDRPWQPPISLVPNPPPAYFVIPANVPLERPIYDQNDSAIEDELAEEAKAKRAQTFVRFGKRAQTFVRFGKRAQTFVRFGRDAQRQQEMANEQAQKKE

SEQ ID NO: 148108 - protein, 19 aa, Heterodera glycines
GPGSRSRVLKSSGPGPGRA

SEQ ID NO: 148109 - protein, 106 aa, Heterodera glycines
MNKSYNYSSYLQKSFIFFLLNFSIFLYDLVKKKETTKYQKNVNADLFRPLVDIRDKILYLAIKYFGIDKTENEGNCSMVQKSNSLNLKKRINDEFKKLIRTTSDKV

SEQ ID NO: 148110 - protein, 216 aa, Heterodera glycines
MKKLVQKAMCVYASIEGAMQKSEKEKLNKMLNKEKEANKNKENIQRIGEEVDQEVEARRKALIKQENVREYHIDQLLLDQQHAVADHQPQQQPLAVMEQGESSAIKEIVAVGEDGAGKKANQALITEQQQTENVQAQAEQNSNGKKKLHRRNTLKDIFEETKSDEHIVDQNLSSKRSDSIKSEAISQELTKETNKPENERSNSLRMKLVETVDTKC

SEQ ID NO: 148111 - protein, 57 aa, Heterodera glycines
  unsure (1)..(57): unsure at all Xaa locations
LSGQFGQKVTXSESKXAEXXXXIGHVPINXPKGVHVQNVPNSESVISMPGLAGSHTQ

SEQ ID NO: 148112 - protein, 81 aa, Heterodera glycines
MNKILFLFIALFVVQIIAAYEPSCKCPENEEPGQKSCNGYEPSCDNPKPEICTARFCDCSCDCVKELFRDKTKKCVPKCPY

SEQ ID NO: 148113 - protein, 104 aa, Heterodera glycines
MRQRKPESTPRPNKLPNAPDKYRPVNAAPDNHDQIKLSAGQLGPTKWIPKQTKKKTLGKPQNNNNGNAREGHVDLALAEANEGQAEEEVNEVEEEEEEEQQIGY

SEQ ID NO: 148114 - protein, 79 aa, Heterodera glycines
MRLVILMGQMQRLAKFCPNGCTFRGKMGCRSNCVAKILTNKRTLALVMTALGLQVEGYAGKLMKTWKIQPQISIRIYLL

SEQ ID NO: 148115 - protein, 116 aa, Heterodera glycines
TKLLQEWTLSHFTDNSTDLNQLSSIDSFGLLPYAFGDFDGPNATAGQVLSKWLHIPRKDGVPKQLRCKDFNEQADFGWVNILKEVATRDGPCHHFFRHLPIHFTVHAPSMPIMPFE

SEQ ID NO: 148116 - protein, 138 aa, Heterodera glycines
MILHEEEGELEVLRDEEQMYKRMARGRNDRGMVAWEMHLCTPDAPLGRKIVLIANDITFQMGSFSMREHRLYQKASEYSRKHQMPRIYVAANSGARIGFASDVTNRLKIVWNDEERPEDGFNTSRWIVGEGGSDILSP

SEQ ID NO: 148117 - protein, 419 aa, Heterodera glycines
MINLSPLTKDDYARLVNTHPTKSAYDPRTILDSDDEGLFDRGTFDEIMSGWAKTIIAGRARLRGISVGVIAVETRTVECELPADPATQDSQARLVQQAGQVWYPDSAFKTSEAINDFNREGLPLIILANIRGFSGGQKDMFEMVLKFGANIVDALQTYTQPIVVYLPPFGELRGGAWAVLDTKINPTCITMLADPNCRGGVLEASGIVEIKFREKDLLILLRKCDPKINQLEESLATASDPTAKGQLQDEYKRRIEKLLPICRAAAVKFADLHDTTARMLQKGAIHDEVPWQNARNYMHGLISVHSTKLQMARRYLDAIGRGTTNVSVDELAIGLQWVDEHLQKTDVQVRREVKPEERGTNNSSKRTRFIYFDEQISKYADGDGFRKALAAIRQKSLLERLTALSKEERDQLILVLSEK

SEQ ID NO: 148118 - protein, 38 aa, Heterodera glycines
MRGIASKFLSKFSGAIPRLDEFADCRLADIIPITDQHF

SEQ ID NO: 148119 - protein, 95 aa, Heterodera glycines
MVKTLWIVRHAEREDNINSNWQKNANPQKLKSDNSPLSSRGIKQATELAERFSNVQIDHIFASPFERTVQTATFLISQRKIPIKVEPGLAEVNPL

SEQ ID NO: 148120 - protein, 420 aa, Heterodera glycines
MGLRAPTQFDDFSRNFDVYTAEWPEKKRISALESKVYGRAERAFEAAKATQPFQYALIRRDMLNQLEETDATQLNAFDELMIGVKRGANETIDALANRISGLVRRAYVGLGQHLCDEYAIKFLIRAMASPELALNLELARTQGMNLNHFVSLAARAESTQKAAKRFTNPNPRNVDRMDSYDSHGVPNQQTRNFSSRPANTFQRQYPNSLKCYNCDQPGHISRNCPRNRQPFSPPQNFERQIVSNFSATGANRVPLNHPFGNNQNQDVKHHNPSRNFLRQNCVIVQEEVPHLNVRLGKVDLDPEVTDFFDKLGTECSKKEAVAYTIGKVMLVIEKHLNLWEAGFCNSCPKISDVNGKLLECLGTVSIPVHRKGLTEPKLCTFNITKAPIGFNLLLGTVPFETVKPERKDFSKHIESVFHRI

SEQ ID NO: 148121 - protein, 113 aa, Heterodera glycines
MPNIPSHKISFSILIVDNEFANGTKYFFHFQCASRLTNNFYLEKKMGEKNGQIEFMDEICEDNLYRIGVMVTQNTSLPLQFQIKPRRNFVEALNLLGNFASGHHQQHTEEVLN

SEQ ID NO: 148122 - protein, 38 aa, Heterodera glycines
MKANGQNGRMKRTIGEFVISGIKLAFIFMMASNNSRPK

SEQ ID NO: 148123 - protein, 108 aa, Heterodera glycines
MSDRRKEAEEKMEKAIFISADCWLCVFDLLPTSQLGLGIALISHRFDLYIDEHFKTRKWTLKSIQIDRKFGKNGTKQMEIINHYWKPLPIPQNPLPKKIVGFKDISIE

SEQ ID NO: 148124 - protein, 40 aa, Heterodera glycines
MSDNGKEAEKEMEKAIFISADCWLCVFDLLPAYHLASELH

SEQ ID NO: 148125 - protein, 148 aa, Heterodera glycines
MIHNQHCNGVPLEQLTAEQIDRSQRRDLAQCSTDPKSIWREGSDRSREHDIAEDIGVEDTTGIPFNYPNWQTVRSDAPIEYPVPFDFVSSEYGPGEVISILGDGNCGWRAVSVAMTGTESNHAEIRRDVIEYLQETINQNSYTENSWW

SEQ ID NO: 148126 - protein, 42 aa, Heterodera glycines
MLKNYVNKYMQFDFVLYAYFYEVRVNRRNLTAVFFRRVGPLK

SEQ ID NO: 148127 - protein, 119 aa, Heterodera glycines
MSANCPWFPPQLVSISPPLSLPLLADSHQIIGAKFGAILRHGNFHDKFALFVEQPNRKFLCFFANSELHSQHFANFRCSFNGKLRIVSCNPTMLGNSWQNVGETRFGRFIRIFSGMEEL

SEQ ID NO: 148128 - protein, 122 aa, Heterodera glycines
MNHKSLIIFVFLTAFCSFSYQIEPEKVVYLSDATKNYFNTEYNAMDQCFKKESKQKKINSFLLKFKIIGKCNKGMLICYPGALDAEQSKFSFGMVPEKQFRIQNIAGVIRTNCTQKFDHLTN

SEQ ID NO: 148129 - protein, 289 aa, Heterodera glycines
VSIPCHLPASRRDTSLGISEPLNGTFSPAEVSNRVGLCKSARTPKLSSQMKSFSLDCADFMPASPPVQPKNGGIRHNHYMHKPPIRSARAAFVSSGGAQMATIVPGQFERREKRTESACGAGANGSAVVVGTVRRQRRLPPVPTQKKENAQTAPSEQPPIQHTAKLLISRPQLLHIVTHEYASSECALRPGDRLVVVYNGDPDWKHGFKLNDRLEQLITFPSSCVASYKAEEQPMRLLQSCNLSDQKLRLYRDQVVFAQPDSLSKDGKVMVRNEHDKFAKCPLQFLSLA

SEQ ID NO: 148130 - protein, 57 aa, Heterodera glycines
MTMFKELTNRQLVAIVMLAISNLCSTVVMHVIGSKWMCIAGLQIASLAAIAFGYVVS

SEQ ID NO: 148131 - protein, 57 aa, Heterodera glycines
MCAPHVYFFLDGYCARRCYFRFAWRHFVGSHLNAFCNGGRKKNNELRDCLLKKDALM

SEQ ID NO: 148132 - protein, 108 aa, Heterodera glycines
NKYFKTEWGCAVSQDRVSINQQIGEAVKAEVDCEAMFGQKDVDFSNENFTIDMLEVETTTTTTTTTTSRQLEVITTAQPTTTTSSSTTTTTTTTTKPTIEESTNSTNG

SEQ ID NO: 148133 - protein, 147 aa, Heterodera glycines
MPKQKTVYEGGTEENPLYLTFTYITFILVSEQTASISSKRRTHCSDQSRKTACYLQILSAYRYEKTEIEQDILSSYSNSGVDERNKYWNNWLNAFKCHWMEGKPESGCCAENYNLIRHTKVLAVMISNFKIDSRIKKCLPKRQPDTF

SEQ ID NO: 148134 - protein, 57 aa, Heterodera glycines
MVNYLKYKGDRKHLELVKLYQELRLLKSPILRSYRILFFPSHAPILQLAQLLTECFI

SEQ ID NO: 148135 - protein, 1123 aa, Heterodera glycines
MQNQPPKHPSLFSIDQILSAPSKKPRRGFLINELLGEVLQEGGGSSSSSSSKSTKEYVKKLDSTIEHVPRFQYSKIKSRFSIEDVPAANPEGLLAGIFQYCLDAAMEESRGRGIEPTHLGCMISSPLLTGGDIPIPVRQITDNTVNTILNQFTKVAQSKQQQNVTLWGEPFTVVVTTVDRTGLPGRRVLKGGARRSLAPVHHRVTETCLIKICNPDGHCLFYALQATMVAKTSGWPRWKFHRYVHSLHGQQGCLRRDALQLMQQIGVRTGRNTYDAEICVPRVVDHWNNTQQQHRFAVFIFGSSGQYKPLYKYINDHYDTPIVLYLNNQHFDGVQKLHGLFGQPYCLDCEKPYERPSRHLNSCKARCLLCSRVGPAFPCVPLGGFFHQCAGCNKKFRNNGCLQHHLASNFCAQSKQCKDCGVIWDTRVHNRDGRKGHKCHESYCQLCNTFHNPERGCFIQPIEPKEQDPYHIVAFDLETMQHQPVDPQQPEKREHQPNFIAARVACPECIESGNWRRATAGCRFCGPHRTVAFCQRPFEDTRVDKRVVADNPLQAFVDWLIFQLPAKYDTYAYSHFGGRFDMGNKMYEMKVRKQKRRNPNIVFRDSFNLMPCALAALIPSYGLDVEDKPFFPHLANRPENYGREIHPTPEDYLANGMMPSKRQKFDEWYAAHRHEPFKLDEALASYCTNDVEILMAALVAFRREFFEISRRQDYVDGIDDKENHDGIDVLRECMTIAGACMRHFRTNHLPDEHLAIVPERGYDNAQNQSLLALRFFHWYAKEHGVQVQTAHAAEGEKRIGPYSLDEWIEAERRAIEVNGCTWHGCKKCYPNDNMLLPSGKTAGQVRERDSKRMEFLREKVNRVDVYLECEIHRMLERSKEMRKAFEDYVDDGPLVIRDAFMGGRTGPLKLLRKAGPGEKISYYDFTSLYPYINFTTRYPIGTPKVHVLNQEVDWRSAADNPYPLALLKVWVVPPRRVDVPVLPVKVGKRLCFPLCITCAKEHPTGGVDNDYHCEHNDRQRGWVITCTSIELNETLDEGYTVTRVFRVLEYEQSDDKLFRPYIAEFMAQKIQASGFDNSIRGDAEKEQQFVRECAEQFDITIDPTKMAVNKGKRSLAKLCLNNL

SEQ ID NO: 148136 - protein, 68 aa, Heterodera glycines
MENELKESRHLNKISKLEQQNKELREKIKHCGLVAELNVLQEKVAKIGEEKQREKELTKYGRNYQTLL

SEQ ID NO: 148137 - protein, 91 aa, Heterodera glycines
VAFLTQQKIEQLRWAVLPHPPYSPDISPCDHYLFRSMEHFLRGKFADQNEVENALDDFFVSKNDQFYKKGIEMLPERWERIIDQNGEYIID

SEQ ID NO: 148138 - protein, 146 aa, Heterodera glycines
MYSILLNNNSSRIFYYEISLKHLKGWAFFGFALRQQQTSKDETIRYSTGTYAYEKNGELWINGKRKEGSDGYSYGVGDTVGIGVNLSSRRIIFTKNGRQLDNSELMATSSCADCFFFPFVTLSLNGAGDKIEANFGPNFRFDLVTL

SEQ ID NO: 148139 - protein, 332 aa, Heterodera glycines
MENELKESRHLNKISKLEQQNKELREKIKHCGLVAELNVLHEKVAKIGEEKQREKELTKYAPIDAFEAIFGRIGEVEKKPATKGKYGKRIYTQDTWMFESTSAFFQILSDWVGREKAASSDTTAQVEIELTEQTFADCREAIKGFVHHLMCTISIIICLIKALGIFSNTDPKVLLRRWRSGYRKRHPEATAQVQCGVFVIDGEQMDEQEKRTCVGQRKDQKTLLDRIDELEGQLKSLQRQQEDETSKYVSVELFNEMQKDHNELLEKFNALEKQMNELQQNKTNECCWESVGTSGGCARTQGHFTRKGDLVKGKEHLQPQVERGDNLISDRI

SEQ ID NO: 148140 - protein, 242 aa, Heterodera glycines
MALLSDRFDVLVDKHFDGKSELTIWRAIAIRKDKGPKAKLSVLIDDKCVAFPFPDHPLPNKIRFKDLQIYYVDHSVLAFLRSNKQIWDRSGIKLDLFLPLYMTDVKLIWDVFTREIWPLFAKSIRHLSFHADNLENLRRRISPTLLTDLDQLYSIDSGALFPDGIADDGPNATAGQALSKWLHTPSKNGQPKQLHRNNYFGPPKLEWVNNFKETFRRATTSVSYTIQLYIIVEPMPIDHLNW

SEQ ID NO: 148141 - protein, 67 aa, Heterodera glycines
MSNCYKWEDCENSGANANLNHIRFDLWSFDKSIGPLSPPAEEEKEEEADQSNNEMFSTTPGPSGSAE

SEQ ID NO: 148142 - protein, 133 aa, Heterodera glycines
MVAHAEQRWTTKAIAFPCLCGPTKSRMAQQFPRDISPCHLFGSYTVRIIFRVKPMPIAPFELMNEVTNEKLTLIKGGAFRWLLKRCPIVGETAAVVQKQQKKDEKLDRLNGVYFCLYDAIFSTPGHIDQRKKK

SEQ ID NO: 148143 - protein, 127 aa, Heterodera glycines
MSQQKSFSSTDVCLKRTATQNKETENNDEEDEKESSGPNTPPLPPGLSAFSLSGFYGQHRLGWSNTSSLASVWSPPATTEQQAVPTFSFFEANSPIGGGTPSIERGQQLLRAGKRSPDFEGILMGRR

SEQ ID NO: 148144 - protein, 125 aa, Heterodera glycines
MQRKIDNNSIQNYEQSKEAAATAALIKKYNESFPEANFPEMFPLSTPQAQPFSMAKRSLLAKNASTNDLTQYINPVLANRRRSSLFCTAVDPAMKRLRQREAYKTAMCQVGAFTALGKKHWLRLF

SEQ ID NO: 148145 - protein, 223 aa, Heterodera glycines
MLRFSEPKLALDSFCHWIVPIEAEDKGSADGISKSDEMSEEMRQIVKFWMAILSAKMFSHCSNWTENELIMLRDIGEMIQIVVIRAGNRSKEKIDVLMKTVQSESEFENIYAKFSNFLVACQPEHQLMLSPWDKIVQKFPGNQNEFGNLFDVQPFERKASFEIPKSSEASASNCAPKNSKRKVSPKRKERKGTEGHWSGICSFCHKAEVLIAGFYCSNRVAMT

SEQ ID NO: 148146 - protein, 115 aa, Heterodera glycines
MKNVLPFLILLLAQFSSSVCQIIRKYDQNVETINEATHHLAQISPPGNYRIIIWANFKQQKFECEENSIFFNVRRLEKHGNDENNKSLYFRWTTLIWQLEQLPKWFWGFLHCYNG

SEQ ID NO: 148147 - protein, 101 aa, Heterodera glycines
MNIGSVGSSAMGSRTAEMHRRMLQRMRMDASNVPENRAFNTLARGLFQAWLRFGNPNAVVVFAVLQGSMRRFDERAVEYELQRISDWQVKVVRLSSKEAYS

SEQ ID NO: 148148 - protein, 121 aa, Heterodera glycines
MDKVLLKIYYGLKSPASYAGVQKILAEAKKVNPKITPEDVNKFLEKQRTYTIHKPIRKRLPRLKTIPSSNSDHVHQCQLFLGPFIHQFIWHNWRCRSQWKLNNVSGGQSGGTEKCPNKKPS

SEQ ID NO: 148149 - protein, 75 aa, Heterodera glycines
MVDLISIFLYGIILLSKMGERFAQNFRKCRINIGGVAQLVKGWLLSLGPYEFNSPCLLLAETRPSCAAQFLFYLF

SEQ ID NO: 148150 - protein, 47 aa, Heterodera glycines
MAIDLEKFLLLSPYSDVLWFSKMRSLIRNENSQQGQVAFNRPHENSF

SEQ ID NO: 148151 - protein, 30 aa, Heterodera glycines
MDAGFVISEDHSWRRSARIAPIELRKCQKT

SEQ ID NO: 148152 - protein, 181 aa, Heterodera glycines
MALRKAHLPSASARTQTKTAASPASASKGSNNKPKQQKNSASASASMTSVMTLTQTKTAASPASASKGSNNKPKQQKNSASASMTSVMKRTQLASKYFGNYLVVFQDHNRSISSAGIWTKTAASPASASKGSNNKPKQQKNSASASMTSVMKRTQTTTAASPAPVSGTMASAMTFTELAIK

SEQ ID NO: 148153 - protein, 268 aa, Heterodera glycines
KQKKILLINVILAEGMCRTKNLMEKERCNVHSCRRLLSAHSEEICEEEKETGQCQGQFPRYWFNEICEEEKETGQCQGQFPRYWFNTKQQKCERFVYSGCKGNRNQFESEEECKQFCIPNYRPTLAATNGGKTTEEGEEGTDGDGGTATDCEMSEWSPWSECSVSCGRGKRSRHRSVKSLPQNGGNKCPPREHRVQERHCEMRPCGKWITCRVTCRVSRWSIWSPCSVSCGIGYQTRRRRVHRYGLIDPDDPNCHAQELEQRQCRMPC

SEQ ID NO: 148154 - protein, 302 aa, Heterodera glycines
LTHFTDVLGASHSKHYRLWRFGDIASDGLKEIAEWGNDGLKEIAEWGNTYKGEAEMKANASEVRTIVKMKGLWYPEVQGRTNGHFRVNKYHHLASLAAMFGPSPDWCVGISEVNLCLPDCSWVQERAFDLRPFDAGTDNGYTYMSPNEPAEPRVPIAAITTRDDPRSPFFDEHSEEIAPLARLVLRRKNVLTAQCQSEEAYRREAFNSTNTSEDEEYRDRRECAECAVSQWGSWSLCSATCGKGIRMRSRVFVFPVKAQMFHCHRQTTERQFCNAKQSECGADSDAFNSRCLVSGWDDWTEC

SEQ ID NO: 148155 - protein, 18 aa, Heterodera glycines
MNGGCWDYGDYDDSGGDY

SEQ ID NO: 148156 - protein, 140 aa, Heterodera glycines
MTSPSTFSAARLFAKLSGNSNQQQQSIEHKMAELRAAYAIQPAQTPTVAKSGANSTQNKSSAPPPRRPGRTSLPTPSLGDMLELPQLSSRSCVPSRRASTVTACFSPAPSLMDLASSAGLLSLSPSGTIFNFGIRHFNKF

SEQ ID NO: 148157 - protein, 158 aa, Heterodera glycines
MRRLMRRASEASLVENIAQLAEICEAVTDTRLDGSDHSLAVYRLLLAKLDQKTNVEWFESVLVPAALLERNGIPVSELSLLTMGILVWRCTLNNARLLCLVNSMPQQQMHEDGNATAASFEALKRAANKYKCMHHVLTIGQRRPSAGSTHSSCSSSSR

SEQ ID NO: 148158 - protein, 86 aa, Heterodera glycines
MSGIPGGMRNRRSRYKKLLWSHFGPYLILEINDSSAFLVPIDNRNTEPRAERKMMEVDEEDDDKTFDWDVLCAEDLDDHEFCAVFR

SEQ ID NO: 148159 - protein, 20 aa, Heterodera glycines
MSKYFMFKQTFQLIKYKESF

SEQ ID NO: 148160 - protein, 43 aa, Heterodera glycines
MNNKIASSSYPANSAAPQNDSFYKFPLCCEFGAPLRDPRGKAK

SEQ ID NO: 148161 - protein, 293 aa, Heterodera glycines
MDKCFKEMLAISPFKLGVPAYALDGDNIRHGLCKNLGFSAEERAENIRRVAEVAKLFSDLGMVVLASFISPFRAGREEARRIHSKVGICKRLKTEIVQENIPFFEIFVDTPIEVCEARDPKKLYKKARAGKIRGFTGVDSDYEVPLQADLVLSSGVDSETKCLQQMLQFLFERNVLPENVNPLSNSNHRQFPFPQAMFQFCGQSVRQLFVPDDISRRRLLNGIGLCPAVHLSLVDLQWLQVLAEGWASPLPGFMRERQYLQCLHFGQLMDLQSFCGAAEFAGYEEEAILLFMR

SEQ ID NO: 148162 - protein, 116 aa, Heterodera glycines
DCLNHPDEIQKVEKYLKGKTLQTTYKNQLDEYKDFEYGGITRESARKQMAYNGFKNVTVDQHFYVRHRICLRYSSNPCVIEKHKNGNERFYPLELVKVKDNDIIYLGQNFPKSIPL

SEQ ID NO: 148163 - protein, 221 aa, Heterodera glycines
HFSNAFLTQQNKNIYIFQMHFRKTNTKRHTSIKIFSHYSFKMFFPTIKNCVAVVDLKIPLDIEKIYLIAPSTKYNPRKIHAVIMKVYNPNATAIIFSTGKFVCTGAANEKECRQAAEQVTERIRQCGYYEARIHEFAVKNLIATADVGFHIRLGPLSDFLGEYCSFTPELFPGLVYRNQNPKISIIVFSSGKLNLTGSRSKEEIDFVFNQFYQIICNFKYS

SEQ ID NO: 148164 - protein, 296 aa, Heterodera glycines
MDTTTINRILAGNTKTREHYLGCFPCDKLPNKINKYPSALVANNDPSNKEGTHWIAMFIVDDKTVYYFDSFGRKPNRCISQFLRNYESVISNKPAIQSVFSENCGYYCIYFVHCMCSLGGRNYEKTDKKYLKEFIINSFIKMDRLDTVIASLLNCPARNLCDCLNHPDEIQKVEKYLKGKTLQTTYKNQLDEYKDFEYGGITRESARKQMAYNGFKNVTVDQHFYVRHRICLRYSSNPCVIEKHKNGNERFYPLELVKVKDNDIIYLGQNFPKSIPLLDENNSKYNDNYYDSYRLW

SEQ ID NO: 148165 - protein, 91 aa, Heterodera glycines
MSPNECSDRPFQQPDNVQTVQLPHQQPDEDAELRAQIEDAEEDLLLNWWREDPTIIRFLFGHRRAPTIEAALLQRAEREAEILRQYAENHQ

SEQ ID NO: 148166 - protein, 39 aa, Heterodera glycines
ISFYLVTPILRPMKRAIGRPLVRTNRKEFSETAKCGQKE

SEQ ID NO: 148167 - protein, 21 aa, Heterodera glycines
KVGTGTKFFDRDREKTRDQPG

SEQ ID NO: 148168 - protein, 48 aa, Heterodera glycines
MAEKRIAKRREGQAQVAVLFLCCFSFLLIDRLGQSERWPKRWTMVVRK

SEQ ID NO: 148169 - protein, 66 aa, Heterodera glycines
MISLAHPHHEVRNLTSWSNTREIKKKEKKKKERKEAKRKEENGVSGGWDELSLQLTPPKLTNQPIN

SEQ ID NO: 148170 - protein, 88 aa, Heterodera glycines
MRGELVARNSVAERAEKASSVYENVATGERREAAEPAAPREANYDANDGANDHNYEQQQQQHGPPQNGQGGERREGPKGEIWYEFGCV

SEQ ID NO: 148171 - protein, 33 aa, Heterodera glycines
MAKLPPFFADPQNVQPTKCPSLEFEFFIIQMGL

SEQ ID NO: 148172 - protein, 22 aa, Heterodera glycines
MNNFLSTIIHLMLPNYPVEIGQ

SEQ ID NO: 148173 - protein, 83 aa, Heterodera glycines
MSDMSAYMGSGPAEPAPSSGAAEASPSSGVASAYMGSGPAEPAPSSGAAEASPSSGVASAYMGASPAYEPPAQEKSPDQSAYM

SEQ ID NO: 148174 - protein, 153 aa, Heterodera glycines
MSAFITGDLFYSGYHFCELVTNFKNALPTGRNNGTDCSVWHSEFEADDANIALPLSSLDGGAKQKTQPNHLARRRRTKKATAPSSTKGLLALGRERMAAISPVAEEDEEEEEETDREDEDEDTDQREEDDRREKGRRKETKRRRESSRGVTEL

SEQ ID NO: 148175 - protein, 25 aa, Heterodera glycines
TCTCGVVVKLSTFHNFSPGFNSPLG

SEQ ID NO: 148176 - protein, 110 aa, Heterodera glycines
MVTKKGRIVIKVGQMATKLGRIVIKVGQMVTKKGRMVIKMGLMVTKLGRIVIKVGQMVTKKGRMVIKMGLMVTKLGRIVIKMGLMVTKQLQLSILTRGKSLFVFEELNKT

SEQ ID NO: 148177 - protein, 90 aa, Heterodera glycines
MALRQMFFIPGNQQEVAMENRNYDEFRVGIEATEENVSRFYEEKEKFSNLPTLTLELHAETRVKAENLNTEVKTKWQALIGLVDLRKKLL

SEQ ID NO: 148178 - protein, 139 aa, Heterodera glycines
MNWYFRMENRIDFIQKVPESVELCEQNKEKFQSENDGTVQAYERVMVESQQLLQSLKQQRELLEVDNSEAACHVHRLTRDIELAAGPRRIATLRGQGCRSVQAVSHRQHCQGATDRVRCNEKTKRTVTVHSRKEFATCL

SEQ ID NO: 148179 - protein, 25 aa, Heterodera glycines
KCHGTRKVLLGRVKCHGTRKMSWDA

SEQ ID NO: 148180 - protein, 182 aa, Heterodera glycines
MMLHKLSFPFLPIIMMDFAIGRIALNDECQKDFFGTADQLEEMALEIFAAADKQTENGKFFEKGFDIFCCIAFEIEKDALNKDELALIDEFEANQRNFCHQLKKGQNIWEAVESPAGNAIVTAARNAKVNSLIHEEGLRKLEKMQNSSPENQAEIGMFAKHCIAALKLFQQFITGISLMQNN

SEQ ID NO: 148181 - protein, 305 aa, Heterodera glycines
MMLHKLSFPFLPIIMMDFAIGRIALNDECQKGFFGTADQLQEMASEIFAVADKQTENGKFMEKAFVGILCCITIKAENDSMKKEELAMIEDFEANQRNFCHQMKKGQNIWEAVESPAGNAIVTAARNAKVNLQTYEEGLRKLEKMQNLSPENQTEIETFAKHCFAALKLFQQFITDERLAQTLLAGGGQTVSDQSSALSAQPAPTRSDQLQKEKSSRRRKRSSKWPKCLGAFALAGFSGYVCSIFARLLKINHVNIFTSHHPVVQPHPRISLVMEVLVSMYMFFVLSLVSIFLGIYHCFVKRDYY

SEQ ID NO: 148182 - protein, 155 aa, Heterodera glycines
MIVIVIPFLVIPQQLSAFDGSNRSFFPPLSIGIQTPNQCQKGEEGPLAKPTANCQNGEESEWSTKSAPTPNEMSGNKRAKKRKREKVAKNGQNGEGEGEQRNAKKCNTNAKDNNNPIVQMVMSAVAEGTAATTAINLNTCGQFRGEGGRDTVLWG

SEQ ID NO: 148183 - protein, 498 aa, Heterodera glycines
FFVFALFALCVCCAIIYLISRSLTPSVLDGHFLSFQRIYLAVYCLAVAGDWLQGPHVYALYESYWGPHVYALYESYWMTKHQIELLFIAGFGSSLFFGLLFIAGFGSSLFFGTFIGSIADKFGRKANCLLYALLYGVSCVTKHFADFNILLIGRLMGGIATSILFSAFESWLVFEHRKRGFSDQSLKQRGFSDQSLKQIFANATLANSLIAILAGITAQAAANAFGFVAPFDCAFVVLIAPFDCAFVVLIVMALLMAFTWTENYGDERANLAQTFGEAFNTIRNDQRILCLGLAQRILCLGLAQSLFEGSMYVFVLEWTPALSRASETGTIPHGFIFASFMLSVMMGASFMLSVMMGSAVFNLLSQYNRPESFMRFVFLVASLLMCAPVLFPSSSTIIFISFALFEVCVGIFWPAMGFLRSQYIPEKTRSTTMNFFRVPLNLLVIGILWNNFHLDTIFKFCFCFLLSAAFIQHAIARRLEKIDKEQREDSTEETAERR

SEQ ID NO: 148184 - protein, 917 aa, Heterodera glycines
MLTSAPVLQSPRFGRLFIIECDASKKAIGAVLLQEKGPVAFISRALNRHETNYPSIERETLALVYAVKEFSPYIVGSGITKVITDCSALTSMIKANELKGRLEKYQISLQSFDLEIIYRPGNKNKAADFLSRYNIPKIDIIEESDNNPKESKEEKVKILSAQSLENSSEKSGKEIFCEKGQITLEEIIKAQRQVKEGAQIFYILKTGKIPEKTSKWSQINHDYCLINGAIYYKKGKSNAERPKLLIPYLYRKEIFHLIHDEGHFGFDKTWPEIKNRFYWVGMKDDVNMLIDSCVGCQKRKVQPGQAKASPGVPIIPTDYPFQRVHCDIMGPLKKTEKGNVYVFLAIDSFSKWVMAVGIPDQKAETVSESFVEMVIHQHGVPETVVTDQGRQFMSQIFENLSKCTDLYIIHQRPITNSQTEQQRLPKTDELTSDISVYTRKHGEKAAKAWEFVRDEILKAQQRTKEENDLCRKAKEREFEVGDLVLLKKEVLKHKFDKKWSGPFRCVGIEKDKMNVLLQSLEGKGKLRKVHQEKVKIFYGPAVLPLRPCDEPLCWEKYVNDPNLEQEEAEDESETSEIEYDELKVEEKNKEEKEGGNPTKTGKQMSKYGFESSDEETHSKIIAFIRENQNFEEDEENEGPGILMGDRNPEIEAIPTFTELEILLEGSFTRVYTGWINPVTIALISSIPENLVRENWEIYINEHGSRFVLGWIFGESFEIYIINEFDEIMLGIDAQMLLGERWRLKNEELTESYWEIYVDESGEEVEIPRIPEILISEKDHVENEENGIIRISINLVKNEIERDLYDFTLNTNPKEFIEMEKKKIQDNSTMDSLTGMESTSNLFDSLTTDEEESLKRLKRSLMAQLERVNKTLTNSEQMSEKPEEMADKGMPDEGIKGHAVEDKMGEKAKRSGRSYKAI

SEQ ID NO: 148185 - protein, 346 aa, Heterodera glycines
MEKEKIQDNSTMDSLTGMESTSNLFDSLTTDEEESLKRLKRSLMAQLERVNKTLTNSEQMSEKPEEMADKGMPDEGIKETEAKNESSLPVKKAEGKVIPEDCISLDLEEEERILEFPKTFETGALGFYESCVNKSKSKSEYEATLKKVEKKPTNPWKIAYHEIKAAETNILSKKDEAIPPEGKKKNPFAESTLDKKECENNSRKRFAVGDPWLAPPNSIWREMKTNEPKEVQNVMAMLLSIRNKALDVHDEAQNAWNELMKMKGKGEKKEEEGMDSGLPGFSTADWQSDHDRWRGQNRWRGERGARRWGQPWRGREWNQPNQGAGPSTSAASQEGQWNFSKMAGYG

SEQ ID NO: 148186 - protein, 180 aa, Heterodera glycines
MSIGMSVDFTAHTAYSFQLSHRRETRDGRVVLVPLRTPRDKLQHALRSIAWPMSQAGLSTVICVLPLVFLQNYIPLVFVKTISLVAIWGLFHGLQMSDQQQQQNCVGGGDDPNNDWDCVVISGGGCSKMLLSSAADNCHQKQKIGENQNDEAKRRGQSRLEPFRLSHLLRSTERHTKAEA

SEQ ID NO: 148187 - protein, 430 aa, Heterodera glycines
MPDADQILQQLEHHFVNNWLLDTGKIDEMKQRQSDRREEHDEFDQSEEETDEISLINRRLTVSPSVRSDVESNDHHIVGASTRHTPSQTHRPPASTRRRATSANVKHRAQRRTWSQSRRPSDYPSFLRVPTSTEPPRCTSTEPPQSPRNVHVPQLPSNGPPQNPWNVHVPQFPSNGPPQSPWNVHVPQFPSNGPPQSPWNVHVPQLPSNGPPQSPWNVHVPQFPSTGPPQSPRNVHVPQLPSNGPPQNPWNVHVPQFPSTGPPQSPRNVHVPQLPSNGPPQNPWNVHVPQFPSTGPPQSPRNVHVPQLPSNGPPQSPWNVHVPQFPSNGPPQSPRNVHVPQLPSNGPPQSPWNVHVPQLPSNGPPQSPWNVHVPQFPSNGPPQSPRNVHVPRRSSTGPPQSPWTVSRPDHLIEHAHQLNVVPSASLPSDQ

SEQ ID NO: 148188 - protein, 25 aa, Heterodera glycines
MHVLVLCDFDTIFNVFCGVPITMKE

SEQ ID NO: 148189 - protein, 43 aa, Heterodera glycines
MNLCDIYWKTSRAGDNEAVNEVRTALDAGMECHAVVGHPYLNA

SEQ ID NO: 148190 - protein, 148 aa, Heterodera glycines
MVPNKGKRSLAKLAVNNLYTDSLFLVHPEDSNLLQTGVHLGQLTDEFPKHDILEFVSGGAKQYGLKLRKKGAADDFEYVLKLRGITLNYDVTENQGLRYDTFKQRVLEFARSGKTDPIKVLYPNFLRPTVIQGNVTSAPLQKIYKPYV

SEQ ID NO: 148191 - protein, 31 aa, Heterodera glycines
QGCAEPDKIRFRLNRRFRLWPKIRLIAIPIT

SEQ ID NO: 148192 - protein, 38 aa, Heterodera glycines; identical to SEQ ID NO: 130624

SEQ ID NO: 148193 - protein, 42 aa, Heterodera glycines; identical to SEQ ID NO: 132699

SEQ ID NO: 148194 - protein, 49 aa, Heterodera glycines; identical to SEQ ID NO: 130195

SEQ ID NO: 148195 - protein, 41 aa, Heterodera glycines; identical to SEQ ID NO: 133620

SEQ ID NO: 148196 - protein, 38 aa, Heterodera glycines; identical to SEQ ID NO: 129423

SEQ ID NO: 148197 - protein, 156 aa, Heterodera glycines
MCFTQDTDSLILVHPDGRCHLKTGPHLGQFTDEYPDHKIIEFCSGGAKQYGLCLQRKGAEPGAQMEHVLKVRGMTLNHDVLNNQGLRYETFKNEVINYATTGDYEPINVIYPNFLRQNIREGGRLTSMPMQKCYRPFVGKGIVGQGFQLMNFGHTL

SEQ ID NO: 148198 - protein, 29 aa, Heterodera glycines
MTLCEVFVEDFSYEIYLIKVKKVLKRCRW

SEQ ID NO: 148199 - protein, 37 aa, Heterodera glycines
MWMDVEVKRWHSVGVLAMRDHQRALLSLSTDIKMLIY

SEQ ID NO: 148200 - protein, 422 aa, Heterodera glycines
MERRRSVVITGLPENQSETPSVRAISDNNAVTGFLDQLGVETHSIVSYRMGWYNKDRARNGACRPIKVVLPASSFQRTCLHQWNKKSLEIRRQLDNKRLNIRESLTQEQLKARRELQAQCAEKRKETSADWIIYNGMLVLRSPTRGNSVLDLCLCTNPNLIHFVEIKDSLIHSDHSALFFQINLSLQKSPPPRITIRNFNPNNIKTLNSYLLSNVTSNLTNVFTLENKYKVFSETISSALEHFVPQTSFLKKPPPKYPLHIRESIRHKALLWQKMKIDPIKYKKFYDSITLHIRIQTKKFYENRQKKFLSVNPMNLYKLIRKSFVTNNSIPPLETENGFIFDDKDKAQYFAKYFSETFSNNLDSTPCLSQTDSLGYSISDLNFDVSDVFDKLNRLTNRNNTSPDFINNKILKNCLIPLETCN

SEQ ID NO: 148201 - protein, 326 aa, Heterodera glycines
MPKNDAKGNCQTDKVSPYEKNDDNDDKALTKNLEGKEKVDKTQNKEKENKINEEEKTKHKDSGNNDEGIVTEKEAAVTNAKTKKAYRIADIKEDVFLLGHFQNILSNSKEFSIEMPRNLLELGIYSNEIWHRILAERHFDKIGIKFWHSKINFEEKWAEIENNKINKENEQLLKMELYQMLSNFSPDFDENFEKNYVNKNWQKIGEKLHRNWLARTLLSNGEMSNDGPGRFRTAVFVPPFSYRRFRTAVFVPETFSYRRFRTGDVFVPPFSYRCFRTGDVFVPPFSYETLAHGFKYVVQKLVGVHSCDMNAAHVECQRLVTGDVLL

SEQ ID NO: 148202 - protein, 102 aa, Heterodera glycines
MSEQKPAEWRAQIEYLQQINCDNNVDLTYRHPEVHSLQRIQSNWVPLIRLKLINFDHEIDIVFASIPGPVPKERAFKLFYSSKSANEKLPMLFEQQIKFHEK

SEQ ID NO: 148203 - protein, 75 aa, Heterodera glycines
MTFWKWKKEVMPNCHKSPNKYSNEEKLRKIKQYFETKEKNPKICDETKAKKLRIASDTLRIWKKETYFSSGKVIF

SEQ ID NO: 148204 - protein, 36 aa, Heterodera glycines
MYKTPKYSLFRQLIQLLTDYCGRKPTNTVNLHRKIT

SEQ ID NO: 148205 - protein, 106 aa, Heterodera glycines
MSSSHAKVTVLLLLFVIAFVALAVSAPVAEEANAIVEANNGKLAASIGTDEATSLIRHKRYGYGYGRRYGGYGGWGGYGYGGWGGGYGYRSCYCGYGGYGYGYYGK

SEQ ID NO: 148206 - protein, 104 aa, Heterodera glycines
MVCGNAFKDWHRDAHPIDGRGGEGTATAPGKTGRNWGTRGRDQPHFAKTLNVQMEHRFGQLDTAEKEISEMGDAEAETVRERVAETREKCRGLTEWTEVEKADK

SEQ ID NO: 148207 - protein, 166 aa, Heterodera glycines
MPFLLEAEYFTCGHSDAELAIDLDIFQTLISIALAMELRDKLVRYLADELPNFQNDMQKPNFAPSPNDIIQQYHAKLCALATPFFGNKFGQKEEQLVWPSLTRFLPPLSAQNRPKWCSLLLMDASSDHAIIGASLNWVGHLEVFVDEEQKFKYSQHINTVYSACKH

SEQ ID NO: 148208 - protein, 514 aa, Heterodera glycines
MDTIGQRLEWIRQQFEQRTVVGQIDEAEMSSSLEEEGKLSNENGKDAVIKIPQNEDRKPKFGDELEKIRELGTITEKTCQENSKVEKPASVNAKVEKPAFENGEVVEKLPFENAEQQKPHRQNAETIKTTLETARMAIPALKNGEEKPYLDSAKEVNTKTTSEQAEFEEKIIAEIESPQQNAEIGLRLLDHESDRSFVRQSPPSSAGYHSSRPSTSQNNSHEEEANVNAKLNANRRNQNAKTGNVPTPPIVEPMDFRGLRSSDEGEEMEQQQQLNVQQKRPKVRSWKEIEVFPRNSPSNVEKPSIFVNKCAKSIPKSKNNANYPSKNIKEEAVQQMPKRSPWRRPQWLRLLPPFDGTIRTERQTTTAQIKHGHPLLELKLDGSPMFFNFLFLFLEHFSTPRSTDKVANAGGDVGTFLTNPGRCRRTFLELAAKKERRHRSQNSSLNRPKTTMDHQQQQTHNNGIYDSGIGLEQQQQQQQQSNNGTSRNGIVLYTVELEEADVAAMRRRAEGRQN

SEQ ID NO: 148209 - protein, 132 aa, Heterodera glycines
MLPLQSGLSSAKSFAMFCARGIAKRVSVFAKIPFVGSMIDAVRKIIADMKNRFLPLLAEVNVVQNWRKNVVYLITYPRIGAFDENSNVPVISPAALKLEVWLQFRGVDFYVSKLITNHPLLPQLISYFLAHC

SEQ ID NO: 148210 - protein, 86 aa, Heterodera glycines
MGTTDNEEKKTEPMKKFCKMFSWVQQMFSWVQKENVETKIDDDETLLKRLDNVFMVKHPPELLNFWRHAVKLNPKKPLGKYFFTKI

SEQ ID NO: 148211 - protein, 173 aa, Heterodera glycines
MSNNGPDYLKMLKKRRDRESLEMLFHGIVNKFPLDDKGIGYQQLLLDDAKENAQLKRNIKTMGTTDNEEKKAEPSKKFFQMSPWVQISSNNSFAVTKPPFWLPTDPFWRPVFDAMIYAAIAISAITVIFGVPFMIFIACIASSAARDSERWAEMIERREQQRREAERRDELLF

SEQ ID NO: 148212 - protein, 154 aa, Heterodera glycines
QLKRNIKTMGTTDSEEKKAEPSKKFCKMFSLPQLSFCFVFLLLSFFVIWYTSDQTQINTVRLLGNPGEWKMPLNDSTSVTPNKPPFWPYTDPFWRSVAHGVFYACLAISAFSLIFGFASFIFIFVLLSRTLTNMEHITMTCYEIDEIFAWMRLK

SEQ ID NO: 148213 - protein, 525 aa, Heterodera glycines
MDEFYVVLPSNSPGPGNTTSKFTVRLPHTLELDANWMVALSSIIYPYSFPSVGIDDDDFISIKLVNPNFKFADDKRFVDIELKIPSMQFSSVGHLRQTLNDIINDAYKQRFGLSSQKAAKVKRQIDVTELFFHDHPVDYWEKIEELEKRLVELREEIDTKEREHGAEGTEQKRKNELEGELKILRLRLKRKDDELEELKRAAKRRDDDTPENQQKKIREFFHHHPDDHEKKLNESRLIFTKYLSGLQEKMSEYIGERDGAKIVQLNEQTGKLREKIKYLLRNLNLFESAVLQRANSDDPSRKTREEYEKSSHEQNSVYVQEFFQRHPTNYWQIIHNNYDGLREQFDKIEELQQKTAQKQLKDDEHSSFQQQIDRAKQLLEYRRKRFAALEFEAKKRDGQQQQSSPFSSPISSALTAGEALKERLGAVQVKQTEKSDQDNNNSMEKPKTHAEVLKEKIQQQQQQQDIATSTPNELQNDGKAVAEPKTHAEVLKEKLEQKKGTSASAERDGDHDSDAVDLLSRGHKL

SEQ ID NO: 148214 - protein, 159 aa, Heterodera glycines
MRALLFLTMVSLVLAVLLETGAVAAHGKGKDAHKGGASPAKGNKKAAKSPGKKDAKGKKDKKSKTAKSSKSKDKKTPTKPSKAVKAASPKAEPALNNEPSSAPATEVEQEEQDVMEADEELGEANSAESYDLAEGELLEDDANGDGEVDAIDADEEPME

SEQ ID NO: 148215 - protein, 181 aa, Heterodera glycines
MRAVLFLAMVCLVMAVILETANSKAVKNDGKKGAVASPAKGKASPKGASPAKGKTAKGGKKDAKKAGKKDGKVKKEKKEKPAKKAGKGKDAAKKDKTKDKKAPAAAKPKAEPVETEEPSSAQVVAEQDGGEESANNQEMDAGEEMTEEEQTDLAQDEQLEDDAIDGEEGDGMAEEEQPEMN

SEQ ID NO: 148216 - protein, 385 aa, Heterodera glycines
MLKPSMDQKHFASGVVKETNVESMRSLGRPKFILWIAVKVTQVQERKNRDVHEELERAEEGGSFVAHPMIPQGLELRRACFASNLPSRVAKLDTNQGKLMRAVMGRPREQLVGEQGEILGHASAVQEFHPLMRKLNERQKVSAKLLLGNECCLIYQNAPPGVGKTYVASIVAAILLSINENVKIAIVTSANLPLAKLAQELDEVLGSDEMEESGSIAFFSGYAKEKYREMVEKLKRHILVSKLKSEEIQSKFEERSEENQDKRDVREYCQNYEFRPRLTKERKMASLYAEVANLRIVFATATMAENVLWTALTGTSVLIFDEATQGSWVILAHLVARLPKLEKVFVTGDRYQLGVHLQELPKILRKGFGLDSMVDQLVDSPNVVQ

SEQ ID NO: 148217 - protein, 104 aa, Heterodera glycines
NGLSKNRNYAQKASQTILALPIPSIIAFIHPIMSAKIIRVPKIACDLSLEKNGLSKNRNYAQKASQTILALPIPSTIAFIHPIMSAKIIRVPKIACDLSLEKMV

SEQ ID NO: 148218 - protein, 132 aa, Heterodera glycines
MVLFTAINIALVFLCCNKTYFECKHTALEVLFNCDSCGHEVHRTYECFIYFVYVNYVDNRRRHRWYRYCRNKTYSPWGRYTAENVTRTVEQKPRPTTTIEAVEREFKEMSGEEKDDYTTSWAWTTDLISRLD

SEQ ID NO: 148219 - protein, 98 aa, Heterodera glycines
MTFRQLDIKCLKSFFIGLSFFATFFVSMNIIKPLQSLVCITSPNNCKEFVNPSSDPNLTSSKIAPIFYLMIYRWGLNALLEDILKNLCYHFRVFNENF

SEQ ID NO: 148220 - protein, 60 aa, Heterodera glycines
MNFFLFITIIFTFVKSNAVLNYVEEAFSSRDEVQKLANYAIDWAFNNGMILRYDIRQYNK

SEQ ID NO: 148221 - protein, 585 aa, Heterodera glycines
MKEEEAVKLEKWYNENYQTEFELGEQLKIYCENDVEILLQSVLKFRQLFLEITGDFDVMKDSVTIAGVVMKIFRAKFLKERHIPIMPEGGYERAENQSKIAVKYFEWLAQRKGVKVRHACNGGEECDVREELKKNKEMKKFFESVPDKGPINPRDAYAGGRTMPFCLYAKATEEIEISMFDIISLYPFVNYDTPYPVGVPKIVVSRNFNVNWTAPDDVPYDGLLKVKVIPPKNLLYPLLHVHIDEMLLFPNCWSCARRAKNEFVMTKDVKKCNHRPTQRAFLGTFTSIELRKALELGYRIMGFYRAYHFEQFDSQLFKGYVRMFLKIKVEASGWPAEVKSEDEKRAFIEMYKAKYDIGLDYDKIGFNPGLRMIAKLGLNSLWGKFSMRNTLSSTEIVGSMERWMELGRDNTIEFGRPVKISEEISRVVYRKKEEFIREHKVSNIVLSLWTTSAARLKLYEYMEQVYKKEGEMTREYADSEILEFVSAGPKQYALKLRRKKGGVIWHKTKIRGMTLDRRNEFKYELFKEMVLDYKKGVKKVFHYPEKIGPTNDFRVLSKDVQKEYTPVQKKGIIDDHFNVLPFGYY

SEQ ID NO: 148222 - protein, 874 aa, Heterodera glycines
MIGQECREFQKKYGGPHAHRVYHTDLLAIPENVDGLIWAHIPPEPNQNEKSDWAIFIRKVRELLPKYQFHDCGRHCFNHKGKCKKGFPKPFSKFTILHDDRPAIYFRPCQEDGGQTLTVKRGKTQITYDNSRVSAYNPYILVHFETHHNLEYAYGQSTNLKYLYKYPFKGPSFSYIKTIEENGKTSIDEPAYYARMLYRSSPEAYCRIMSLKYAKLSHTVIALSLHLPGQQKIYYKSSEKESVAQQVQAGILPETPLTAYWKMCETDPDVRKILFEHMPDQYSFNKSGKFWKKRIFSTRPHNIHNRKPIIGRIFPVSPRNPELFALYLLTKHFPGNPQQLKMVNPTHICETFLETARLRGLIDDNDVWVRTMEEGAASLTPAQMRQLLANILIFGSTENCLIDGALLWKKFIKHMFDTRCTEAERPARIDHALALLEKLLVAQNKQCKDYGLPTPAISIMNDQQRGINEFFFPQLVKDDDADDTVDTTAFEHGNLNAEQQKFFDMVKTAFLNTTNSRLFYLCGDGGTGKTFLLNYILYQLRKIGAKIIPTASTGMASTRYYVGGTTVHSAFKFGINVEPGKLPAIPFDSFFGRRIIESDIIIIDEMTMLERTVFENIDLLCRQLCSQKAHLPFGGKCVIISGDWKQSLPVVINSYGSAAQVAACIQSSPLYPIFSKYKLTQSMRVNPNEIEFLKWFDDIGRGVNGDTVAIPKDMLVDSREDLIAWVFDQGLNMPSSEMLKRLLLSTTNRIVDINNSQISHSMLGNFIEYFSVDKATDENPFSVNAADFDVAQLNQLNPMGMPTHLLRLKIGSIVVLLVNLNTSKGLCNGTRLLIKKLTDNLIECETIGSGSSGNGIIIGIPRNRHTYKDKRPDG

SEQ ID NO: 148223 - protein, 63 aa, Heterodera glycines
METNKQFTTSVTSICKVKGRKCENEIGVCCLLPFFFYDPLKKRPAAPSKMIEECLCTYHEIFG

SEQ ID NO: 148224 - protein, 61 aa, Heterodera glycines
MTRKEHFVSAPHSLCCKLGNGQTVLCPPARDFTDRIMPIDVEEKGPLIGINWANESQMGDN

SEQ ID NO: 148225 - protein, 288 aa, Heterodera glycines
FELFNKKILLFPIFFHTVTAGVGQVVIKRFSKEQCKFNPCLNGGKCIPGKTSCDCPSGWMGKYCHRRCRNIYQSCDRWAMEEKCERCRNIYQSCDRWAMEEKCELVRTQTNFFDINCAVSCKLCSPDPSIKLTPLTPIPLAPALEPLQFMMGKWYSQASKGLRASKGLRYPTDMVAGEYEEMLDISPAQVPMFGPPSLNLTFVSLVPMFGPPSLNLTFVSLIPSDMRVTHGFITLKPNSNPPEVAILSTGNEGLNMIELGTLQNHAVTLNISYMYVECYDITQKAIKI

SEQ ID NO: 148226 - protein, 167 aa, Heterodera glycines
MTNTSFSKICAKSQLLNIILSDIFYFEDNLDNLVAECLQGMPMSDGFDKARVTANRTETEQRHRIRANGGRKTPVHGVLCGHPLQMEKKSHFLCRSFVQSQRRKYQFGNDGTAKFVGKRRRTAGTKLQLRNSIRQIGKRRLLIRHSLGQGKDTNYEGPIEKGRDFEI

SEQ ID NO: 148227 - protein, 170 aa, Heterodera glycines
MTEGRQAEEQSLPLADDGTHAVFPSKPCHVLVWDELRQILTDVLSKESANYSQFGLFSNQFTDNAKPSPLPPLEPFFVRLGFQNPFPFQLVLRNLCLSLDQLKLRPGCSPPFSDKFRCSIVSELVFSPLALDERPTEKVLKKHFVDLHVLPGPELEQFSVNGLLLAICCD

SEQ ID NO: 148228 - protein, 72 aa, Heterodera glycines
MDRRLSATVCSDSVPLLSFRPVGGDPGFIKAVTHWHPLEAFCDQIVQIVFEIENVGQNDVEQLRFCTNFAER

SEQ ID NO: 148229 - protein, 108 aa, Heterodera glycines
MIIACVITLESRDRHAQVIQEESAELRRSRRYASQQKKGEITRTETGQMRENGLKVMCTRRELISVAHDEEIAAQQQEKPMETDEVQQIARKCHSTANCPTIGPSLRG

SEQ ID NO: 148230 - protein, 167 aa, Heterodera glycines
GAETVGRWTQCPSKGMPTAFTDDASVAGEFGMEAANVGQFGKISRECPLSVGEKIGLRVAIRVQQKPQTFYFLFLYFDQNGRSRQFRFSARVRPLSRIFDADHCVLSGSIGLSMLTLRCLPFNSHESDATAKATTAVTLTKLDLLRLSVKVTDGNARTNVRRVENEP

SEQ ID NO: 148231 - protein, 154 aa, Heterodera glycines
HSLFAPFSPSFRSFFSIIPLPFLPLFAPFLPSFRSFSYHFSLLFLPISLFFLHHLFHSFCFALIDPLLKLHSQILAHSFCEPGSVAQFLKHLSLVQLRRLIRLCSFIRPLTSEGKALATAIWEGCSNERSTERRSRTAKKSFVNISKLKITGRV

SEQ ID NO: 148232 - protein, 89 aa, Heterodera glycines
FSVSNFLKMPSFSSVFVLFAIVVISLGKEQQKGDELRAKRQICQGFSAQYGACIAQKYSQCVWCNDADYRGPHRCDEKSSMKGCVQIVQ

SEQ ID NO: 148233 - protein, 190 aa, Heterodera glycines
MKDMCCICGKNLRPEGGFSGERIEPTTANVSMIHHVPELVVSKEALFPCSEQLILMLDDRPDVWMHSDALIRVNPYRFFVEIGDINAPPQELLDSVQASEEMENTQADKWTLKQKVKSKTEEDKKEGEKSLLTTKNGEENAQKKGETEEKERGDGGGNGEERTENALAEPIAAIVDDDNALEHVERVLAE

SEQ ID NO: 148234 - protein, 229 aa, Heterodera glycines
NQRNKHHSASRQTFNGSYTGPGPKHCCTRRSRTPTHFGVHWPPGKQCARPSERVQEDREATTKILDHLEVEAEPTAVFRLGQYDPQRTTPRPLKVVLPTPTHQHVALGGWKRERARLRSQQNLTRLFVRPALSKEQLKEEYEARLRKRQQNPAPLAPPTQLSQTKNDQTPVVAKGPNQNEDSEDISKHPEVFDETILVCYEALKPLPPTDKIVHQIQSLEKQYPHLFNK

SEQ ID NO: 148235 - protein, 132 aa, Heterodera glycines
RVKNSVEKLIAQIEAGNEAGAQLNQRGDGQGQLHVPADEQLGAVYRILPQAGSHHAGVVPRRGPGRGAGPLLGVHDAQLVGPNCEHKLIIKILFFYIQKVQEQAFLGIQIQLQVLPKCRSLVWTPNNKSLAL

SEQ ID NO: 148236 - protein, 97 aa, Heterodera glycines
LALKLEPNSIKGVTDKASSTFQQMSNLELFIEFCRKQGVITQELFRAVDLVEARDLYSVCMTLNSLGRIMQKKGKSHPKHVSASEIVNIPSTDALRL

SEQ ID NO: 148237 - protein, 29 aa, Heterodera glycines
MGSRSKPANTTRVRVSCCSTGSSRSPVPQ

SEQ ID NO: 148238 - protein, 33 aa, Heterodera glycines
MGVQENDFEERKFIQRAKNCDNDQILLAFFITK

SEQ ID NO: 148239 - protein, 19 aa, Heterodera glycines
EGEGKYTIIRPNGSTLMVH

SEQ ID NO: 148240 - protein, 619 aa, Heterodera glycines
MNAEQIQQLLTALLQGNAASSISQANLASSIDSRISKFVYDPENGQTFEQWHKRFGILIEEDGKDLTEQAKVRLLLGKLGDEEYTKYRDTISPELPDKPSWAESINRLKELFAETRSLFVRRYECFRIRQHPNQDISSLVAQINAACEHANLSLTKEQLKCMILVISLRDEHHDLRQKCLKMMEEAEKSGTTVTLKKLEEELKAIQIVKDSALSLLSTPASTNAIRTRPQQWRESKTKAKSANAVQQNHPAQQKPATGGKAIRGQPTQPCGSCGGTDHWRSDCRFREATCHKCQKQGHIANVCRKGAFTTKNQRRSFHTVQVKATCLQIGTTQGRWWTILVEINGTKIEMNVDTGAQATVLTIETWTKLGQPKLLPTDIETRNCNDVTFKTIGKFICLVSIVGQPAKKLTAYVTEELNYDLFGLPWIEATELIPKEIMFPETHTSVGIRASSAAPFQEIADVKSLTTALKENFPDVFGKELGQCTKIKAHLILKSDARPVFCKARPVPHGSLEAVNTELDRLLQIGAINPIEFSHWAAPILAVKKKNGKIRVCIDFSTGLNNALELNRHPLPRPDDIYAAISGAAFFTNLDLKDAYLQMELDDESKQLCVLNTHRGLFQ

SEQ ID NO: 148241 - protein, 38 aa, Heterodera glycines
MPKHGLKTDQKMAFEVRQCQSRPGCSASYCTDFFLKNF

SEQ ID NO: 148242 - protein, 88 aa, Heterodera glycines
MLGLENARGNFRLRRRAGQNPGPRPGRTVLGRANGADGLLPALCLGLLQEQCPAAAQKVWLRQQHHVPALHTKHGFRLLFQCHGRRSD

SEQ ID NO: 148243 - protein, 91 aa, Heterodera glycines
MLGLENARGNFRLRRRAGQNPGPRPGRTVLGHANGADGLLPALCLGLLQEQCPAAAQKVRLRQQHHVPALHAKHGFRLLFQCHGRRSDAIF

SEQ ID NO: 148244 - protein, 48 aa, Heterodera glycines
YGLKFVLQLRNSIRSISSQQLIHSFTSAVDHLGREFRREAHRRCHPQK

SEQ ID NO: 148245 - protein, 188 aa, Heterodera glycines
MGNSCLISDSTREQTISPPSNDFVAILRRPINTTILVKRQLINKRTLTKMLSKPRTETAIVLPERRMDTNFLSPKDRELIYLCWHNNIVTSRSDLFHKAMHYCIHASPKMNEIIACGHYCYRDLTKWPKLNRICQAIFKFFDKLINEYKMDEDKMYDACVHLGEMHANYAQYGLKQHFMDLFQQQLLE

SEQ ID NO: 148246 - protein, 26 aa, Heterodera glycines
MEALIELAIIPYYLKHMRIEALIEMQ

SEQ ID NO: 148247 - protein, 65 aa, Heterodera glycines
MGIENLSNLNQNSSFKRYLCLLIFRTLEVIVPTLCTRHLLLCLESHCCQSLALHFVAKCWLLRRG

SEQ ID NO: 148248 - protein, 30 aa, Heterodera glycines
MVVLSVLGVLFVQGIIALLVFVCKSVKWQK

SEQ ID NO: 148249 - protein, 49 aa, Heterodera glycines
MPNFILPFSSFFLCFIRYTQSICCTQIYWRNQTIKQCVRWVLRWAMTVL

SEQ ID NO: 148250 - protein, 73 aa, Heterodera glycines
MGKKTQSKRSKPMANIKVKMFTRKANRTDWKQKHVELEKKLRWSEEGHKSTERGRKSSKKPKMLDKRCKAIRM

SEQ ID NO: 148251 - protein, 80 aa, Heterodera glycines
MIAFEQSLVFQVHGVVHDTIAFVKGILETEINSATDNPLVFSEIEEVISGGNFHVLAMELMAACQVSNNNENPTMNLNDI

SEQ ID NO: 148252 - protein, 40 aa, Heterodera glycines
ELPETLFYKLIIKYIPNLLYFTYVKGPRVLIYTKPVAYHG

SEQ ID NO: 148253 - protein, 59 aa, Heterodera glycines
GMGRGFAFRISHYSHFLAFRISLFAFRFFARNATFTPLRIGLNSHKIFQNFTYKLANFQ

SEQ ID NO: 148254 - protein, 92 aa, Heterodera glycines
MNVQTVKLSTYHPKVCGPNIFTKNRKKLLFFSMLIYLVYPSWDFTPMPFRANESRTASSIKPWEFKAKKMKKKPMPSWSTFRVCSVQLEPSY

SEQ ID NO: 148255 - protein, 458 aa, Heterodera glycines
GSSCTEQTRNVLQLGIGFFFIFLALNSQGFIEEAVLDSFARKGSVKSHDGYTSLAIIYASFTIHNFVAAPIIAWLGVRWALVFAGLTYAIFQAGFLFVNRWYLFSSSTLLGLGAAVIWTAQGKYLAMNSTEETAGRHSGLFWALSQLCQSCGGIFLLVVFLLMPSQTSISVPTVRFIYGTFTALTVLGTAILALLPVPTATTPARQTNTFLSIGSTVKLMGTRRMVFFSLPFMYTGISQSFWSSIYPTTVANTEMLGVNPKLLLALTAIVQGVGQATSGFVFGILDSRTRRFGRTKIVSFGAALQLCSFLLAYLNLPAHAPLEKTFEHGILNSPSITLALVGGFLLSFGDACWNTQVFATLIAKYPIRASQAFAVFKFFQSLLCCAAFFYATSISLPWHVLILAIGLLIGLIGFLLAERMVRQNDDDFGDVSAVSSAMEKLMSNVDQRSQNSTIKNSK

SEQ ID NO: 148256 - protein, 840 aa, Heterodera glycines
ELPPYVAAQFGVDIQPLPNIGGLHVFDSSQLFAIVKKLVDTLTSLTPPQQLMDPPAFTQLQCNYWRERLKQVAVYVNALQMFLQLTNAKSYDTDQLVAVICCASFPLSPCSSTSILRQICAVHRDISNSLLQLEPEKTAASNDDDELPKSTVFRCWLPNLDQFQHNFVDRLREASAHLSQAIGNVAEDALCLLRWTNTTTTSRAYRLDVVQGNIHNILTTISTLKTLLITTNERENSSFDSTLSEVPFLFVYPDLVAPYLHVLNLLSIALSELGRQIASAQNIERVGLNYGFSHSEFYGLNQLLHCSSQSAGVNAANNDFAIDVQPFIRWLITDQQTPLTASDRLPICLWSIAAPFRRPFSQCRADVLGWILHLWERWHEQNAKIKAKEKLVVKRKRKRRKQNDEEEPGMMDEGGDECVHMESDDQKLRDAYLPDFSNSASDNNHPTSSHLDAAADVVVDQFSVSKDEVHDALCNLFKTLSSNEDDEAFANSSFHPPPFMPLLCVIGKLELFSSATNQTEHDEDLAYSQLLSLDKLREQLQLCAPSSTKFPSLSSSKSAPEVPKAALNVYRDSEPSAVVKCVECLAPLHQRVQLLLNEFPENGQLASLSSTIDAFVNKASAGVPLMKHAAQLESILVRAEEWESIADRAHSIREQMVPLQALLVEWRRREVHCWAELVNMVRADCTQLAVLAGWPLFKCALDTLQNEEQQQNGATVADENSNKNTLILAFVDWMHNATVGDFGARLWTGQLLTKCLPVLAPPNCAIVVGTLCRHMRSTCAHFAQFNRTLRAHFDDRFASVQRSLHDFCRAVRYTDLNVWSVQDSARRAHTHLVRILRSFK

SEQ ID NO: 148257 - protein, 482 aa, Heterodera glycines
MPAQNEQTKQNAVPTMANLGEPVNVKQGGTLKQIKDSIQMAQQQYWALSGQHAHMGTVEWGGTKNQEKQQNTKKKQQQPYNNSEDISPKALSTKIERLTPMERDNLAKQLVNIEDRLQKTERKLQQKEQKLPTPTTLANSIATATVSTAPPSPFTTVVTKAQKTVEDITREWWKENKEKKHGAEQQRKPGRQPLHSDGGQKAVVEELTESAEFVASSAEEMPSNGEMSSRTSLSNSNGGFKTIASSEIGGTQSTVVGTPALNSAGAASPSDGTNSSSAKTASASALMMMTQNRKRPSPPTMAPQMDKISNATPTKVPPVVPMMPRYQQAVRNLTGRPLGRLDARQRTIVAVMEQKRKQFRKEGDMATATAAAEVPSPQQKMPKPQQKPPETMPQGKNRSGSGRPSADQLSVDTAQALEWMLANMTKSVEVVRHQSTKGGSSKKLLAMANGDDNGAETEEDRDRDQNQHGATAADEVNFKTNK

SEQ ID NO: 148258 - protein, 136 aa, Heterodera glycines
ELARAQSVVGKQQTSGEKQQKEKHASPISMELEIGRLRAELSTMEQQMGQMRGRDRGGQRHQNVPGEQPQRQQNKQKKEEEEREEMGSKSTSGTMETSTKLRSTAAGIAHNQQQGTLTVLVYLFPFPKPFRAIKIS

SEQ ID NO: 148259 - protein, 146 aa, Heterodera glycines
MIVVGTKPGPGQMAKPGPGQMAKPGPDQMAKPGPGQMAKPGPGQMAKPGPGQMAKPGPDQMAKPGPDQMAKPGTGQMAKPGPDQMAKPGPGQMAKPGPGQMAKPGPDQMAKPGPDQMAKPGPGQMAKPGPGQMAKPGPGQMAKPGP

SEQ ID NO: 148260 - protein, 68 aa, Heterodera glycines
MLSKWLHTPRKDGQLKRLFCYLKPPNIEWDNINTLKKAFVSTSKMVSDYVKVIYAFEKWSIILDYNDE

SEQ ID NO: 148261 - protein, 258 aa, Heterodera glycines
PRHTGDTGGVGQIGHGRTEGRGPADAGAAPDEEVRLGGRLLGGPAQLVDAHKANLSDFSSSPSVPQHSHIHQQQQFHSHFNQPINVQRVATEPHKIFAQIEFVCNIWFTFEILVRFVCCPNKLNFFKYPLNLIDLVATLSFYTDAVLVRLFRDQAPKDLVEFLSMIRILRLFKLTQHHRGLQILIHTFRASAKELMLLVGYGDMTPQVIKKEKHIIEKQRQSCIVIKIHQSLGNGNGPQKCLVDEEQCRTAAILRQRS

SEQ ID NO: 148262 - protein, 103 aa, Heterodera glycines
LGLGTILLRFGLRYVFDRLSVRRFEHAQGNIRPSVVFSFVCNFCRFWPLRIRLLDTLETGQSVEEGAPAEPIRLYHLTNQTHTLHTFAIFPHFLNFCLENIFE

SEQ ID NO: 148263 - protein, 42 aa, Heterodera glycines
EFCQNVNLSSAVRSGRPSADSPMLAKSAFPLLFGPCRRLLSV

SEQ ID NO: 148264 - protein, 127 aa, Heterodera glycines
MPIKCPPTERRESCVEVRTKVAEINRKTRNILFPIKMPNTKKIPMEKQMVAMTMPALIPCVFVEDEASIQSQDNVTPMPNIVMGDQRAIAITNGENGTMINHAQNDGNNGEDKRTWVCDMLKMQNKS

SEQ ID NO: 148265 - protein, 280 aa, Heterodera glycines
MFLALRLTAKSLIAFQITRSTFACSKAFFFGETNPKVTAYPNRSTVSVQMSHRNPLTFCGPLRSILMFEQSPTVILIALMSIVNGSGSAAKTRGLVCLLVGWVVLFIMDSDSPLTNHSESHRHQSGLNHVFYHFVGWFGLSDHSGGVLLLLFAVFLRMIYESNYRHLAVEIGGPKRLYALSSLVASLLLTPFAVLVLVFSPSFIHSFLEFPLLLLFAAAFVVVIDFYADNIAFQHVADPATFVLTSTQDSRRSVGGHFIGISEDGMPLFTHGEAFLEKTS

SEQ ID NO: 148266 - protein, 215 aa, Heterodera glycines
MAVSERIRKCVIVTKLADGTFEECRRLAYIPLNKWHVTVAKRKNYPFYIYEERKSDGMICQTHQKFIMNAPKFNEQTYKLNITNYQVDERKDIQEFVDAFLRASEDEQTEANETLREKAFDHLFSTQYENLYERYRTFQIRFDELSATTLRRYKKFFNLPNRSGANSKAQLLEGINDHFESIPVDLAETAAHFLDTIYKKRNRLDYPNNIENSAG

SEQ ID NO: 148267 - protein, 76 aa, Heterodera glycines
MVVLSKLGSPLRPFSNDYLLCRFQAFRNYAIKKERPPPAKIQVPPPANETGHWKYERDYSYDLRYSNPINKYSSFT

SEQ ID NO: 148268 - protein, 33 aa, Heterodera glycines
GKILALVHLMSPIEFYESNQLTIPGFYTITLFM

SEQ ID NO: 148269 - protein, 69 aa, Heterodera glycines
MHKIVKYAQKSRNMQKNANKKFGHGADELEQFVGRTSHIVRTVHGPAVVLQGHGAGRVVDDQAGGKCQD

SEQ ID NO: 148270 - protein, 71 aa, Heterodera glycines
MARHGVLGGNIRTVDVRVVDGHGNCIYTPPPAAHVPQLLEQFIQDVNSAIGQASTGLMEARVVAAWAHYKS

SEQ ID NO: 148271 - protein, 29 aa, Heterodera glycines
MAPGQSISGQSVSGQSVNSFLGNLRAFDH

SEQ ID NO: 148272 - protein, 22 aa, Heterodera glycines
MVGIFGWDPGSRNSKSEAWPPM

SEQ ID NO: 148273 - protein, 610 aa, Heterodera glycines
IQAISEMPVPTNVSEVRSFLGMITIYHFVKTMRFIRQPLDELLKGQSVAMVRRLSKCLEVVSADASEHGIGAVIVSADASEHGIGAVISHRFSDGSLKAIAHASSSLSAAEKNYSQIEKEGLTIVFAVQKFHKYLFGRHFVLQTDHKLLLSIFGNKKGIKACTANRLQRWAITLLGYDLEIEYQNTADFGQADVLSRLIAKTPVPDNEVIIANIRESNETGVLNFVSKTLPLDHSDLANAAKNDQVMQKVKKFVCSYPTKNKMAADIVPFHRRRDPLTIEDECLLYADRVVIPASLQKDVLQLLHRGHPGMKRMKALARQYVYWPGMDEQIENFVKMCNECTMEAKMPVNTELHSWPKADGPWKRVHLDYAGPFMGKMFLIIVDAYSKWPEVFEMRSSNSAATIDKLRSLCASYGLPEILFTDNGTQFAKEFKEFVTENGINYVFSAPYNPMSNGQAERFVDTFKRTCRKIKGEGASEMLTTFLATYRTTPCEGKCPAEMFLRRKPRTTLDLLRSAMEKQFNRRHGAKPRSFALGDKVLARHRAMEKQFNRRHGAKPRSFALGDKVLARHRLSQPWRPGKVTKCKGVIYDVEFFDGKFGRFHTNQLLVRS

SEQ ID NO: 148274 - protein, 425 aa, Heterodera glycines
MMARASFALPLLLLLLPLFCVAMNENDGTVAGEGSANSETWIEKLANLLSEIGKICDVYTILPRSHYKILFIFGKFDNINDKKVQKIEIETDDKGDFRWNFDEMIVQNKTVAAGDGPEVTVLLCRTSKKHCHVFRVYESFAEMREEMTKNEGRFYGAFQVMYEHYGHCISMESGAYFGETEQCQKSEMSQSDENSGMAYSPASYSHICDTYTILPHTYYKILLLFGELKNAHGEKVEVPKIEISTDENGTFRWNFDEMIVKNKSVASKDGKVTVLLCNLVKKECRIFRVYDNFGKMKMEMAQNECRFYEHFQVMYEHCDHCTSMENIGKRNEEGNYLGEVSQCQEQKEKDGTGEQKHPKLPISTFPSFHTLASPENEAEKEEEDVEEDVPLLLERGGHEKHGRTHHRSLRHRRVGQSQAEKEEAN

SEQ ID NO: 148275 - protein, 121 aa, Heterodera glycines
MAECCSSVSASDNGTAPSSSSSSWAELGLSDATLNALGTMNFPFPTPIQNAVIPIAVKLKKDIIGAAETGSGKTLAFAIPILEHWLTNAIATNVQHFPVKGSLFALIISTTRELDVQQGCA

SEQ ID NO: 148276 - protein, 178 aa, Heterodera glycines
AHFNPFPLFRLSVKQNKYPVLFLCVGQTDRYVPFLDERSKVTYVPFLDERSKVTRVGSNFAACSNLLGINLHSEELLGINLHSEELLSDPSSLKRAVAMKLITFVWVEDLDKLEYVAYFRRQNVDAIIYDRIGELETRQNVFVVEREVKSALFKSPRTSPSLSRANSLFRNSQSPTMP

SEQ ID NO: 148277 - protein, 494 aa, Heterodera glycines
MSNTFFVHLSSNSPDYAENTPNKFRVRLPKPIYFNGSWVCGLHSINYAYSWPSTIGTLDDQWINIHFTDGLDNERLRIVRVPAPKASNTTIENLRNFLISTLKNHAESLEKIIKDSSQRSIKRKRAASQPKSPPSAIVPKSQPNVSPNVTLNVKVPTSPPRVGQQPQTKSEDISDSILNVTKPSEKQPKIEKESEIVKHETEKINQKPTQNISLPTNQTKNVNSEGVSQNIIPPPPVTSPSIHANKQNQEPKKNDESPSQVGKTKHQLPVLNQAIVSQAQKKITATPTQRSKKSTIEIVPPPHRSTPTSPIRPNVTEKKTTSPPKTISIDTIGPPPKQRNEKSLNINQGQTQLVTEITPENSKKTTITTTTTTTITEPPKETIDDLVGQIEEPTERNRVEELISVLFGDEKWKQINLRMVRQIIEGVELQYHPNLDRFKAVFTHPRIEFISFSPQLGYVLGFENAQHVRNNEIAKYGSDLRGFCKLCRLRQRVD

SEQ ID NO: 148278 - protein, 419 aa, Heterodera glycines
MSNTFFVHLSSNSPDYAENTPNKFRVRLPKPIYFNGSWVCGLHSINYAYSWPSTIGTLDDQWINIHFTDGLDNERLRIVRVPAPKASNTTIENLRNFLISTLKNHAESLEKIIKDSSQRSIKRKRAASQPKSPPSAIVPKSQPNVSPNVTLNVKVPTSPPRVGQQPQTKSEDISDSILNVTKPSEKQPKIEKESEIVKHETEKINQKPTQNISLPTNQTKNVNSEGVSQNIIPPPPVTSPSIHANKQNQEPKKNDESPSQVGKTKHQLPVLNQAIVSQAQKKITATPTQRSKKSTIEIVPPPHRSTPTSPIRPNVTEKKTTSPPKTISIDTIGPPPKQRNEKSLNINQGQTQLVTEITPENSKKTTITTTTTTTITEPPKETIDDLVGQIEEPTERNRVEELISVLFGDEKWKQINLRM

SEQ ID NO: 148279 - protein, 395 aa, Heterodera glycines
VHAVQTVTILHSNPSHSAIAQHYGCEEVQQASPTAEDGTKNANGGADGGDDQLLLLSALLGSSSLLSSPASSARHGAQRWRRGTIGEQSIAEECSSGTTVSAGAVDGRENEGDDDENGTDCGEHGDDKEDKKSQPPLSALLSADKTPTKSQFANVNAKVQQEHQQQRTPLPQRFTAAASVAIGKLSGASPPPPALLATATTAQMLHLYNANIGNKSATQMITAAAGAVDDDDDNDEDEDATTDRPTDQSDANGSSTVPPSPALSHQLTMAAAKQQLLKHTAPKSGSADKIVDDKANVHVSMQQLLAMRDDGMELAFERCKAWSKYVSQLLQIVKLRLSTEEDYVNKLRRQSEQAKALLAVGTAQTVAANVGKMPLAGVFERMLDGTMQQTVHAEC

SEQ ID NO: 148280 - protein, 79 aa, Heterodera glycines
MAAVDQHQQQLVERIKQLDTLSTTADEQFDNSLNSNFDQLKMALAKSTGTFASGGSAYPKVVGMDWSILSVIEVLRYFN

SEQ ID NO: 148281 - protein, 84 aa, Heterodera glycines
MVWKELAKVAAAGAVAVSRALARAMVASREAARRQASAATASDSAGGANNTASTSSATSSTASARRATEREALQTNTRLGITVQ

SEQ ID NO: 148282 - protein, 141 aa, Heterodera glycines
MDIKWQKSQNMDINFSKLSAKFLQIYWLKLHMRYISKFFDSSIFLPSLVMIKVKLSKRLKWKIIHNSCYANSSVARQSDSALFPSFLPLSHWRKEEIVHCLTVCQRGAAAGGRVDSKQPCGVLAGSIVCGKREEKIFGILS

SEQ ID NO: 148283 - protein, 24 aa, Heterodera glycines
LTHRPLRRKNQLNCTWSPKLTRRV

SEQ ID NO: 148284 - protein, 246 aa, Heterodera glycines
MNRRWICNDVWMDIFPSFDRPQLGLKLALLSPRFDALVDKHFNGKSELTIWRTIEIHKGKGPEPKLSVWMDDKFVPFPLPDRPLPSKIRFKNLRIEYIDHSVIAFLRSNHQIFDKRGTNLHLWLPLSNTTDGQPIWDVFVREIWPIFSANIRHLRFPHGDDLDNLRRRTSPTIFTDLNQLNSIYSGDLLPAAIDADFDVPNATISAGQALSKWLHSPRNDGQPKRFRCGRNLNAQEDFDWVNSFKE

SEQ ID NO: 148285 - protein, 50 aa, Heterodera glycines
LQIYWLKLHMRYISKFFDSVRRFDKDGFRFAISQSTFGNWSRIFSAITCN

SEQ ID NO: 148286 - protein, 106 aa, Heterodera glycines
MVQFSTKMLTTFSLFIIKILLLDSVEAAGHKVTIKAYFKDFENEKQLKGGIFWELTFENKEKLKPDEKCSNYEDEEDSELEALLSTLHAAKFPAEKANDKTPSRKK

SEQ ID NO: 148287 - protein, 104 aa, Heterodera glycines
MSMVDFFRVKKDIRINGQLPAVRQQKDRETLFPLSCIVILPSQRLPLDKMADYVSRELLNIKFGDGGQLTFKDRINPGVRFLETSDRVKNWVVGYPRQINDQEV

SEQ ID NO: 148288 - protein, 62 aa, Heterodera glycines
AIFVTNSTQISKIFSRRRLSAPPDLHFPLFLQVFCLKTAKIGSFLVKKCSCYPAVEKKLLVK

SEQ ID NO: 148289 - protein, 36 aa, Heterodera glycines
MPFVVIHFALHVNTANSIDVFVERGRRGNGLKLRKI

SEQ ID NO: 148290 - protein, 323 aa, Heterodera glycines
EFVKSWYPILKIKDIGNASSKLPNAALPLAQIVRWDWDQNGAQQINGTQILKKGSAISFNICANDSASFVIRILKKREKKNNTGPYTAKNLERLEKLLEGSGNPALNSIIQRLEKLENLVQQLVEGENRCGNRFADPQHASHSSSVPISNNGTVQWGQPPPFAGTGLVSRMITEAIINSEQLKEKANRAVIEKLPEAMDERALVEQIADECGVKDKLTPDIHRHPRTQLTDGGVKKDRILKVPFSDKYSRDKFIFNFRNALKKFPNLPQFIKVRRDMTQNELKILYSLRQQAYKANIAAGEYKYYVVDLEIRSLKNPHPLRTR

SEQ ID NO: 148291 - protein, 40 aa, Heterodera glycines
MDYVIILLTKCLTSFCLFFISCFLITEKCPKNGSVVLVLF

SEQ ID NO: 148292 - protein, 70 aa, Heterodera glycines
  unsure (1)..(70): unsure at all Xaa locations
KIKNILGLFLKYLYKHIRSFSIFSHFSKIHHKILQNQKSXHRRICRIFFLNTPSKNGKIQKFSTIFCFVF

SEQ ID NO: 148293 - protein, 138 aa, Heterodera glycines
LPDLYFANARQANFHEVTVPNFNLFISTDGTVSYSSRVTLTVACNLKLQDYPMDEQQCHIRVLSYAYIAKIVNVTWFRRQPILYNPEIDLPEFDIDQIVAEYCDGTYRYAVTERAYKTGTNWLELVFVYLINNFLFSK

SEQ ID NO: 148294 - protein, 105 aa, Heterodera glycines
MHKNQIIGYKNSKHCGQNILGYTHSDEPFVAYHRATEHAPNRLKKLQRFRATKTKSATTFMASELHRKIRRPPSNSNGEPLSVQLGFYLESLGNFRETQMVYERH

SEQ ID NO: 148295 - protein, 110 aa, Heterodera glycines
MPSSSPIVGFSLLLVLIAQNVFVQGFGLLNSKIDAASKASIKCCVKEAHLSMECAKSACCKRKGVKAPCLDLCNGKNPDYLPDPAYVPCTFPGKVDNAIQKCNHDAWKRG

SEQ ID NO: 148296 - protein, 18 aa, Heterodera glycines
YREAIPEGFGLPINLGAS

SEQ ID NO: 148297 - protein, 95 aa, Heterodera glycines; identical to SEQ ID NO: 138780

SEQ ID NO: 148298 - protein, 317 aa, Heterodera glycines
MILQLAIDTAYGCQTNESVDGIFRQNFNEILGEMFKKAEQRAKREDNNLLYVKYGIFDTNDIIVRSIFDDYCLWTNDAIFTEFVKGQETNFEKFYRMLKEYSNFEKSKEFYLQKYGAYFGLVYLMRKNWQCAKVGEDLKEKCQKYKKYLHILYEYFFRISAEAKNANMTNQLSAVKPIFKWGNKYWQFMQIISIIQNLNNFSKCFWKKGEKECENAYGNYEMELQNEKETNHAIEEEEKNGQNLERKSEKQSTEIGKLRTEFDQKMEEIYENTKEKVAEEKSKLVKKMAKLAINRERKMMEDEFEEKFGAFNSSPFA

SEQ ID NO: 148299 - protein, 612 aa, Heterodera glycines
MQQFEFENGSESNMDPANEGHHRNGAQHDENVQDGDGPVASTNEEQQKVARVNEATRGSNMATGVATNQQGMLPFPSRNLRSVSIPVRTARDRIERASGTLAARIAEAREVIDQDLTEGEAGYQAARLLAMERGLKEATQIFQGHFEIGMAAAGAEPAGHQDFFYDLLTAPLPAATKELQLRNHPTPAELLQIADEHIGDLRTMRRALEDEEEAIARSRLSGSFGTNNSHPVGDEPPPLENRNIEECERSFQVAAKRWQNGGQGVQQHNRRPMGRVATPVMSNLDGIFQRRAKVPSVASMRVTNTAREWINRNRDEMGAFPPATAHRPALMQPKIEKQQAHVNDDYRERQTYPIRRHARDEGEHDRKHGRDEITGMTTFETVRLQPPTFSGKPEDWTTFWAYFKRAVDDKPIPGFEKQLHLLRCLKEGSPARRAVEVYPPSDGNYPVVVHLLKERFGDTDDLQRAIRARLLHLPPTKDNVNSLTTMIDEFERCVCQLEQLGANVDDDSFGPLLEAKLPVRVLTELRIRESMMGSKWAVREFRRAVTAQVRCMRSAESALAAMKDPEVRTDHKTERDQTGREVQAGREPFQRAFMVRDSQPTCAQSNGTRSEE

SEQ ID NO: 148300 - protein, 1359 aa, Heterodera glycines
RAVDDKPIPGFEKQLHLLRCLKEGSPARRAVEVYPPSDGNYPVVVHLLKERFGDTDDLQRAIRARLLHLPPAKDNVNSLTTMIDEFERCVCQLEQLGANVDDDSFGPLLEAKLPVRVLTELRIRESMMGSKWSVREFRRAVAAQVRCMRSAESALAAMKDPEVRTDHKTERDQTGLEVQAGREPFQRAFMVRDSQPTRAQSNGTRSEERYGTNARFARRSITHANENESSGGNWPRVASNGPIATTEIWNCSLCLRSGHRPSKCQAYPTAQARRKRLIEQKRCLRCMSSDHLFKQCQRVNRCNACRKDDHHWLLCWKSISGGQSRSFTEHERRAKNHATLISGMDRPSHFTAVRDEQNNRDEFDMNAGEQRAFTTFGSRLPAQQMICRVIAAAEEGEDECQTTLLLDPGSHVDGADTELIQQLGPQPIDKRPLTVQVFGGKKQRIRSATYRLRLKRTDGKWESIEVSEVPQICTPIRTELIESGATPDSDPRTITQTTQPQIMIGIRKFWDYVVGFRKIESGAHVIDTVFGQVLCGEGTQASSGATPAVSILTTMPCGNIHQTRTNKRQQIGEVRRNWKRKRKSRKNNSRGIVSRDRHNSPAEFGPDRLGANEVITSRAEPIGEMDPNQRKWPIGWIVETKGASEHNRNAIIRMANGRTRRRPIKKIWPLKEARLKTGETDDRADEAVHERHEEETRAAKTQSETRDRNKPSATRREERNETKSNEESVENRRREIEAVPPDGKANREIRSDNSRGKGPNDSEEKYGSATTTKKSAVFGKAAEVPSAAQSKAGNSARPHSAQRHEKKYLGDSSMAPSLLNVPTKFQPNSTISEGGDRFGADEPQAVQADEIGGEFPEAPAVEQQQNELERTPNNPGEEVRGEQNIQGVQAVPEVEPRKSARTRRNRAIWSPERHVPRKRGAIQPRTGMALLIMLISIVGTFGCQPSIRASGMDPNLPFREGPRVPCTTECAERGVTNVSGREFNKIEIRCDDGCWATMPKSTDVNYGLPAKKLMHGYPCHGKCWWGSNAPFNTTRRNANRKTGSKTRCYNSWTHASELQLSRGAAGNVANFFIGDEKAGQSPPIAQMNGTGLNRSKKNEGFPFPLALENPGVGPERQRISSSSDSRSRSLADRCQSPASRSSRRDGANSRRRRNQAGQRRKEEPSGAKPSTEGQARSSPLIPPAGEARIAGVSLPPAGASTGGDGSRNPFPQPESRGSVSVSRQPEHPPQETGVKTRFIESRAKSNSRPFGAAQRVGQAPFTTNLVEQLPPVRSCSKGSDKPFTKILSVVPLSKQRFAAQFSQAPIQICHPSPLPFSSPFGADRIGQQHQTHQNERQKRVRFPLRQANGVSRRKKGRER

SEQ ID NO: 148301 - protein, 24 aa, Heterodera glycines
MMRMYERMVFESLMIVLKKGERIE

SEQ ID NO: 148302 - protein, 50 aa, Heterodera glycines
MSNSFFVILPSNTPGFVGNKTNKFKVHLPKKLVFDGPGWMVDMSGIIYPN

SEQ ID NO: 148303 - protein, 247 aa, Heterodera glycines
QDKLVMPLTTLSGHPVRIIYGTAWKKERTAELVRSAIKAGFRAIDTACQPKHYDEALVGVTLEQLLREKFISREDIFVQTKFTSLDGQDPARVPYDRTASLPDQIKQSMERSLANLRLDFVDSLVLHGPMRTLDENRLVWRTFEQLHGEGKTKRIGLSNCYDLHLLRALYEAATVRPAVLQNRFYAQSDHDRAVRAFCKQNGIVYQSFWTLVSSPRIALPEFFKNLQSKFSPRIALPEFFKNLQSKF

SEQ ID NO: 148304 - protein, 88 aa, Heterodera glycines
MEKIEFLENWRCKCSAILRIVTQKKGVFDFSREFEDHEFDSKCSWRGFTYFIAFSELMDPSKGFYNREEDKVTLAIDVTVKEAKTDNS

SEQ ID NO: 148305 - protein, 84 aa, Heterodera glycines
MSLAWSVRLCKFQFQNCAMFFWLMFRLAFSILSSIRRFNNARNGQYFSFPSEFSWHFRWAFVPTSVSEPKANFISEKSDDLDGN

SEQ ID NO: 148306 - protein, 102 aa, Heterodera glycines
MHIYVCVLYFGLLNQNLLGFGLLCTKLMLDRYWNMLLSLPPIPYQQRLDYLQLPTLESRRKLSDLFMAHKIIYGRTDRIPLKYSNLLNALTCPFIDLTRNIN

SEQ ID NO: 148307 - protein, 15 aa, Heterodera glycines
METKIFGEKREFLWP

SEQ ID NO: 148308 - protein, 265 aa, Heterodera glycines
MPKSGGNANIGGGAAPTPIPSPKNQKQKQQKQPSKAGQKNAPKADQKKVAPKNQQNGKPKSDQNGGPSPMSKKEKKKQQKQKKNHMKFARESAERLEEAVKMIQARKEGSEKATGEENVKKDKDAVYNMVASSLETLLPVRFVFGRLRSSARLVAKQHSSNIVQAATLLEPKKFKQFVQLLDSSNVAKKGGVAEATEDDEEKAERKEAGEEDEQRVLALALCVLSAAMCLLGNALPDDEDTAQRREEYLNESTELRKMAKANIHW

SEQ ID NO: 148309 - protein, 88 aa, Heterodera glycines
MNYVLTFFAEKILNFPMENPSQIDLSPFLLFFNYSPFLPAGVVSQQWTNKCIFPIHILSIVILRPTSAVTVLGQTALRLTYPKIKCPQ

SEQ ID NO: 148310 - protein, 98 aa, Heterodera glycines
MLRNIGILSLLAFFFLCGTINGQQPPLANGLEPTRQRIRNTLGGFYSGNVTLYFRNSPYRVERELIVESGATITIETGVQMYFDTGVGMKGPGLSWPG

SEQ ID NO: 148311 - protein, 259 aa, Heterodera glycines
KMLRNIGILSLLAFFFLCGTINGQQPPLANGLEPTRQRIRNTLGGFYSGNVTLYFRNSPYRVERELIVESGATITIETGVQMYFDTGVGMKVFGTLQAVGNEFAHIQMLPYQEQLVYDSKLPELRLIDGPTVRQGRLQIRFRDRWRSVCTQMTNWTSIDTGTACRTMGYDDGAFWRFFQRNNDTYPFVMPAPKCTQRQNSLWNCPGFEDKEQSLWNCPGFEDKEQIPLSENLCQGEDDIGIYCWGRPTFTGWARHWKGI

SEQ ID NO: 148312 - protein, 68 aa, Heterodera glycines
MCANSLPTACRVPKTEIDGHANRAQIMPIRNLARDLETRTWVFLEFCPGNPCPVIMLYFKLSKNDKYF

SEQ ID NO: 148313 - protein, 128 aa, Heterodera glycines
MVKKQKTDDEKREIVEKYFKIKIKFMKNGKHSQKEWKEFRAKIKQMFGVIFQAIEKWAKNLGIEQNNSKERKMLSIAEKIETIKQYYQIKKQNPKFKEYEIAAKLGIPMSSLDKYKTKYGNESKNKLL

SEQ ID NO: 148314 - protein, 74 aa, Heterodera glycines
MTQKMRNFVMPMLRMNQIAVVDPFTKEQLLLPVNVLQFSHNFAIVLISLGTFLTIISIGLAAFFTVKRNGKYVK

SEQ ID NO: 148315 - protein, 77 aa, Heterodera glycines
RNAYLSSSFLHSPRRKESLLIYIITHCQFAFLFTIGSILHLLYYHYSGLLLRFTHSAFSADTLCSFNICLMLPFFMF

SEQ ID NO: 148316 - protein, 267 aa, Heterodera glycines
NLNSICYWLIGANSACIAIYSFTYFVQFGIVFFSPSGIPLWLCCLLVSVPLFFLCCQYVLFPLIALDRLIGAVFPLKQMGFLYKRRYMLFAFFASTSFGTVIVALAVNESIVNFSEKLVLCMTYDPVPAYFANFSWMLNLCSIVLYLALWFPMRSNETINRKVLFSLMAIFLVETFGWVFNLSVRLLLVQFGTTESTKWLVLSYAGYLTQFSLALNGPILYATSTEYRTAFRKVFGFGQVNLPAFTIQVVPMNRSGKTIGQSGKTIA

SEQ ID NO: 148317 - protein, 60 aa, Heterodera glycines
ILPKTIKKRIKNGYFEQISWVGPGLSFWPGNPFRTAEAEQTSAVPNLVSIVERSNFYAFR

SEQ ID NO: 148318 - protein, 43 aa, Heterodera glycines
MSIQNNFLLFVVSALLFFIGMAMEGLNSNIYLSLDLAFYFKKD

SEQ ID NO: 148319 - protein, 49 aa, Heterodera glycines
MTMLKTVLVILLPIFDHRTPKIIQWLRCFVQGPLAFGYFLSETSEHNFM

SEQ ID NO: 148320 - protein, 761 aa, Heterodera glycines
KIVDRINRSPSRAHGMRPIDVGFFNAQRVWKLLYDGHGPPQKRRPPRFRKDDFVRMSREKGQFEKGYLPNYGDEILEVDEVLKAVRPIRYKLRDEHGEKFKGSFYEQDLARVRKDAETSYRIEKVYRKRKRADGSTEMLVKFIGYPERECVDKSTHRPYCIPFIFLCEIKMSSNSFFVFLPSNVTDYPDNQPNKFRVRLPKPLHFNGSWVCGLHSITYPYSWSTIGTLDAQWIDIHFTQRSTMDEDRPRVIRVPVPKISHNRVEQLKDFITATLRNHIGAKMLPLPHEEEADRNRTKPLGSPPPRKRDRRDVNNTTPPQSPVLFDEHGKRLGSPPLYDPNAGEEQHMSDDDDDMRTQKGTLIIDPKSPSPIATPPVPAVKPLTTTTPTPPAVKPVTTTTTPAPQSSAKPSAQQQKPTPVPPKPSAPQTSEPKIATTTTPGPPKTAITKPTTLPPPPSPPTVPLQRKPTTTTPQTPTPTATPTPTQPITTVHTPKNTKTTTTTTTPIPQTTTKTTTQVSPTPKIPSPKPPAVKLPPPTSTTHPPQPEPTTTTTAPTKTFTSSPTTGAVIGLPSKEKQIPTVDEPVSAALTLEELDLPENSFIVEIDSLQFVPNSVSIQYRDDVERFKVVFKNDIISHLSFSPQLGYVLGFENPKHVMSNELSKYPVDLRGGISSFAVYSKGLTENMIIGNTLSSLLRVVSISGAIPGDYNEKIYDSPIFARVLPREINEIDIELRTMDKGRLVPFAYGTTMVVLIFKKVINF

SEQ ID NO: 148321 - protein, 81 aa, Heterodera glycines
MYIPESSSRGEDLAFATIACNSMLITAPASTFSWWMAYLMPDNSPIYYSAHLEKTYRGKDNFLKEWIPLRLIDGKKIIRDG

SEQ ID NO: 148322 - protein, 126 aa, Heterodera glycines
MKKNEKKVFYINNFMKKAYKRTELTYFNKLQNASILYFIFLDLFRHFLMKIKLIAVLVLLDIFGHFHKVSCESASNENKITAYEPSEHSITPLKDHINSITGQIDLSQFNATLENLLSFRQIVCQH

SEQ ID NO: 148323 - protein, 313 aa, Heterodera glycines
MEESIGKDGTPNATGILPKPTFDILCIAINAVECAFCCPTVVLCFLFWRLVYQTSLLHNNLKFILVAQSIYAFLYAFVQIFSVIYGLFSPMALFFFVNAFRYFLLVYGNFIGHLLIAERIVATFCIKKYETVKNWWTLSFCVVIIILLSVLNAYYYSTTSMFVAPNVCIYTQIFATVASFSEIFLVENIRTGRQLSPAFLFHFLGVLLSFFMILVIRTQTITDLYLLLIIGKFALFLQGINNLLILFTTIKCHPILCRNALKFVQKYMKCSTTTAAVDPSILASYVNGITQRQIPVSTNMDNYFQLLQRSWEI

SEQ ID NO: 148324 - protein, 142 aa, Heterodera glycines
MKNLRVSHENTVSDEKINVLFRDAMKMCVDSHDDLLFVALKDGRIVAIDRQMKLVERFGHSITNMGWDGKSRLIGFDYLYDDQQLCLLLDDGKVLLYATNTKELKCAIELKRNVLGCSWSPDLQLLIVATDSHLLMVSREFP

SEQ ID NO: 148325 - protein, 439 aa, Heterodera glycines
AFIESIEQFAAQVNDVESLCVFLSSLKTVDTTQQAMFAPFYPERQPTNQQKQQPKANRWTTSETPGKVNGICERIRNHLMSLGEGEEEAGRGHFLRLYPVVLCCYVMETPSRVSAALVNMCTQIAKAKENKNGDEHSELIRQWTRHLLNFLKESDLFRQALKTYDVEIALMVAQSTNLDPKEYLPILNDLKQKTPSTYQKFHIDMHLEDWNSALGHIATLSQLQQKDVIDTNDEDKSEVTEGEAVQNTPNYLEECLKLKNVEKILECYEKANAWIKLSAFVTENQSTLHGIVNRAQVLMSTRCAQIIEQIDSWRDTITKHTKRLEVLREEKRAKIEAKQTASGGDDQLDGFSESSVTSSSFSDSSSKESRSFFELSSNALKGGKDWFKLQRMERQKRKKLMIKEGSHYEDGALLVALKDIYQRIDTQQGHHTTHIPFEG

SEQ ID NO: 148326 - protein, 95 aa, Heterodera glycines
SDELLELLPALLSMDLVDRACRLQNEMLTFLEFVAEVHAQLWPSHLEAFHLTGPLALHFDSNSCEPMPRKIHLTDELMPPKLRSKGTEWKLEIVK

SEQ ID NO: 148327 - protein, 220 aa, Heterodera glycines
IMPKAPPPHLLACFLPLFSCLPECVLCRECALSAGLRCDFPPVCPFGDSVVVNCTPSAACANVPAVVRLQAKCANVPAVVRLQAKCRFCWQLEQREIVCEERKNCSTNELTLHRTKCRAKPNAICAGRRHFFKNVRCHWTSGHSCHWTSGHSWRKALFLSVTLGGFGVDRFYLGFYLGHWKSAIGKLFSFSFGGLGVWTLLDIVLIAFGYIQPADESLYI

SEQ ID NO: 148328 - protein, 42 aa, Heterodera glycines
MGKYCNTFLNLFVYDLLKYLTVAPYGAVKCAMLLFAKTINMI

SEQ ID NO: 148329 - protein, 126 aa, Heterodera glycines
MDVKFVIPKNPRGQVFPTYEKKMQNKVTLLNFSMALNRKNAILYWDSHVGISSTAPTSLHNAHIVGGGGGGCEKTELTKCKAQLEQSVKTLAPFEAKCQTMKQEEEKLMADKQNMAKESGGNEAAQ

SEQ ID NO: 148330 - protein, 81 aa, Heterodera glycines
MLEPFAAFSKGHLSVLLPCFDTAFCSLSAKSQGDAVSRATIGTKQQRHRHFRSVAIDGTDSTEMPSAIVAMEMLDNEVKAP

SEQ ID NO: 148331 - protein, 49 aa, Heterodera glycines
MAVKDPHTIAAVLFVPKSDATTVRKRDVQVKNQAKQSEPKHMPKTQRKF

SEQ ID NO: 148332 - protein, 208 aa, Heterodera glycines
MSSSDRRRKLAEKPSKTNQKNSSKDKESRKISEKEDKRSKKEKTTTEKEKVDKRTKKTDKKKEKSKEEGGGEEEKKKRREEKEQQNGRKRSKKEEQKEAKNEEEQHMQEQQNYEQYEDDFEQYESDFDEEADEADGNDEEEKEQKIGINEAEKDGQESRNDEEEADDYPVKSSLLLRRIAEGGKLRTKELGKDVRTEVRREVNFDDER

SEQ ID NO: 148333 - protein, 211 aa, Heterodera glycines
MALRKQKNDVIWSNDLFAKYKQKTGKSDLQLNALPSLSGGLISFDPPSVLLRLLDAFVMKSSRSADQGIKAEGIILSLCDIICAKSDNAEERVVQRVQMGNWLKQQLNDRPQQRLGPSASVFDLIFHHLVCGACEKAIATARQSRHYNLALLLSLFKCPSPKLTRDQVKKQLSVTDKKPTTAIGYTKILELLSDDWSDKRKQCLEGLDWLQ

SEQ ID NO: 148334 - protein, 70 aa, Heterodera glycines
MVRATTARTRASAARARSIKINRRNAKKARAAIGRAGHTRNAIAREKCMMCLGKVSFDQCPLAVSHSLAD

SEQ ID NO: 148335 - protein, 84 aa, Heterodera glycines
QYPSFSAFCIPIRQQQQQKQQQQKQKQPVECKYLFQNGAAATNTEQLKRRLLRRQRQPRMWRWISIMAQQQKKDKKLPFIRLII

SEQ ID NO: 148336 - protein, 578 aa, Heterodera glycines
MPPPSKHLKSEEGRQTTTTAFNSSRETDGFGTSENGQKWRGGKEMREEGREKGKEGGMREEEGSANGRKEMRGERERGKEGEMRGRGERGESANGNGTGEREDKNSGRRSGMRKEEGSARGNYPMDTKTVPTNSSAAPSDGAATIAPFPQPPKRPFEEMMIKKERAELLVEKEPKTDMERVKKDGGNGEKKKRMEEEEERSAHNEKDNGGTAAVMGNAQNVPLAGRFAPMRNDKRGTGRQEEHGNRREEDEGGENNAEERGKAEGRQAERKESRRTETERGKDNGKAEETDRSRGSWERESSREWERGAKERGGNGWDGENKQQRERGPSDREEEEGKRRHEKGQSEREEEEGKRRHEKGQSEREEEEGKRRHEKGQSEREEEEGKRRHWGKGGNGRAATEESLLFSPLQGPYPNDGQSGKSGNGGRGERVRERGGRGGEREDGGEERARGRERWEMAEQQRSRNAQQSPSEADRSQHSPGIGRAVSRHQNSRTSPSSSSTEENVSRESVNPRQHARTVQQRPTSVHSRESPPPVALGFQRAIPDPNKFFPDTIREAFPPLPKPFEGLEEKHGKENGG

SEQ ID NO: 148337 - protein, 29 aa, Heterodera glycines
VFSVHGTEIRQQIYIICNEEDELDAETVA

SEQ ID NO: 148338 - protein, 74 aa, Heterodera glycines
MEFVGEKLIECSICSQSFPVTPPFNICRAIRHIKLKHPEVMPEHRGGQSARDGFQCQEKQQNGNGTEGPSNGEE

SEQ ID NO: 148339 - protein, 208 aa, Heterodera glycines
MLFGIQNDLVYALLLLFSALIAAALRLPNSNAIRLQLDGLIGLSIAYIVGGWMALCSLIIVFAHLALITFVRCPSRLTNFSFFGTFIFLALLRCQHFAIGLAYEIADIRRKKDGTDGGKNGNNDTAERYEHEPNALEAFNYLYSFTGLFTGPYYTYKTYADAIVRPTPIQWTKLAPLIWQKMQTLCWTLPALVLMTWLDPLNVRRNQK

SEQ ID NO: 148340 - protein, 36 aa, Heterodera glycines
MNDDETEKRIFMIFYVNNSGLGSYQVTFQGMILFKN

SEQ ID NO: 148341 - protein, 34 aa, Heterodera glycines
RVFLSSISLIVYDLSSVFASFTVTSMAKVTLPRF

SEQ ID NO: 148342 - protein, 100 aa, Heterodera glycines
MGLTIWTIRLGHFVTMSLTRKRAGSVSTISLPLRTISMDIKKVSEFAREIILSDRISETVYIGGFPWKIVAEINPKKGSTDNEKWLGIFLLCNAPKEGAN

SEQ ID NO: 148343 - protein, 31 aa, Heterodera glycines
MERKGSIPPEIYNNKKIQKIKFYSQNFLSAC

SEQ ID NO: 148344 - protein, 15 aa, Heterodera glycines
MSIISSKPMNISFSN

SEQ ID NO: 148345 - protein, 68 aa, Heterodera glycines
RENFVDLLEYCEEHLKVRRILACFNKSDINPCQGIPRALRCIGFTLLPPERYPAGIDKNTIFAMVYKI

SEQ ID NO: 148346 - protein, 264 aa, Heterodera glycines
AIFILIFASIINITQSNDAEKPKGPKVTEKVYFDIKIGDESVGRIEIGLFVYFDIKIGDESVGRIEIGLFGKTVPKTVENFVELAKKPKGEGYAGSVFHRVIKEGYAGSVFHRVIKDFMIQGGDFTKGDGTGGKSIWGEKFPDENFKLKHYGAGWLSMANSGKDTNGSQFFIWLSMANSGKDTNGSQFFITCKKTTWLDTCKKTTWLDGRHVVFGKVLSGMSVVRRIEATKTLGGDRPEKEVTIAAAGQIPVETPFSVHKEDSR

SEQ ID NO: 148347 - protein, 465 aa, Heterodera glycines
IRQLSQNATIRQLSQMSTIRQLNDSSTQPNVNDSSTQFVNSAKCQRFVNSAKMRRFVNSAMSTIRQLNDSSTQPKCDDSSTQPNVNDSSTQFVNSAKCQRFVNSMIRQLSQMSTIRQLNDSSTQQKCDDSSTSQMSTIRQLNDSSTQPKCDDSSTQSNVNDSSTQSQPNVNDSSTQSSTQPNVNDSSTNDSSTQPNVNDSSNDSSTQPNVNDSSTQDSSTQPKCDDSSTSQMSTIRQLNDSSTQPKCDDSSTQPNVNDSSTMIRQLSQMSTIRQLNDSSTQPNVNDSSTSQNATIRQLSQMSTIRQLNDSSTQPKCDDSSTSQMSTIRQLNDSSTQPNVNDSSTNDSSTQPNVNDSSTQIRQLSQMSTIRQLNDSSTQPNVNDSSTQDSSTQPKCDDSSTQPNVNDSSTNDSSTQPKCDDSSTQPNVNDSSTQPKCDDSSTQPKCDDSSTQPNVNDSSTQFVNSA

SEQ ID NO: 148348 - protein, 353 aa, Heterodera glycines
NSMIRQLSQMSTIRQLNDSSTQPNVNDSSTQFVNSAKCQRFVNSMIRQLSQMSTIRQLNDSSTQPNVNDSSTMIRQLSQMSTIRQLNDSSTQPNVNDSSTQDSSTQPNVNDSSTQPKCDDSSTQPNVNDSSTSQNATIRQLSQMSTIRQLNDSSTQPNVNDSSTMIRQLSQMSTIRQLNDSSTQPNVNDSSTMIRQLSQMSTIRQLNDSSTQPKCDDSSTSQMSTIRQLNDSSTQPKCDDSSTQPNVNDSSTQDSSTQPNVNDSSLNDSSTQPNVNDSSTQDSSTSQMSTIRQLNDSSTQPNVNDSSTHDSSTQPKCDDSSTQPNVNDSSTQPKCDDSSTQPNVNDSSNDSST

SEQ ID NO: 148349 - protein, 378 aa, Heterodera glycines
STIRQLNDTSTQPNVNDSSTQPNVNDSSTQDSSTSQMSTIRQLNDSSTQPNVNDSSTNDSSTQPKCDDSSTQPNVNDSSTQPKCDDSSTQPNVNDSSTQDSSTQPKCDDSSTQPNVNDSSTQPNVNDSSTQQNATSSTQPNVNDSSTQPKCDDSSTSQMSTIPQLNDSSTQPKCDDSSTQPNVNDSSTQDSSTQPKCDDSSTQPNVNDSSTNDSSTHPKCDDSSTQPNVNDSSLNDSSTQPNVNDSSTQDSSTSQMSTIRQLNDSSTQPNVNDSSTQPKCDDSSTSQMSTIRQLNDSSTQPKCDDSSTQPNVNDSSTHQNATIRQLSQMSTIRQLNDSSTQPKCDDSSTQSNSTIRQLNDSSTQPNVNDSSTQDSSTQ

SEQ ID NO: 148350 - protein, 399 aa, Heterodera glycines
NSFFHHLLLLIFRQLDDSSTQQNATIRQLSNVNDSSTQPNVNDSSTAKCDDSSTQPNVNDSSTQPKCDDSSTSQMSTIRQLNDSSTQPKCDDSSTQPNVNDSSTHQMSTIRQLNDSSTQPNVNDSSTQPKCDDSSTSQMSTIRQLNDSSTQPKCDDSSTQPNVNDSSTQSQPNVNDSSTQSSTQPNVNDSSTNDSSTQPNVNDSSTQIRQLSQMSTIRQLNDSSTQPKCDDSSTSQMSTIRQLNDSSTQPKCDDSSTQPNVNDSSTQSQPNVNDSSTQSSTQPNVNDSSTQPNVNDSSTQSSTQPNVNDSSSMIRQLSQMSTIRQLNDSSTSQNATIRQLSQMSTIRQLNDSSTQPKCDDSSTSQMSTIRQLNDSSTQPNVNDSSTMIRHLNQMSTNSS

SEQ ID NO: 148351 - protein, 340 aa, Heterodera glycines
KCQRFQNATIGQLSQMSTISSTNDSSTQPNVNDSNATIRQLSQMSTIRQLNDSSTQPNVNDSSTQDSSTQPNVNDSSLNDSSTQPNVNDSSTQDSSTSQMSTIRQLNDSSTQPKCDDSSTQPNVNDSSTQDSSTQPKCDDSSTQPNVNDSSTNDSSTQPKCDDSSTQPNVNDSSTQPKCDDSSTQPNVNDSSTQDSSTQPKCDDSSTQPNVNDSSTNDSSTQPKCDDSSTQPNVNDSSTQPNVNDSSTQQNATIRQLSQMSTIRQLSQNATIRQLSQMSTIPQLNDSSTSQNATIRQLSQMSTIRQLNDSSTQPKCDDSSTSQMSTIRQLNDSSTQPNVN

SEQ ID NO: 148352 - protein, 526 aa, Heterodera glycines
EEEDEFVVEEEEEEEKEREEEGEREEEEEEKERKTDREKSGKSKTKEKQRREGGDKPKGQREQRKERAGPKGGAPGWAVMFLGLVGLALLLGCLFALIRRIFGKKRHGEKNKQQQQQNAFGTFSGTTKCHSFVQFTADMEKLGDHMEQNERAQAEQKEEVNLGRIQYKLDYDFQQGQLAVTVIQLAVTVIQAENLPGMDMSGTSDPYVKLYLLPEKKKKVETKVHRKTLNPVFNVFNETFIFKAAFNELPSKFNELPSKTLVFSIYDTLVFSIYDFDRFSKHDQIGQVILPLGKIIGQVILPLGKIDLGQVIEEWKDIQPPPDDKEAEKNLGDICFSLRYVPTAGKLTVAEKNLGDICFSLRYVPTAGKLTVVVLEAKNLKKMDVGGLSDPYVKLVLMQGGKRLKKKKTSSIKKCTLNPYYNESFSFEVPFEQIQKVSLLITVMDYDKLGSNDAIGRVLLGCAATGAELRHWMDMLASPRRPIAQWHTLQPIEEWMDMLASPRRPIAQWHTLQPIEEEEKPKENGI

SEQ ID NO: 148353 - protein, 749 aa, Heterodera glycines
ESMTVAMELILNSNPASIDTIFPVHVADSNGSELFLQPAFVGTLREINVIQSYLKSAAIEEISDSALRKNLKNILKRLPDEFVENSSDVLPFASEHSPTSNRLKSLADKVQNAASRGHQRLMQTSSVSNFRSMGQRSNNFPASSSVNFLNDSLANATGKKCALLPHPRSKRPHWNGLRGIDHGTFSTSPVKKAKVVSDRTATDVVSDEDEEEGMDEAAAGSSVSSSNDNVVDETEDISALPDNFSDVVPISANVSGRGSPSLSGGRISGRETPFSGNAPEQNSGKWINCDKLNRVLCQKLPPFAPPSLPSPRNRWNHDELFPPFRLVCGSKILKDSRKNLENLVSHRKIHQDIVASDNEGFNELRCTESVTLGLPPQNVQATVGSSVPSAASVAVPSVQQQQNTPKAHSHYTQNEEDFRYYDPNNLTRCRAFLDAKRKLRLVLSWTTNLPYASHCQTQRNKNEENGKDLANGTNKNQTNGAKTEPNSELVALQQFLKLLLAEAVNSRDRKQSAQIREVQRCLSIFEPKGVRVLLRTLREEHRKRTAFHLYLQQSRLTLLQLDFCLDRMSRRIRRVKSLTSECLIEMLVRFSLQKKEQQFLQQFLQDFQQLNVQDEKIDLVESHLCHLYEQLVLESMWRSASIEDIEYARKCLERSLMGQIYVYALFPNGEADYFRDEVLNKSVHKLSELISVGHPELAIPKANPPALLSNLQFIDGFYGKRMQGSEAYWWTQVTSAVEFLKTLLNKLCN

SEQ ID NO: 148354 - protein, 79 aa, Heterodera glycines
MTCRDKRLGTAHEGTFVHRTVRRLQQRQNGGKWPKQRRTLLHNHQQSALHSENFAGTFLPFLPGQHVGLLRNGPVSAQF

SEQ ID NO: 148355 - protein, 98 aa, Heterodera glycines
FVKNYLIYPPLFLLIMPFAFPSLFKTHPSEVHFVDDCAEAFSAVLAIFRRFASAADGEQFDEQTFPHVPCQGAYLGTEIAHFLENENSIPNFLNKQIN

SEQ ID NO: 148356 - protein, 196 aa, Heterodera glycines
MCQRQGTRPNNFMRETEQQQNMAKFEQMEMSNEEAGQSLLAISSAISREIRTEAGKLYALLGEASPAAQQWSLLECALPSAFTAPPPAQHNAGAEGGVGGGPIGGGDSGNASPSSSVYASPTEQQQNAFFVACCSSAIIRPQINPAFCAFDNEIPLISEIVRGYRRFQSLRISAFRLTGISDEMNGTTNGKENEDK

SEQ ID NO: 148357 - protein, 170 aa, Heterodera glycines
MARCVTSLAFLPIGDLTPGIIALDMALPDELTPVLDWFIMNYTGRLKHDGSRTRPRFDPNIWSVYTRTLQGDDRTNNIQKPQTDACNTHLPVHIHRFGISLTFCERIKSYRMMTSRSVQLDKTHRKRQRNIAKQTAEFSRWFKIIYHSTMETPMFFHLSSALIIYLSLPF

SEQ ID NO: 148358 - protein, 37 aa, Heterodera glycines; identical to SEQ ID NO: 127515

SEQ ID NO: 148359 - protein, 25 aa, Heterodera glycines
MVIFDKKRAENSWLEDLMVILTKVK

SEQ ID NO: 148360 - protein, 15 aa, Heterodera glycines
MTFYASLVGYTGRNN

SEQ ID NO: 148361 - protein, 48 aa, Heterodera glycines; identical to SEQ ID NO: 133532

SEQ ID NO: 148362 - protein, 68 aa, Heterodera glycines
MNRRYGTVHNTDRVCRSASLLARSKGNAKTVNNSILSKQKPDTKSLFIYYDNSGHFEAIVDPKKIEFF

SEQ ID NO: 148363 - protein, 219 aa, Heterodera glycines
MDAQQLQQILDAALKKSAEVFAAALNIQNQNPNPGSSTTASLAASINARLEKFNYNPEVGQTYDAWLNRYGKIVQQDGASLPEQSKVQLLVGKLDEEEYKRYIDSIAPKATEQFNWLETVANLKKIFGETRSLFLHRFDCFQIRQSQNQDLSSLLAQINSSCENAELDLTKEELKCMILIISLRDEFSDLKQRYLQRMEEARTNGKSITLQELGEECKK

SEQ ID NO: 148364 - protein, 1361 aa, Heterodera glycines
MDAQQLQQILDAALKKSAEVFAAALNTQNQNPNPGSSTTASLAASINVRLEKFNYNPEVGQTYDAWLNRYGKIVQQDGASLPEQSKVQLLVGKLDEEEYKRYVDSIAPKATEQFNWLETVANLKKIFGETRSLFLRRFDCFQIRQSQNQDLSSLLAQINSSCENAELDLKKEELKCMILIISLRDEFSDLKQRCLQRMEEARTNGKSITLQELGEECKKYQILKESTLALSTKQYNANAIRAKPQQVKDKADATKQYAKPKAVPKPYESKHKLPNRPCQSCGSTNHWRSDCGHRDAKCPKCGKIGHLGKVCRSNSSIRHIQTVNTTERHAQINTVIIDLNCMEIKADHPKWWKIPIKVNGADYPMHVDSGAQITLFTIQTWIQMGKPPLTSANIRVKNCNDQTFAINGQFMCKVQYMDRPPMKLLAYVSPEISHNLLGMPWIEALEVIPKEIMHPNLHPKINTISTKTNEIKDTETLISALKSTHSDVFSPELGHCTKFKANLILKNGAKPIYCKARPVPHGALDTPLGRSNFGSQKEEWQNTKDIYNAIAGSKYFSRLDLRDAYLQLELSDESKKLCTINTHRGLFQCQRLPFGVKSAPAIFQSLMDKIITPINGAFVYLDDVISPTRLSTNTSKRLPNFLQKETVFLGYIISENGIRPDPSRAEAIRKMPAPHDKSTLRSFLGALTYYGKFIKQMREIRSPLDELLKKDVPWNWEDEQQKSFEKAKEIMLSDLLLTHFDPKLPIIVAADASKGGIGATISHQFPDKRERVIEHASCTFTAAQQNYSQIEKEALGLVFAVQKFHRMLYGRKFTLLTDHKPLLAIFGSTKGIPIYSASRLQRWALILSNYEFDIKYVNTKAFGNADVLSRLIANYPRPSEDILIANICNDTDCCVNFVFEAKIEQLPITAKIIAEETAKDEILQQISAFTKQGWPQKLNDIKLSPFLPKKGQISEIEGCLAYGERIIIPSSLRNNILKSLHFAHPGIVRMKAIARNHVYWPGIDSEIERVVKQCEECHSAAKNPTKANLQPWKAASEVFERIHIDFAGPCADGQTYLVLVDAYSKWPEVWQMERTSSQLTISMLKSFVHRLGIPKEIVSDNGSQFRSAEFAQFCKEFGIKHTFTPPFHPMSNGAAERFVDIFKRSMKKCRQEGKDWLQKVLLAYRTTPNTALNGHSPDELFLGRRMRTRIALVHPEKQKLQPPNLENFQQFQGQYIKKMENQFNIKHGAKSAIFQNEEPIYFWNLKYNKATWLPGKIIEKLGTSPTYRILAPTLGRAIHRHANQIRRRFPIELEDNDQVEENDQTQAQNPPHSPIAHKPQTNRQQTPAAEPVHLRRSGRAKQAPQRLDLDPSKPKYGLIRS

SEQ ID NO: 148365 - protein, 143 aa, Heterodera glycines
MENHSNIKHGAKSAIFQNEEPIYFLELKYNKATWLPGKIIEKLGTSPTYRILAPTLGRAIHRHANQIRRRFPIELEDNDQVEENDQTQAQNPPHSPIAHKPQTNRQQTPAAEPVHLRRSGRAKQAPQRLDLDPSKPKYRLIRS

SEQ ID NO: 148366 - protein, 880 aa, Heterodera glycines
MRTAESEMRGLLAQINSSCENAELDLKKEELKCMILIISLRDEFSDLKQRCIQRMEEARTNGKSIALQELGEECKKYQILKESTLALSTKQYNANAIRAKPQQVKDKADATKQYAKPKAVPKPYESKHKLPNRPCQSCGSTNHWRSDCGHRDAKCPKCGKIGHLGKVCRSNSSIRHIQTVNTTERHVQINTVIIDLNCMEINADHPKWWKIPIKVNGSDYPMHVDSGAQISLFTIQTWIQMGKPPLKSAHIRVKNCNDQTFAIKGQFWCEVQYMDRPPMKLLAYVSPEISHNLLGMPWIEALEVIPKEIMHPNLHPKINTISTKVNQIKDTETLISALKSTHSDVFSPELGHCTKFKANLILKNGAKPIYCKARPVPHGALNDVNAEIDRLLKMEAIKPIEFSHWAAPILAVKKRNGKTRVCIDFSTGLNDALELHHHPLPRPEDIYNAIAGSKHFSRLDLRDAYLQLELSEESKKLCTINTHRGLFQCQRLPFGIKSAPAIFQSLMDKIITPINGAFVYLDDVIIANTTLDQHVKTITKVFDKIKQFGLRIQLEKCSFLQKETVFLGHIISENGIRPDPSRAEAIRKMPAPHDKSTLRSFLGALTYYGKFIKQMREIRSPLDELLKKDVPWNWEDEQQKSFEKAKEIMLSDLLLTHFDPKLPIIVAADASKGGIGATISHQFPDKSERVIEHASCTFTAAQQNYSQIEKEALGLVFAVQKFHRMLYGRKFTLLTDHKPLLAIFGSKKGIPIYSASRLQRWALILSNYEFDIKYVNTKAFGNADVLSRLIANYPRPSEDILIANICNDTDCCVNFVFEAKIEQLPITAKIIAEETAKDEILQQISAFTKQGWPQKLDDIKLSPFLPKKAQISEIEGCLAY

SEQ ID NO: 148367 - protein, 121 aa, Heterodera glycines
EICIDQQAFYYVEHLVFQVEWIASDKWSTSAQINEHDQNFLAQIGQILSISRANKIEDSEPPILSYFELNAPTLGRLNALFGRLCQNWQIFVAKFNDKNTKFNAWTKLCKKNVFKDFYQQK

SEQ ID NO: 148368 - protein, 130 aa, Heterodera glycines
MRAILSGCDAVELKRLLGAEQNGATLLDVAAQNDKTEVAKLLLENGQNPNEFGTFIRDKKKQIKLLVEEGNADIESTDSEGDTPLHWALLKHNFEIARFLSDKGARTDRPNKVLSPPEIFDADHESDLYF

SEQ ID NO: 148369 - protein, 113 aa, Heterodera glycines
MLLLVDFFVFFLFVLCPSFVIFCIFSTFASDGLKNGTADNSESGSIVDGQQRQSSAIVAAVPSPSSTVSVANLSPMAAAFNEAIVQTEQQPKATGTQNKVMANESEKVWQNKI

SEQ ID NO: 148370 - protein, 69 aa, Heterodera glycines
MRSIWSSFSFTIRPLTIKNCVKSFMLNGVLLAHNAGEVGTVTLNVVPPAARVPHLDTLFRGLIICEYFN

SEQ ID NO: 148371 - protein, 56 aa, Heterodera glycines
AQKICAAMGGQIVSIHSEEENTLVARLIDEDYMLCNGVNVPLAEAPKMDAMRVENY

SEQ ID NO: 148372 - protein, 103 aa, Heterodera glycines
MEKLKQQTVAPSANFDDAEICWISWLGYEPPSNLEGADKWDNWHALNNGWPTEETDEQKERVKIWVFGILNLAFVFQKSIKFRVQANGCSNCCKGCAIFCLTK

SEQ ID NO: 148373 - protein, 35 aa, Heterodera glycines
MQIRHWQILRESEGRQSARLFNEYKNCSTASKALS

SEQ ID NO: 148374 - protein, 116 aa, Heterodera glycines
VQYFMSRDWSLDPQLYEACHQEAVTRCHATDNWHENTNKLPGQDQKVQVLACLYRSGYDEAYDEANPLGKECALHVRRVLRERAARVNLLPDIEENCRDALSEYCSQNVKPTEEMH

SEQ ID NO: 148375 - protein, 285 aa, Heterodera glycines
FFYCRPTFFSTHTNVLILPNSGSTLECLIGYMVNVPKDAYKAKIVEGISQECRKEVMRVAELQSDDWHLDRPLFFACRIDREPLFFACRIDRERFRFCGEIPAGEGKVFHCLMEHKQDEKMSPQCSKILSERAGLMGCSKILSERAGLMGRDYKLAHPLLKSCDKELQAYRCVPQPGFEKSLQFAYRCVPQPGFEKSLQFHLSWVVLCLENVRFFRNPIPTDHRCQHEMMTHRQMMVQEFRMSPEIVMGCAQEIDKYCSPQGDIESEGKTVHCLMAHAQERDEKV

SEQ ID NO: 148376 - protein, 64 aa, Heterodera glycines
MYRQCKFAFEADEVRSNRCGSSFHITPDEKDLQIIEINCDTVNGSDCGKKAKTNSEAPILWPIC

SEQ ID NO: 148377 - protein, 78 aa, Heterodera glycines
NITFTPFKRIQKMQPNYYVALYGNGKEPQNSAKNYRLLNPTVDLIDIIGEETNCAEFTTDKSCKRIKNDNSIILDGLV

SEQ ID NO: 148378 - protein, 54 aa, Heterodera glycines
MTPSSADTICAPISIKVASSTPFNYDDYLSNATLDIELRFSMNSGWLHEFEKIK

SEQ ID NO: 148379 - protein, 80 aa, Heterodera glycines
MLEKCKDIGLPEDFGDKKGHHQKIQVPKDVEAIYNENMTIDLSWSQTSAPNGELTKIYLLQMETEFPNRQISQIVILKNK

SEQ ID NO: 148380 - protein, 166 aa, Heterodera glycines
MYSPLFKTSLPKSSVSVESRRNTIYLLNPTGTVKKMCRGEAAQPQKGADATDVKQQQHHHQQQQRKHQGTEAIRAAEKKGADATDVKQQHHHQQQQQMKKGADATDVKQQQHHHQQQQQRQPMNWAKGIRGEDGKWCGLCKVVNHWPHECPLYLNQREDGGVGICL

SEQ ID NO: 148381 - protein, 49 aa, Heterodera glycines
MKMVLGIPKLGKLTTLSPNIALDLVSRFSLNLYSSNFMNGVRAVQAQVE

SEQ ID NO: 148382 - protein, 242 aa, Heterodera glycines
MHIDNMLLFPNCYTCAKKTKKEFVLAKDVKKCNHRPERRALIGTFTSIELRKSLALGYRVIGFYRAYHFEQFDSQLFKGYVRMFLKIKVEASGWPSEVRNEEEKRAFIEMYKAKYNIWLEYDKMVFNHGLRMIAKLGLNSLWGKFSMRNTLSVTEIVNNLERWTELIKDDTIEFKRPIEINEGVMRAVYQKKQEFIKEHKVSNIILSLWTTSAARVKLYEYMEQVYRKEGCKLLYCDTGGQK

SEQ ID NO: 148383 - protein, 63 aa, Heterodera glycines
MYSFKKYFETALEKEDFFWPKNRAEEKVKNLVGTICTLKVNVSVKEYGGKKGIYYTLIDIYEI

SEQ ID NO: 148384 - protein, 82 aa, Heterodera glycines
MSKQALKNSKNYIAQLTPMYFSTVPEDQLGVNELANRVVTAVNNFLNAELTESGQRAGTYGLNKCFTAVILILLYNILMLNR

SEQ ID NO: 148385 - protein, 184 aa, Heterodera glycines
MGTLEDNTGATSAIFGNSTGPNGDETVRFLHDHSEYSSRFVTGTWCSPAGSGGNVTLWTVQQQRDEQSQEGGRRIVQNGRIELPNCDVGDICVVNAQQFVVSTTAGDVQIVESPLASNGANLADGIAKISSVAKYPRVHKFASSTALCLLDEEIFSGSDSGQIIRIRPDSQSSQSTRPFAQDLT

SEQ ID NO: 148386 - protein, 77 aa, Heterodera glycines
MRTQTKWDWQNRHGPTLNQCERVSTENCCEDEIIDVSSGENSNGQLDNLADNCNSRNCQHSHQKEEGNAERCSFKFL

SEQ ID NO: 148387 - protein, 197 aa, Heterodera glycines
FGFAIKQQTDESYKSVRHKKDTYAYESNGCVWINEELKEANVEYSYCIGDTVGIGVNSITRQIFFTKNGLRLAIFPNLSTSEEMSVLIARIAELNRANTAEPSIASSADLFGQDGNGSDDDEFSPTDEEDEQKNEERETQTNEAGVEERFSQLQNDHKKLLERISEMEKQQKEQTKATADHLSKIQNDRENFFGKNQ

SEQ ID NO: 148388 - protein, 30 aa, Heterodera glycines
MVTGQTLASPLLLLLLLVDWVRVRADFFYK

SEQ ID NO: 148389 - protein, 123 aa, Heterodera glycines
MSVLHCSWEKEEARSRHVDFACPIVKSKSNPSLASAASDPLPQQRPTNDNDGSSGNENEAVHHPPPPSSSSQHHHHSQQPLFLNVGSAPPNYGHNGNSNNIGTTPQQLPYHLINNGAGGTQTT

SEQ ID NO: 148390 - protein, 26 aa, Heterodera glycines
MFKKLRLSRRLIIGTFLRFSFNRFHF

SEQ ID NO: 148391 - protein, 97 aa, Heterodera glycines
MSGDQLVTDDWVAKETQTLGVCTARSSDSEKIPSAADQLLWPGHLPCPCAKKFGGKCPNGDHFWGCEQCGQTLKFAKQKNDDMEQKVRKCRQHISAK

SEQ ID NO: 148392 - protein, 30 aa, Heterodera glycines
TVYALIIAQSLLIPQSQLSPSLRGVFENNP

SEQ ID NO: 148393 - protein, 178 aa, Heterodera glycines
MDNQNMANTFGFLRGYDALHGVGIVLKENDNRADASFNYCINGLLSNLHKNVAQNIVFLITHSSGSGKTIALLRRLLKPIEEKAGVKIPLNESNVFSFDNAPFEALCLIKAMGVEYDVEEMEELSRKWTKSVQQFKRLLKHLATVKPHLTRETLSVYAARCAIADIMPIIASNGEQIQ

SEQ ID NO: 148394 - protein, 192 aa, Heterodera glycines
MPAKWFSFLKSSAMKAYNDNMERYIELAIQDAELRETSNEGQSNYEEQKKRTDGTRKLLEFYRKERDMFTEGLEKASVNVEEFKFPTENVEQIFDGLFALEITGKQMKANYETTKEAQREHQKQSNAEAMRAQNLVKAKPTKCQSAYNQKAIQCYLDEMTEKGQQQLGQGWKADGSAEASSNVDMTDGGESE

SEQ ID NO: 148395 - protein, 118 aa, Heterodera glycines
MGFSKLNQFNGMYKTDDFVPGDFGIVPLKPKTWWIWMPESGRDETGEMALVEERIGMEQDYIVKWRSIVSEFLQNNQKMQFNYSRFAADEENNAPQKKLFDLTKNSVSFYFYEKQFIY

SEQ ID NO: 148396 - protein, 46 aa, Heterodera glycines
MPSKIGSLEFCCFFMDQFCGHLTNSDQSTDILFELDGAENFFRENI

SEQ ID NO: 148397 - protein, 112 aa, Heterodera glycines
HFSNASSPVNFIIVIRFPPSFADAVVPFALTNELTREQLALKRTADYHDCFLLVRCPIARDESKWTKWEEEEEAIYWHHYYQWNRIDIEIYSDDHVGDGLLDEIPGPSDQQQ

SEQ ID NO: 148398 - protein, 348 aa, Heterodera glycines
MISHRFDYYVDEHFKTRKWTLALIRIHSKNGKDGTKEMNIFNHYWKLLPIPQIQMPRKVIGFECIEIKYIDQNVIAFLHRFAQLFATNCPINTTFFRRLRQFVPSLLNECPSLCFVSFYYGGFFTEFPANDNANASNGQAVAKWLFTPLQNNVPKMYKFSFGACHFLLIRCPIARDESKWTKWEKEAINWQIDDQWNIIDIRIYTENYIGDWLLDSTPGPSDQQQNLFGVPMFVGGCAILWIYWDRLKKPKNKIFISADCWLCVFDLLEPSQLGLGIALISHRFDYYIDEHFKTRKWTLNFMEIGRKFEEHGASNEMEIFNSDWKLMPIPLKPLPKKVVGFEAIRCDE

SEQ ID NO: 148399 - protein, 359 aa, Heterodera glycines
MSDRRKEAEEKLAKAIFISADCWLCVFDLLKPSQLGLGISMISHRFDFYVDEHFKTRKWTFGTVQFGGKIGENGTKQMEIVSSDGGIPLPIPQKPLPKKIIGFKRINIFFMDRNVITFLHHFRPLFAACQIILCINTDSDRNCISKLILRNIWPVLGKKIHSIEITATHFHHLRQMAPSVLNECPSLRFVIFYDGYLFTEFPADDSAAASDGQALAKWLFTPLQNNVPKVLKCYLDTDAAILVSRIEAFKATFANASSPANFIVVFWFSFASSAVPFALINELTREQLALKRTADYHDCFVLVRCPIARDESKWTKWEKEAIDWEDSDQWNEIYIEVFGDKVGDGLLDEIPGASDQQQK

SEQ ID NO: 148400 - protein, 60 aa, Heterodera glycines
QNVNMGTKQLKRDNVYELIGDFAKALLPSSFLYGYCKEANCAPSSILVNYAVELCKLSSS

SEQ ID NO: 148401 - protein, 162 aa, Heterodera glycines
MDSAANAPVSNSGYEHDPLGLNNVQVGDPLIDDEQQQRHPETNIDEDEDVLRFDGGAFDDNDYGEEEGMTEFNADDNNNMGKENNASNASPVHSDVLQQPLALQQDFGTPPMSGVSNGGFDKADDNASQHRSGGVSAHRRTTGDATDRHFQRVVVGFPSTYL

SEQ ID NO: 148402 - protein, 91 aa, Heterodera glycines
KFFLTIIFYCYFFYTIAVFFLKISGGESHHNALKMTVRRVAGSATMGRNTTAPVLAGIVISFVKASVGNTGHRRSAKVLLKCQRLLKHIRM

SEQ ID NO: 148403 - protein, 87 aa, Heterodera glycines
TIIFYCYFFYTIAVFFLKISGGESHHNALKMTVRRVAGSATMARNTSAPVLAGIVISFVKASVGNTGHRRSAKVLLKCQRLLKHIRM

SEQ ID NO: 148404 - protein, 234 aa, Heterodera glycines
MMAPSSENGSGDGGGGRIHLIGLSDSRGVWEYVMQLRESWNKMVCLLVINRPEEEQDFLNYMDCFAFYNQGTQVGVLDFADHPTIKDGYVFTLSPGEPLPSVLLPLDGVGLPEWTQHNGCIMLMIVRRMDHEDKQWKRQRMGMGVGDESWRRQQQQHPQMMPMDIPLTPIGRGGGGERMAHLLSDPRLDYELTTRMGSRLYRFSRLYKSMPMIFNRIFSEINVDNSGNDENAKV

SEQ ID NO: 148405 - protein, 75 aa, Heterodera glycines
MEENNHRTAVQMAYKFRLIDYDSQGQITPIKLQRVLKNGTQQLFNLETCRLIVNQFDEQRCGYIGLAKFPALWDV

SEQ ID NO: 148406 - protein, 152 aa, Heterodera glycines
MYCASCAHHANKAIRSIYLRLELRDCEDPEICQTVTVFSTVAEHYLGLKVERFAKMVEEQPEQLEALLKSKIERTVTAKLSIKAKGELKTMDWIVLSIQHENGENEGDDETAPDEQKKTDINNEDGEIIEIENTSVHSTLLGPPLKKRVKKN

SEQ ID NO: 148407 - protein, 349 aa, Heterodera glycines
MKKGQSETAIIRSSSSATARNDNTVAASTLDGNAKRQRRNSWDFKTMAHFEEKRPKGEEDGHRKVKQPQQPAPLFEQKQHYVHRVERFALQRHVTEFVLNGKHDEPEEALLRAFEHIIARAIRNAEDSHQQTDDGRGTSAGDSAHRQRRVTRLGVLLNGRGLTDPIVLPIRPPEQNTAEVLMAELDKLGQSDGDEDVHGGGISKRSLLLSEPIEVVVTCIAPPDQNYAGIYRIVLFEDHSEELPRPIWKGPMGRRLCVSLFLSDGHYYGIKKIHCFFKLGRKYCVDCECVYTRDTKHTISCKSRCPQCAKVRVTCTECCDSERGVRTNCQICISEYGTMERIKDWYAVH

SEQ ID NO: 148408 - protein, 136 aa, Heterodera glycines
MLSPFSYDPFYRRSLLPMATLRDHAAQLNVTDKGELTYKVDVSGFRPEEINVEVIGNEIIVNGEHREQNDSESVHRQFSRRVLIPEGIQKESIKCELDGGRLCICGMKTAGEGGRTIPIEMKKKAAVEHQPQVEKK

SEQ ID NO: 148409 - protein, 21 aa, Heterodera glycines
MSGRGKGGKGLGKGGAKRHNK

SEQ ID NO: 148410 - protein, 199 aa, Heterodera glycines
KALTVSIFTPYLSASYFMVRFLHRYNMNMLPWDLKPVQDFIGLWQMDRSSGNFKELPPPNLIDLAINPIPKFGARTMNITLVYFRLHTLAGDYGFMPVKNATRRDPRVHVAYLTTSSEGWSMWSMMEQGFFKDGKLIFHLKQFLKRSFLKRSFGAGSNLDIREFERQFELSGFHSMTLKVRAETSFQTEAYTAWYTKIL

SEQ ID NO: 148411 - protein, 110 aa, Heterodera glycines
MSSSTNDPVSEFLAREQSALADLGDDFVAAVPPPQTNNDGILLTNGGSDFGSIANLDSFDANEPKLPVNGVNDKIEEQKKEELREQAKKELEQFYAQRKNELEERKKMNR

SEQ ID NO: 148412 - protein, 69 aa, Heterodera glycines
MKKYAYAYTFDVVRLLGICNLGTDIWGPDFWDPTLRESDILGWGSNVFWGSDIWGTRHLGTPTLGILLK

SEQ ID NO: 148413 - protein, 215 aa, Heterodera glycines
MKFKLFIFSYCFILFYAQSVPNDNFNEGSPSADEQPNQTPLNFEEKNPLIESNETGTANWTKIYSNEQKQELINKFHERRSEIKNCDKKTYNKIEEEIAKDLDVSRHNIYKWKKELGLSSVRNSHNYSNEEKLKLVHQFHKMKTEFKKDEKINTSSKVEHAIAKGLGVTRYSIYKWKNELGVSNEFRCSHNDSKEQKLKFVHSSRFIIILIILGN

SEQ ID NO: 148414 - protein, 177 aa, Heterodera glycines
MAIRSFLGPACCSPTGAAVLLLISGLANTVSLASIATGNGARLGIFRPTRSISYDGQQEETEYEVEPGFEKRSMTLGRLSFRPGKRWSFPVSGAYAHDRQNRRYDLLLLSEKQPSYGLAPSEVEYNVPIQAKPNVVRHINFRLLPETGNEQENDLAEIGLRESAMGKRTAALGNKLK

SEQ ID NO: 148415 - protein, 97 aa, Heterodera glycines
MAERVEEAADEGEGGEHGEGEGTPEAPFDIKMKNLSLYSVLMMILHILIGMGMLFMMVANGQCIFNEKAGACDSIGCPGGACLQSGKECACFFGMHK

SEQ ID NO: 148416 - protein, 64 aa, Heterodera glycines
MKYNFYFFLYFCVLFYALSVPDETFNEDSQSAGPSKQTPKNSEKKPLIESNETGAANCKEKNKG

SEQ ID NO: 148417 - protein, 52 aa, Heterodera glycines
MGTIGWSKCAQCRERRNGPIPLRRRWARVAMVCQKRGGTPKGGLYAHQKQQR

SEQ ID NO: 148418 - protein, 55 aa, Heterodera glycines
MACGIMGTKIYSNEQKQELINKFHERRSEIKNCDKKTYNKIEEEIAKDLDVNIKI

SEQ ID NO: 148419 - protein, 151 aa, Heterodera glycines
MHVANNDMKQAKKSADVAKGIARHAKTKYTSILEEYNDKSEKGCSGMVDRLNEALVNILNARPTVTANVACGKDPTDWKSANCICGKAIDSALSLYLGMGPRKNNGVWVSFGRTPGHPFCPIGTFNTCKGLSPGGSAGVIESPPGSTTMAT

SEQ ID NO: 148420 - protein, 56 aa, Heterodera glycines
MHYYMYEKKDKINVWFEWVGKSEEMRKEESIVWEREEEMGNVEQEEEEEKEQEEDK

SEQ ID NO: 148421 - protein, 256 aa, Heterodera glycines
MISANGGSAAKVLKCLMCGQSESRSTFMAHIAEHLNYRPHQCAECDFRSVTAEQMADHEATTEHVGQLYSTSSTVTGNNRNSNNNSSNQSQQQQQRVSSDELKLEQLLMDTVGVGGGAVLGAVANVSAAGGGAGVANFLGDDIGAADEQQQDKSPSANACSSMLQQFITQHQQPQQQALMTQHFDGVVEQYIHGQQQPPPPTAPLQLANGEAHGEQQPKTVKGHKPCKQVFENVQCLKCRQWVKGRGICLLYHMNT

SEQ ID NO: 148422 - protein, 77 aa, Heterodera glycines
MTSGQKVVTEANEIVHCAPQRPDLHAVARIRLQTDDRRGFEGRPSAEASTCPAESALRQSVLGILAQQSSKVNKWYP

SEQ ID NO: 148423 - protein, 314 aa, Heterodera glycines
SVGQRFVGRRVSVRHLAQTPTHRRSTEQSASNFYAVVLAQTADLFLNGTTLEPLGQQEAIDIDRELFTSCGFSVDQLMELAGLACAQAIGETFEKGTLTDKLRNVLILSGPGNNVLILSGPGNNGGDGLVCARHLKHFGFSPSILCPKPSQNDLMQRLMLQLECLGIPFVESFPDPNSIEKFNFLVDAIFGFSFRPPIREPFNKILKQMESVQNRVPIVSIDIPSGWDVWDVEKGPPDDLSPLALISLTAPKQCAQFFKGEYHFLGGRFVPPALVQKFGLENMPPYEGSSQLVQKFGLENMPPYEGSSQFMRLN

SEQ ID NO: 148424 - protein, 91 aa, Heterodera glycines
MERNQFPEDNPAFDAPDKQSLAEFVIILTIRGNNQQFNSVLPPSNRTAMAFVELFERIQQITVSHQKLIYKAFFKSFNLIFYGLRYKKTLI

SEQ ID NO: 148425 - protein, 152 aa, Heterodera glycines
MYSRSPTPKSERRHQIRLNSRDDNDGINNNMNINACGGTNISGEQQQAAAGQSNRTSVYHQICTINGHEMMTSSSTTNNEPQLVTNNNYPWALAEPGTGGCSMASANQQMMVATEHFGCASAESGISAKLKNKKMLWISLDLAECFLQKKNL

SEQ ID NO: 148426 - protein, 58 aa, Heterodera glycines
MTLSTTAHNAWMDILPSFDHAQLGLKLALLSPRFELLVDKYFDDKSKMTVDQKSQRQF

SEQ ID NO: 148427 - protein, 95 aa, Heterodera glycines
MWASNLGLKDIVQRLLKAGARADQADKKGDTAIDIAARKGHVEVVKILRDAALYIHRYIFIYKYIFLIFKRLIFVFESFQTQRIVTGAGERQTLK

SEQ ID NO: 148428 - protein, 229 aa, Heterodera glycines
MLAAESGSLEMCRLLIEEWAAEVNQQAIDGTTPLMGASSEGRLNVVIYLIDHGAEVQHTDAEGYNSLMHAVKNGKTEVARHLLTNGASTDQIAKRRPTAAADDNERELRLTNNRTDLIYIRSFSCMMYCKCIIAMYILICLSRSDICCSDCTYCIIVPNNIKYSINKLFVHQFLVILVFFYRRNYSEFSSRVHSHPHNLQGLPVLHSVAELRPQNEKIKKRAAPSIVLP

SEQ ID NO: 148429 - protein, 29 aa, Heterodera glycines
TDEKMLRSFSRLTGAGECDSFAYVRQSKR

SEQ ID NO: 148430 - protein, 200 aa, Heterodera glycines
MQFLAFLIAFVGLLLIVMPTPTVSRTNATTESFHFQLDHTDQNLKVQKIEMEAHNGTEADQNNDSRTNTTNSSAIAGQNVYDQLQAKTDADLGVVILSVFKWLLFACIGLSSSSICCCVFAVGNPLSRQLPFPFLVMNVVSLTVLTLSMFAMALLMFHGFVGTLSLIICASLIAFCALCSAAAGYVLIELAKKIVIFSDD

SEQ ID NO: 148431 - protein, 183 aa, Heterodera glycines
MGTINQITFFVLLLFSLAVPDESANHTTATIVNFTGTQDGQQIDQQFDVEKNDGTDQKKANDGTDQKKANDGTDQKKANDGTDQKKADAKPAESLIWPIIGGVLFTIIAIFVSVTCFFVAKGKKISITKWVLPAFFIVGVLSIIVMAFLVFSGFVGVLAFIGSSALICCCGCCSCAGLLFQED

SEQ ID NO: 148432 - protein, 59 aa, Heterodera glycines
MPRLFNLDASRKSYGADQKLIIFMVIKYSTKFESRIFLALYFSHKNAICLGNIKIIIKL

SEQ ID NO: 148433 - protein, 51 aa, Heterodera glycines
LQIYWLKLHMRYISRFFDSVRRFDKDGFRFAISRSTFGNWSRIFSAITCNH

SEQ ID NO: 148434 - protein, 89 aa, Heterodera glycines
MTKKEMSEALDTWAQAQGQLFNQPIHYISGGEATNGGTNGKIPSGCAANTAPICALSVQQKVMPKNEMAQKKMAFLAFCRKNMPKQNKF

SEQ ID NO: 148435 - protein, 58 aa, Heterodera glycines
MSIAFRGRMAEEDSGGKKKKSDEVSLMRKKSCQEQQQLAAADQQQQQQQDEKEGPFRS

SEQ ID NO: 148436 - protein, 114 aa, Heterodera glycines
MEEQRRPICDYFAIIGYDPASGLKQERIAEFGDPSLATCSTSSGPPVRKSPLDATYEPKVIAHFPTERPGRPFAPEIASLALPQGIRLRTERNVPREPFFHSFVVIREGVWPFE

SEQ ID NO: 148437 - protein, 47 aa, Heterodera glycines
MPFFDYPIETLFAHIGVDQFVKLLTSFMLEQQILLISKKFTKKYISP

SEQ ID NO: 148438 - protein, 188 aa, Heterodera glycines
MKNTKPINNSLIRANATDCSRYYWSFPFKQCNICLLDIDARRLEVPEDLPSFPRQQRMISEINALIARSASAADQQQQKQAGEDKGVHTFYMRGLQFNAAIRQLFLDHFVSLFSTYEAYLLHAGTEHGGIVSVPKSRRKNGRMFRESSANFDKISFLVDQPESVLSFLSAFLETQVIMNDRSINRAPD

SEQ ID NO: 148439 - protein, 579 aa, Heterodera glycines
MAGGGGRAALSAYAIRQDQHGADAADLLTNAGVALNKHTGLVNDILKNCRPLHLCILLERAHYNYIGRSEQLFKVPGYCIDCERRADARYHASGCKVACRLCLRFGAGYPCKSEQLPNGESSARRCNECGFVFPCDDCFNYHLVNQATDPLDGRGLRQRRTLCQWRRFCRDCGRVAYLGLHQCPPLGQADEGAQFRRLFFHSFDNAAADPVEQFLDYLTRHGPKNAHTVCIAHNGGKYDFNLVLEALHRRSMPPKRLCTTGLKIYSMKLGGYNQRRITFKDSVNFFVCQLDALVKSFNLPQHLATVKPFFPYMFIKRQHLLERLEGLPGLDYYQPDTMKAEKRAKLLRWHGENNNNGNRFQLREQLIMYCTNDVAILRESVIRFRHLIEEHAQGLDPFIVASTAAGLALATLRRCFLPANHLVHSPEGGYLRGRRASAESQRGKLAQRVGQTEIRYTRTPAEFHKLLDDPTLDKLDFVHVSDHMDRCVVRKRPVFAKAPLTNCLPVAAFVTSYGRLQLYSYMEHVLAIDGAELLYCDTDSIYYVNKMGGPCVAEGEALGQMKRMSTAPAASSNSLRVGR

SEQ ID NO: 148440 - protein, 120 aa, Heterodera glycines
MDLILATDWINNAYPEMDLEDANNEKKESTKKQEEEAEDPSWISLIDEEMKREPLAPIGTPKKCTCAERRRPVPLVDHLCKRSNAVPMSCMCSSKALRNAGTLWSICAPSNCVPPTCGRP

SEQ ID NO: 148441 - protein, 935 aa, Heterodera glycines
MRRSQMLARNEFFLETLCSSKKANTLIRGASDEQLLCLVEICLNILKGRVPLRPRHLNKLKAHTQVLRRLARTRCSRSAKKVLLQHGDGLPAIVGLIASIALPLIADHTKRYLLVPEEIYQSLAAPPPADGTPIGLVRTRIKQIKNDDGINEAERAIKYEQELKRLNKLTRDEDERPVGVKLENLSDVVDAMPKPVNVRRPIVVATRRHLKVGRARKENVEQLEDDDDDHDDHDHETPKPSSSNKRQPTQTEILKLIYKNAQSLGVSEEGQVLRAGGRPFITSSVYDIVSHLLNKDKRAQNKEPTAFKEFVERARQIPLLTSQRTYTLHRQAKRRYRRLPTLAPGLHTEWQADLAIFDRLAKQNRGYKYLLVCIDTLSRQVFVEPVKTKTSANMIIAFGRIFKRSKYIPWKVLTDQGKEFTARAVQHFFRAKDVERFCMLTSPQFHAGMAERANRSIKERLYRYFTERNTYKWIDVVQDIVRAINHSPNSSIEMRPADVNFKNAEALRQKLHDAAENVVRRQPKYRVGDRVRIEKYKHVFQKGYLPRFTNELFTVAEVHSERSPVVYRLRDDHNEIISGWFYANDLCKSLEDKQQKMYEIEKILVKKRQNGVDYALVEWQTGNTVRIELPSSNVTNPHELGKNLYRLLGEGSDPLAKKVRSTQNSFMLTINKARRWNREEYIKRKTKEKRGVRDEELLLQALLTDTGTVVDLNIMTHGLLAREKRAETSNIALRIPADDNDSYQQKLDEYFSRLSEKNLSILDELGMTKLTAEIKNLSEEERAILEATKEMGTEAWIQAYREIRLVCQFNYDVNKNRFVLNTDPRYVKKVKVSPQLAYILGFNNTEFMQAENEARFMPDMSGGVSSFHVYTPDLIEPMMIGDVTAPVLRIVTIRGDPDQEVSEILIEIRTNSGSLMPFQYGTCTLTLLFRKMSYF

SEQ ID NO: 148442 - protein, 92 aa, Heterodera glycines
MPPNENSDRPFQQPDNVQPDQQPHQQQPDEDTELRAQIEDAEEDLLLNWWREDPTIIRFLFGHRRAPAIEAALRQRAEREAEILRQYAENQQ

SEQ ID NO: 148443 - protein, 366 aa, Heterodera glycines
MKKQLYKLRNEKESKIISQGQNSVNKFIRNKLSKVNEIPTLIDNAGNMFSSNVQKCKILAEIFQKSFLRKSIVNGPQTQSTQNKIKLSDIELNAGIIWNILRRLPRRNSTSPDNVPYILLKNCAEPITKILADIFRLILDSGQIPEIWRTSLVVPIFKKGEKTDPLNYRPVSLTSTVCRVFERILSSKILEFLNSTRFFDKEQFGFLKNRSTTTQILKMMDDIYNSIQKNQQIDIIYIDFVKAFDSVPIDLLLQKIKKIGIEGKIHNFLTNFLKNRSFKVKIGEELSESFRIFSGVPQGSVLGPLLFLIFINDLPSFIANEASSVGIKMYADDVKLYYAHENDDKTNHLDKAIEALEKWSKINGTY

SEQ ID NO: 148444 - protein, 249 aa, Heterodera glycines
CISLLSLAAAHLGSELDTAADESANSTDDGGPKNGNRMPKRGADSHGQEEDDQHQTLQDAAPLNELDASAVYLPSLAKRKKCHKKAKQRQEQKWPRKTNWNQQQMEDNEQGEEENEDGNESMDEQMKAFRKTTLDHRKQYFDWFLFFEFDRVSDWNHKKLFEEQKKREEQQKAKQRQGHRKDEEEYFDASKMSFKAAHLQQTVAAVRNSLVGGCGTAAGSVNAIDSAGTANSSAAVASAGGSDDLSTRG

SEQ ID NO: 148445 - protein, 19 aa, Heterodera glycines
GLLGSWVRVPPGELPFMFY

SEQ ID NO: 148446 - protein, 18 aa, Heterodera glycines
IAGVVGSSPTGRVTFYVL

SEQ ID NO: 148447 - protein, 80 aa, Heterodera glycines
LLMLTKFYTNLIRSLLHVDLRTQKWLKTLYVLFYIILSVFRRHFVPPLKLSSSILYVSSYVSTYILKEILHLNFQTQIPW

SEQ ID NO: 148448 - protein, 152 aa, Heterodera glycines
SSRSAECLCCGTATDAGRIVPDGTGRPVVGPKGGQMGGGPMRGGVQRHLLGEMRQLAGPTGVLLLPIGGVTVNCEKCEEKEKQIDVVGKKDFQIEMKTKEEKERIGRIKLQIKSLTDLGKQKRSNEWVIEEPSSDKIYKFFIGYFTPNADPK

SEQ ID NO: 148449 - protein, 99 aa, Heterodera glycines
MFYFGQYFPTVFTFTRQLAAVKRPLAPRVDAFLRVNVVVRRPALVLRPFGRPSAPPRVVQCHPAQFDPRRSQFRNKGTQRIDSTLRSYEKTKRKTMCQE

SEQ ID NO: 148450 - protein, 328 aa, Heterodera glycines
SLIATAAHHSFSVHLKIWSYDQPTKEVSKFVFQMLTPSLIHRGPSLSFSVHLKISGAAISPQKRSLNLYSKCNHPHSHRGPSLSFSVHLKIWSCDQPTNEVSKFVFQMLTPSLIHRGPSLSWSCHRGTSLHRGTSLSFSVHLKIWSCDQPTKEVSKFVFQMLTPSLIHRGPSLSFSVHLKISGAAISHRGPSLSHRGPSLSFSVHLKISGAAISHRGTSLSFSVHLKISGAAISPQKRSLICIPNVINTLTHSHRGPSLSFSVHLKIWSCDQLTKEVSKFVFQMLTPSLIHRGPSLSFSVHLKISGAAISHRGPSLSFSVHVKISGAA

SEQ ID NO: 148451 - protein, 58 aa, Heterodera glycines
FWTRSRKKSILSDQKMFRRFRYFDEFSYINAFVDYRNAPISSDQMYSVISNISFLKMP

SEQ ID NO: 148452 - protein, 140 aa, Heterodera glycines
MPLAMPLLSLAFASALTMLSTVHLCSISRRIAKNGALYQLAHCTCGQAMAGAVALAQLLDQMAMLATVCHVLSDHINLLFHNAFAPLRFSPPPFWPSVAISSSSADSVVLLDLLAAVVLPFCAALVMTCSVRVPGSLGKK

SEQ ID NO: 148453 - protein, 221 aa, Heterodera glycines
MPPLRPTQRHSAGQLANQLNGTNKKDSDRHNYSTKDENTVDRMETPYFWGSQRLGKLFDTCTDYDVRKLVQFIYEAAELSMGRKFVCNVSVHCSNSRPESQLYHDGKSMAVLCLLLAIGSLMLFGTFYDIYVHRPLERAVLESGQTNNNNKQQLNIARSVGQSKTILFIRLFSVSLCSLMSLRDLFGGQLLENIPQNLMMMAFLIRTQTFVETLGGPICCT

SEQ ID NO: 148454 - protein, 95 aa, Heterodera glycines
MPCSLFFPIFGFVAQCFFGFVPSLRQLRMGRRLQLVRRLRHWFLRIRRDGTNKSENANGKIGGWTKRWDNNRRRKWGNLRRRKTNKSIEQNDLNN

SEQ ID NO: 148455 - protein, 207 aa, Heterodera glycines
FSPSFIVPMQTLSPPPPCPFQSPLRFAGLSPLGWLSFVLFWSVQVALFRAGLSAVRLLIDLAGPAVYVVMMALAAYLVTTAGMANLRMSLTNEPLSLSETVLTMFSAMALIVSSMGSAIFSFCDFSRFAKSWNSVKLGNFFGLPINLPINYLLFATLTVLTISATKPVFGQMTTDPIEMVAQIDSPVAVTVGALTLTVSIALTATSF

SEQ ID NO: 148456 - protein, 404 aa, Heterodera glycines
RMDYRMLSDDRRERFHNAWLQMKNGYGSHEYDRLSFFHCNPSLIPSAHGGPTFLLWHREYLKRMEIAIRAIDPSVCLPYWDVTLDQRLPKATDSIMWTDSIMWSKLFMGAPDNGNKFIADGFLAFLSNFRVLSMLTKSNMDFFFAFTNAVKKFKNNNFCFSQYFQTPTSECTQSYRTYENALELIHNYVHSWIGGQMTRLETTRLETSTEDPIFFVYHCFLDYIWEQWRQKWQNREQRETQYPPDAGDNSNFKHFTIFKKLFIKNRTGLSNEYTDNLYTYATRPSCTATNGCGSPYLFCDLTNEPLCCAKIKSGGDCSIFQGNKPCFDSPCFDSVCINGICQQAKKARQRNMVKQQHHKPRQVQPRLVKPPPPKKRVCHDGHECCAHAAKGACTSAPSHMNTWC

SEQ ID NO: 148457 - protein, 119 aa, Heterodera glycines
MEKHGDIRGSELFQIQEQRSTMSPRMEKEPRRQKPRKLTFSNIHGATKERWGPRGRKGLSWDCSGRRTAGRTRGNRNRSSFGATRCAKWQNRLISAESGKTRPPSQNISAISETRSLFF

SEQ ID NO: 148458 - protein, 113 aa, Heterodera glycines
MWAPQGGWVVVMGVNTSSGIVSFIDATGAEANKAKTIEHTSLSQGSWDPTGRYFATCTFAGKSRYETGYRIHSFQGRELRRGIDQEIGEKDLVEETITVALNTEKEKIRDESK

SEQ ID NO: 148459 - protein, 374 aa, Heterodera glycines
MSVDSELCTSGEYLSTVNVPAELVEEVKSLGSIEFVALQKCEEEDQIPTFSPPNEKLSPKRKLSVNQSIGANGETKTPKSVQDVLSSNKPSLHRTEAIPFEFGEENSSEKMDRENATIVMKKLTDGSLSAIANLPLHVRDALNSYEWCANGAEIGEWSASGYFVVKLGSATSSVCHLCTVGGNVWAACRNCVMVLDPTTLKIKVDEKQRNNYSQSEKPVFQHVFTAHPRKDSQVRQMICCGKGVWLSIRLDSTLTWNLTSPKCLVVFRFALSFLNPFVNSGANQLDSHLRITSLSELNRRIWVGTGSGIIVSIPLKEGFSDLTQSVETKKALMVSGGDGYIDFRLARDLAHLLIWETECPVKELTGLSRDEEGQ

SEQ ID NO: 148460 - protein, 183 aa, Heterodera glycines
NTMAMSAIDTNVRWNFRPDQCAYVTEYACRLELGKSHQHRKWALVFEIKKDVVDDGDGVSLGADLTGIAFIRKLILISDSFSEKEVFREEVRSLEMVKLKMSERIRELESEMKELKEKMNNSDTVIDEKEDRSQGKRFTRVEMARMVMEKNQYKEKFLELQETVKFTELKRAKKHEEELAQRR

SEQ ID NO: 148461 - protein, 111 aa, Heterodera glycines
FSLSANSDETISFSVKFGDDWFWMIVDEKIGGKLRTSDLDDGTNTKFKLIPQTSGNFVIKASNGKFVSCRSENHWLVADMESPKSLYEEFVLDMVTKITDTVTARVPLKIQ

SEQ ID NO: 148462 - protein, 65 aa, Heterodera glycines
MKLFSTFVLCLMLIIGLMGIIAPVNSEEEPGQEQASAKKEEDEKPKPPKGKGAGKFRFLGGRRMK

SEQ ID NO: 148463 - protein, 45 aa, Heterodera glycines
MIIAIIEAITCIIFIVFAFVNTKEALTKKKFAEKMLKKQIFSRTY

SEQ ID NO: 148464 - protein, 450 aa, Heterodera glycines
IIAMKKALFNIILYVHLIIEKTSGNDVNDEAHLNETDAEDEKMINQYKMYLKYHERLLKLDAYGLEVENNNMDDDTEAFIKFKIEAANWHLKALTLELLEKASQIAKNNQKISKNEKDGQSQLNEALKKNVEELAKRMSMETIEKLVKMHGEVETKCAKMKDDIIGKIFKLYDRYNFVVRIVVIVDKWTTDKRAWSNIGHEKRITELFETNIKPSLEQMVGSSELIRLEDQFPEALRIDIMSQQTLLEIYRQILSPATNEEAIDDDKYGSKKMLARKMMAMTVQIMRENESQFKKQNPKNGNLKEIFGRKMKAILAKAFDNLFSAKSLCEMVKFISFTREKRAQKQLETELKKWEMNKCETEQEQKQTMYEFRQKELNSRFKQDILVLLEAGGEQKTKMGEILAKDGAKSGLVELIEWKQYKELDDGGYLLGIFPSNSWLFREIHLFSFV

SEQ ID NO: 148465 - protein, 553 aa, Heterodera glycines
MLSAQNDEQFFEWLNRKCSTDERLFVANAIHTVCSNRLQVREANFMAFRHLLLSSQQFRAYFCKLANSSQNNYVENKIYDAEIWCDDGWTKVCFEVQKIGEVKEKILALIGDEKMLLLEAQFPEVLKIDAIMLQTQPFLYKNILAHKSHTDETKFWSARLGIAHLVQMVNAMLSNFGLSVSFEFDIKYGFTVKSRDIFCEAFKHLTQQKFHGGIGRTLCALVQFKNYAQTFYEVFSAANDRLNLEAIAKWRPKCAENEEQDKAYQRTNVFTDQWLMELYLEFLNKFAIMDTETQMRYFLSLSYSVWVRWMDRQIDPKNANLPIGLRQIYEQIWKNQRIQYEQIAYDKIFDVFEPLKKFVETKRNEKNLRKFGIEITKRNDDKNSPQKQYKEHIEKSEKLLEQWEAIWTNAKQNIRIWKTTECQTTECHTTQCQEGKLKMARPTEWLQTLHFDTLMDFLENKAMQSQLKNKMRKKQKEKKEISEEKQKIYEEHLGNLEKELAEEEEKEQKKKEEKMAKEKEQKEKEKEKVAKDKEKKEEKMAKEKEQKEKEKEK

SEQ ID NO: 148466 - protein, 370 aa, Heterodera glycines
MQFMDKEIVEKIQLAIQLNNEQIGEMRKKQKEKKEISEEKQKIYEEHLGNLEKELAEEEEKEQKKKEEKMAKEKEQKEKKEEKMAKEKEQKEKEKEKVAKEKEQKEKKEEKMAKEKEQKEKEKEEVAKEKEQKEKMKIKQQKRKAKKEEEEKQKKSEKSSEVTKSSGNLGKSAEAIGKERGKNERDANSIEIGDEAEGDELEDVMANIGLKDQISINEHVNYTNSKMSCSNGGTEQIKMTNSHSFMLPQLNQQIFFNDNNDEEHLKEAYENLERILIEEHFVLTMDPTKALNELKAVVSNWSQGEAKLLEIGSLMLGTNTATSDVDIIYIVPQKTTKSEAMDKFFGTFQCDLSPRKCEDNSLYCLLCLVN

SEQ ID NO: 148467 - protein, 70 aa, Heterodera glycines
MEEKTAEQKQNLPSEKEEGQRDRMISHLNLKFNEQFNEKIVQKYFESLKGCFQRVSLVSKYVDEKELENQ

SEQ ID NO: 148468 - protein, 109 aa, Heterodera glycines
MLTANEAVQRDQDEKEVEEEESWAKRFPPYSAETEIEQLDEFSLLHQQIVAGRVVPCCVNLPEITKSNIQERSYSLSPIYLFKIYRNINETIEINYKGVSNGGSYHYWK

SEQ ID NO: 148469 - protein, 62 aa, Heterodera glycines
MLMDAWGILPGGDRLAVPLKWLPTDPTAPLTGSPLPFKRPSGWEEFIGVINLEKSSFQRRNI

SEQ ID NO: 148470 - protein, 85 aa, Heterodera glycines
MYQREGTGRESPTNSTIAMDADTTISKRTASNAAPQSPKAFPAESVASRWTTGRGIVSGQSIPTEQQNSAVAPIANNVAQFIFES

SEQ ID NO: 148471 - protein, 43 aa, Heterodera glycines
MSSNSANEPNNVSVEQFEQLQNDQKKLLERINKVANSQQQEKY

SEQ ID NO: 148472 - protein, 59 aa, Heterodera glycines
MDELGMDELGMDELGMDELSMDELGMDELSMDELGMDELSMDELSMDELGMDELSMDEL

SEQ ID NO: 148473 - protein, 68 aa, Heterodera glycines
IHTQLIHIFPVAERDAATLLTLIADNIEPGTLIVSDGWAAYGGIQNMQQRYDHRWVNHRVFFVDPQDR

SEQ ID NO: 148474 - protein, 203 aa, Heterodera glycines
MANANLQFPLPDWGHFDADRTNYDAIYDSDQQSASNSGNGVIQDLFKQVLRSGLTNLVLPISVLERRSMLEMYADFFNSLPCSSFTSTRSSPPGKKVSQKSRTLPSLLTFISEHISNSPRLSAFYAEHPDSAISCTAQIESKPFIAGLTSLGVHNVGTMVVRFGRHNETYTATFPDAVARDCHATPWVELAGKVGVNLFVFLY

SEQ ID NO: 148475 - protein, 167 aa, Heterodera glycines
MLLPLPSVLCPFQLLLLIVGAVFIILAQCCGCGGKKGKKADKKAKNGAGQANSGERSKLEKSAVGVGNGSPKEAAVPATTPQPAAGEASANAAAKAEGSQRKKEKPDIFITKKLPENKKREFVSGKNPDYETLKQLDMQIFLKKKLSGTQARPHDFQSQVSSQQSAM

SEQ ID NO: 148476 - protein, 44 aa, Heterodera glycines
MRSMTASGIRNVSTNSSGNRSGHVYANAAKWRYTAATTDEITII

SEQ ID NO: 148477 - protein, 63 aa, Heterodera glycines
NRNYAQKASQTILAHPIPSTIAFIHPIMSAKIIRVPKIACDLSLEKNGVSKIVITLKKLFKQF

SEQ ID NO: 148478 - protein, 60 aa, Heterodera glycines
MARAHLAALKWLALSWPCTPPTPMGGYRNPDKMESLTTIMSAKIIRVPKIACDLSLEKNG

SEQ ID NO: 148479 - protein, 54 aa, Heterodera glycines
MALLLFLKVLIPFFVLSLCFVSAASIDGKSFAENRHKIGRLSAMVAMITNTMAM

SEQ ID NO: 148480 - protein, 78 aa, Heterodera glycines
MWPSQCLDALNERKASKKWRILAKKALHGQLKGAQKTLREEIQRINRSESRAGEAQIGRTNAKGNESQAKGRIEVEEP

SEQ ID NO: 148481 - protein, 374 aa, Heterodera glycines
FRLLLCFVGFSVHLLLLYAVFDIYFSSPIVRGARPFKIAKNSESFTPADRIVFFSADGLRARTFYQHPHLSPFLHGLIRDGKAAWGNLESHVPTESRPGHVAMMAKAAWGNLESHVPTESRPGHVAMMAGFYEDVSAVTRGWKHNPVPFDSTLNQSSMAFLWGSPDIVHLFSDVANVRSDAYSPELEDFSDEDAAKLDRWVFDRVKLFFDEIRSDANAKSRLLLFFDEIRSDANAKSRLLGLRRAIFFLHLLGLDTNGHGHKPNSEQYLKNIATVDEGIRGIVQMVEGFFGDNRTAFLFTTAFLFTADHGMTDWGSHGDGTDDEVNVPDGTDDEVNVPFLAGAGIEPSGASRKLSLAPVDLAPLQSALLGTPFR

SEQ ID NO: 148482 - protein, 60 aa, Heterodera glycines
GDSGGPLLVKSYDGQRWEQIGVTSRGNFVCESNGFFSCVYIYCEWLAKITEGEVQCLNNE

SEQ ID NO: 148483 - protein, 146 aa, Heterodera glycines
MEVIDPRNTLLSNQEVLELLNQAKGRHIPTKGQQMNPAQLNLNTINTIVYEALKYLNETPATAQRRQDIISLINALKKFKLTGAEIIQIVNLRPKQAVEVQLIVEESEERLTEEQVDELVETIINSLPRNPKIEIRKEIHMHRHCK

SEQ ID NO: 148484 - protein, 81 aa, Heterodera glycines
EAYCGCHYCHHFGLCLCHLLCSDLHHLFLCDVKYCAGEAIPSSNVFPQPCWRWRVYWTCAVSILAFGGCRRHICLGHGLDF

SEQ ID NO: 148485 - protein, 119 aa, Heterodera glycines
MSFVNYPLDRMEDQVTIAIVERNLFQNISAPPNSNAPISLIDKVHQGVIRLEDATNRSLRVINRRATQNTDAINQTTADMNANMDTITTRLDQLVDKVDTLEWSDTNDNRTSLQGNCTV

SEQ ID NO: 148486 - protein, 42 aa, Heterodera glycines
MAESNMNACPAFGVCPTCQWHCPCTAFPYELCSLQSLNVDDF

SEQ ID NO: 148487 - protein, 49 aa, Heterodera glycines
MVPNLIGSEMTPMARMVLNSAQTLNASGTFGMYITCSVNGYYVVNNAGT

SEQ ID NO: 148488 - protein, 505 aa, Heterodera glycines
MLLPHGKTAGQVRERDAKRMEYIRARVNRVDVYWECKITSMLERSKAMRKSFANYVDDGPLVIREAFTGGRTGPLKLLRKAGPGEKISYYDFTSLYPYINFTTRYPVGHPKVHVLNQQVQWTSAADNPFPLALLKVLVVPPRQIDVAVLPVKVDDRLCFPLCIACAKEYPTGGVDNDYHCQHTDQQRGWVSTCTSIELNAALDEGYRVTRVFRVLEYEQSDDKLFRPYIAEFMAQKIQASGFDSSIRGDAEKEEQFVQECAEQFGINIDPAKMVVNKGKRSLAKLCLNNLWGRFSLRNFGLSQTLITDDPVTLAEYLDNKSIEVTSIDQLDEMHILITYLHKKEWVDEHACSNIDTDSLILVHPEERCPLKTGPHLGQFTDEYPDHDIVEFCSGGAKQYGLCLRRKGAGADAEKEYVLKVRGLTLNYDVINNQGMRYETFKEEVVRYATTGDYEPIIVTYPNFLRPNIREGGRVVSMPLQKCYRPYVGKGIIGSDFNVKNFGHTL

SEQ ID NO: 148489 - protein, 374 aa, Heterodera glycines
MVAKSRGWASWKFHRYLHSQHGQQGCLQRDALQLMQQIGARPGLNAYDAEIVVPRVVDHWNNSQQRHRFAVFIFGSTGQYKPLYKYINNYYDTPISLYLNNGHFDGVQKEYGLFGQHYCLECEKPYQRPSTHLNSCKARCMLCSRVGPRFPCSPLDGFFRECAGCNKAFRNNDCHQHHLTSNFCVESKQCKECGVIWNVRDNNRNGRKGHKCYETYCQLCNTYHNPERGCFIQQIEPKENDPYRIVAFDLETMQHQAMDPQQPDKREHQPNFIAARVACPDCIENGKWKRETAGCQICGPHRTVVFCQRRFLGTYVDKQVIAENPLEPFVNWLVFELPNKFDTYAYSHFGGRFDMVLVFRELFRIGFNPEMLRR

SEQ ID NO: 148490 - protein, 16 aa, Heterodera glycines
MRLCNRNQKEKNNAIL

SEQ ID NO: 148491 - protein, 61 aa, Heterodera glycines
MFGWAFSLNFDHLQLGLKLSLISPHFDVLVDKHFNGKSGFMPVFIVFLCLCAQKPGPPISK

SEQ ID NO: 148492 - protein, 125 aa, Heterodera glycines
MPEGPVSEPQMVRHMPEGPVSEPQMVRHMPEGPVSEQQMVRHMPRRASQRTANGATYAQKGQSANREWCDTCPEGPVSEPQMVRHMPEGPVSEPQMVRHMPRRASQRTTGATHAPKGQSANHKEM

SEQ ID NO: 148493 - protein, 1486 aa, Heterodera glycines
MTNKQKAKRKKNQERYQRQAEQSVSPGSSPVPDGSADENGVTSHPGIKTPNIGALKLSTPASSIGSKRRGRPPKAGAESIVTSQHSVSSVGTQIVSATQNEESSPRNKKGKINDFDRPMSALEAIASTPVSTQRNRGGRPSKKRGGHAGSGRSKANDSISESSLMDHSSEAITNVVVLPTVTDKINFSTVQINFATTRNFACKIWKWAAIGLYERDGETALAPRSGPRFIETCWNDLTQFLNDGFAATYLAYLASISQRKVVVVDPMVWENGLDRVMQYKNMTFGYDPNVQAEVILLPVHFPGHWTLIIHDVQCGTHFADSLPTPYGRLDWQLTEKIGKIISDILPSTVLTGIFNAVNLTVQHDGNSCGYFVCLYAESWLMNNRTFVLPDLSINYEKRRILWHINELYNSDNVPYHPREGVPTPCPIVYRHADEAPSTSKAAEPVEVDDHDDIMIIEPQTSGQAVDAIPTQAQVAGENQADTLGLVSETCVPQEPIAQTDDSIFVRPKTPPRRSSRIGRRQSASISRSPSPAPRRRSSTNAAEQVTAFTRRCYLVHKGWCCAAAAAKHYPEYSDSGKLGDKKCSHCGALHFPHEDSSICCRQGRVVLPKLNPHPKELEELIVEEKQSRKGKEFVRQMSRYNNLLQFASVSAGHKPSPAGGPMAVILNGEFHRRISSMQAGTTQIPGFGQLYILDPVEAMEQRRKNPTFTGEKITNEEEFVQGHQLNEETLEILEQMIQENHPAASAYKQAREQLQELLRQQRTEELRFFRMTLLDERSAPGGMKDPKLHPHQIITPSTGEGMFAIHADPTGAPAPKGIWVENKQGQLNEIAPFSAWTDSLTYPLIKPKGDDGYKIRIPYAKPAQRRRKSDMSADMFATEAMSDDDMCETESIAESDAGSEASIQSVTSRYDNSKKFVSLRDYCKYYLAIRDENLEWQYHHILSCGGGLGQRWVLDQASKIDWQIATFLRRPEMDLRVSTPKNLLQYLVNQYNKQQVRQNPNARQKTVDDIGSVVRLSEKNVNSLQYWKKMYEDCNTIFARCHDAKKARLFITFTNNREWPEFKENIYKNGQMFTDRFDMWMRVWCSKIAVFHQELYEKSFFGTILGSGESMEFQGRGGPHAHIVAQTDLDAVPEVIQEYIWAHIPPLPDKDDDSPIAQMHREVRDYMHMQLHRCSDSWCGPRDPNFGRCKKGFPAPYSKCTILHPDRPALYYRPSPTDGGAKIEVNGLIYDNSQVVPYNPYILLRYRVHYNVLFAYGNKANIKYALKYPFKGPGHCYVECKEESGSKIGIDEPAQYAKMNFRGATEAFAVVHSMQFAKLSHHVVQLSIHLPNQQPVVYRAFQLVSKAEEIQRGELPETPCSAYWKQWQNEWQHVPSLKDMLFEKVPEQFRWAKDRWVPYKRKPTKRPPIGRVVPVAPKDIERFALYVLMRHFPGDPDHLKLVNGQQYSTFQEAALQHGLLEDDQIWHKTLGEAALHRWPDQMRWLF

SEQ ID NO: 148494 - protein, 28 aa, Heterodera glycines
VFLDSNRQNDFDTHLLLIRLYILFQIKE

SEQ ID NO: 148495 - protein, 474 aa, Heterodera glycines
MSLTNHDKSKDQAQMDASIRLIDDEMELIDAVKDFLIESNTKYSVIGAIGAQGEGIQKKQHLIENLRHWQVDHPQYARREQSGGYVPPLNCAPLLEDFCRARRVKGAEALDAIEVESLHLLLLLYSICHSVVLCVDWFIDLSIVRRLMRIELFYPILFPQSEARRVNLVVLHQRAKSIDLEPLLVSQRMRTLNAMFETSSFNVNGGLTMAKLGFGIYEHICADLNVNYILLGELKPRTRMDEFEKHVMHQDDYGTVIAKLRRQIYQLPNSRSIFAKKTEAQWFTELAEAWKRIREELPTMTEDGCTFKRQRGIVTPFSRNASNDVFMLKQRTAPQGSEIGRGRQRRRSRKGGTNWEDNTGSILRREAVNFTETATDETEEVESKANEHRKTTATAETEGQQHQKRRVWRTRNRTALDCKNMTRKQWNIEQKTKEGSSLKHKSVVEWVDREQQLDESGRSGTPDHGDNEEFDQRE

SEQ ID NO: 148496 - protein, 43 aa, Heterodera glycines
MPNIMGLHGGSMIAMRSKDSVVIACDLRLGEQAMKNIATNATK

SEQ ID NO: 148497 - protein, 677 aa, Heterodera glycines
MSTLLSQKVFWNKANIFHLSISMDVANSVQEILVSLSFNSLFFQLTQINCSSVEIGVYFFAPTKQIELTHEFVTLPLDKGKETLMLSLSFKHITKVEFLDNSEGEGAGLVLFVNDFMARKIQTYIDREGAGFTDFGLESYTSNSKDKFIVLAIQNKELKFFHRLHEILHRADAYHRNYVIQQMNKIKKKHFDIPITFIGIARSDFKQRQLKLIDNNNQNGVGSHRVSVVSTLSDSPNVHPPVNVECQLRVQVGQVHQQQPKCHLPAYTVMALPILPHNQPSAVVTINASHNKSSPAFLAIPSLRSPSAAVTTVVASQLSPTLSTQLPISSQDTFDMLFQLEPVPNHLYNEQQTPSLNNHSPTVFAVVCLESPSVNKFLPRSLKLPKAPPTNGNSQICRSAPPFLSIQTPPSTSQDLQTQFSPQLQSHRMSKTTTSGSAKVGKREREVHLIDDEENESELIDPAEDKHLAVRDQLGEYLHLEYADKLGQDTKTYFNKQMMDVVVPTMLPQQKNFIDCGLFLLHFAQLFLSNPPKFISRHSSFRRWYPTFKIKHKRDELRSVIMQLASHVKSSDFVQLPTPKRKNKKIGRRSQVDKMQMILDGMALMGRTRRYSDSELDGIMKDEHFSCLYRPRSLDSLIYENREKPLVLQPPTIAEMSRFKQLRRVRQEIFASQVRQG

SEQ ID NO: 148498 - protein, 210 aa, Heterodera glycines
MQICVLLILFLITLIDQTETEKKKLEQKSFDGIFGEKWEEREEEKRNELKKREIIGKYYKIKEKIKQKGRKYSTKEWNKINSKIAKKLGTNRHKIYEWIKEIGLYKYHKSKTDEQKRKIVQKFIVMKNEFKQNRKYSQKEWEKNYAEICKKIGVSLSVIKKWKKHFGIRKFYGHNSNNSNYMIILQAFFTVVPHCGSTFTDQYFPIELSK

SEQ ID NO: 148499 - protein, 44 aa, Heterodera glycines
MRENAISKCIARNKTCRKNLTTTTTTTPATITASMRMLNYGSLY

SEQ ID NO: 148500 - protein, 133 aa, Heterodera glycines
MAQNPAQNDDQVVFALTEEEMVEWDERERRWQEESRLRREERRREAEERRQERGGWHSDMLRRQHVWEQQKEERERDRERWEQRMEDEGRKCDERSAATRKKEKEEKDKNDVTDHYSFKWEEWREKEKLFFGK

SEQ ID NO: 148501 - protein, 190 aa, Heterodera glycines
MCQELAEEAKQSIEIAKNYRQEIGQIYRTAYSQPDLGIGDLANKLKETMRENQIRCKKETERAWRDVAALTDEVSDFAKSSRETLNRAIKSREKAPYANGIRELYLKMSDSIWEIFTILDKINLESEKAESTWRDFERCKTFDQATKLEEQSQNSLMEARRLHFESRRVQSQMLNYENRLQTIVWEHMGI

SEQ ID NO: 148502 - protein, 151 aa, Heterodera glycines
MSKILRSLAILLAFLSLTDAIGFPMQQCCCPMQQQSCCGGGGGGCCGRKKREAAALEAVQPHFKSDETPCPQTEWRQVIDESIRTDDAIGSVNAIQTALYRRYANQKFLITCSAADEDKTGTNKVHFSSSGDGYCNLVKERIWCQAVALSV

SEQ ID NO: 148503 - protein, 153 aa, Heterodera glycines
MSSSLIMNCLIALTILAVFVSTIDAIGMPMQCCGQQQQSCCGGGGGGCGRRKRDTEAVQPHFKSDETPCPQTEWKQIIEESIRVDDAIGSVSAIQTALFRRHADQKFLVTCSAADEAKTGTAGTNKVHFSSSGDGYCNLVKERIWCQAVALSA

SEQ ID NO: 148504 - protein, 128 aa, Heterodera glycines
MSKFVPLFLFLFSALLLIFLCPSTSAQGRPPPSKSGRPTQHGRVTTDGEEKDGTAEGGAADVESGEKEEPGLSQKLLNVLLNHLSSHLPKISTESVVNWVQETFGLDRQTSRNYVRKAQEIKRHRGED

SEQ ID NO: 148505 - protein, 195 aa, Heterodera glycines
MPIMGSLPFFMKKSGTENNLFSLLSKWNKFVEQPTAIDEEEKAHFDETNWQLHFDALIDLILKSKSFREKLTEGFDNDENTKQRFLEFVLPNYQKAVLKLLNSGDFAEFENEIALKMEQENGEIIEKMDKEKAKADQKMKELIGEEKRTKKKNKRAMKRKQRQRSAADQKEGESEQKEEKGKERNREESERISEE

SEQ ID NO: 148506 - protein, 593 aa, Heterodera glycines
KRASERGDRKERNREESEQKEEKGKERNREESEQKEEKGKERNREESEQKEEKGKERTEEESQWNTKESEQKEEKGKERNREESEQKEEKGKERTEEESQWNTKESEQKEEKGKERKGEESGQDFAREENDVEIVNDQNGGERKQAKKNCENNSMELREKQERKIRKEKKTQKRESAQKELKRKKDNDGKSERISEEKIEEKGRKNNNERKESREKNEGESTQNERKRNKEKRKQKLKALEENKEININSWNKTATDSVTTEESQKQGQENGEETMEKGGKASAEKEREKCHRMLGAELAKVNLGSFILNSFLHSNYQEFLANPNESKRCFLDIGVYVNEIWHRMEIIGILSNFTGVKWMESAGIVVNWEKTMKLRHKWREMEREFANISTKSDEKAVDLDELESNLHKMLKSVILTTEGILIDDGQMEEKSEQNERKKVKMQLHLNKFAKTIIWQRRFENDFAEKNWENLDETEQNNILKMLTFNRNDKKLAHRFNEHLENWRKLTEQRQIDRKLFDQFYKHTTHSFGLGSVHLGVNFAENTQQIYFGSANNDRMHLSIINELLTENGYTDCPSVELALDKVKEIVSKWVGN

SEQ ID NO: 148507 - protein, 169 aa, Heterodera glycines
MAQLANQTIPQEAMLQALSGYLANDAINRMIEHRNFAKFKNLLWIIKFWAKSNFIYGNKFGFFNGISLAILCTKIFLFYPNASVIFLFEKFLLIILTWNWPMPIKIDENKKGEFELFNWRPSRIEFENGEMQMPIITPIGLGQNTSKNMNNSTKKIIEKQLRQSLILIK

SEQ ID NO: 148508 - protein, 106 aa, Heterodera glycines
MHKTDQALISLDRAYFPGHYCDTKKSDNGNGSISKGGGRSSVGQHEKFGPWHMPCRYAYIVFRSRSDQLEWVEFRLEPELKVDSADDQRNDCASEEHNFAESLLKH

SEQ ID NO: 148509 - protein, 63 aa, Heterodera glycines
MVGKRWKGIKICLAQWPYQWPSSGRKKVRKARQSQCAKSWPGSDEAKCFGEGLAQETQIILSA

SEQ ID NO: 148510 - protein, 26 aa, Heterodera glycines
DYFSKHLVDWGIIGDCGINRDWAIIR

SEQ ID NO: 148511 - protein, 138 aa, Heterodera glycines
MATRLLGICNLGTRLLGIPTFGDPTFGNPDIWGPDIWGSRHLGTERHLSKRHLGKPPTFGDPTFRDPTFGEPDIWGTRHLGIPTFGDPDIWGSRHLGTRHLGTRLLGTRHLGIPTFGDRTTFEHKALRETTDICRPDI

SEQ ID NO: 148512 - protein, 171 aa, Heterodera glycines
MSSIDNLRIYAYGEGGTGKMGSFKMGQICYPEKNGTYPFNTSREMPRRRQFAWRGERRGGGETYGGRREQQRKGSGRAVEEGNANRKDETAEKRRDSRNEASQKERAEEAAEDGQAEEGTGGGGDEAATARKRTTAPRTNCDTKTTKSGPNEDGAETGTDQQQQQQSRDYW

SEQ ID NO: 148513 - protein, 177 aa, Heterodera glycines
MAGAGKSDTGKSDTGKSDTGKSDTSRKSDTGGKSDTSTQQKGRLTLKIEKFSDFSRGGESGTERYSDAVNIRGFSFKILANTYTMSADKSKKCLGFFIECNKNGSDFDCAVDRWLDDWHAEFFAFGTCHFRGDDGRECEQNNGGAWHLRWGEERGRMQLAGVGLFILFASNIWFIYK

SEQ ID NO: 148514 - protein, 90 aa, Heterodera glycines
MPKQNEIVLKYSFLDLTWFLDIEAVFYAISKTKKCLVVKTIFHISLHNFVSSARIETGIRPLERAARALQEGPQPQPLASLPVLSLGFVK

SEQ ID NO: 148515 - protein, 113 aa, Heterodera glycines
MPKQNEIVLKYSFLDLTWFLDIEAVFYAISKTKKCLVVKTIFHISLHNFVSSARIETGIRPLERAARALQEVKKLFEFLQFCFHNFRKVFGIIMPKQNEIVIKYSFSGLDLDF

SEQ ID NO: 148516 - protein, 114 aa, Heterodera glycines
MANCGYQRNKIRWKLFEWANSEKVAEKLEHYHQIPQLERTTRGKDLKGKNAFCTVWVAGLVMKDENGDVQNFPPIYSPNSNGPFNSSYLMHTLFFTDAQQMNENEKFNGFDLTF

SEQ ID NO: 148517 - protein, 247 aa, Heterodera glycines
FTDYYSPTEETFGNLSSSECEEEIFKDTKETNEEEEEEEKEKEKEEIKEEIKEKEIEIEKEKEKAEQIWKSNYNYCDNWTEKRKWPKKKKGKAKKEKEEGNKREKAWKSEQQKGENLKAKSKGKKKNGKETLDQKWEQMEEKSELKCEEKPKKAEKKRMIYQFISKHSVNSFKRGQILELMDKIEQTIGEWVNRMSGKRTDAHLLVNGSHLMGTELDGSDLDLICVLSDELNFNGQIKGNLFSLLGM

SEQ ID NO: 148518 - protein, 65 aa, Heterodera glycines
MAFLLPRLALASSFLVLFAPLSDSANVLFSSTSLYPVHRFIQRELASELLRRNHSVTWFEYGLSP

SEQ ID NO: 148519 - protein, 107 aa, Heterodera glycines
MVRRPSGSDPHPKCRAHLSHGGVNSVIESVWHGVPVIGWPLSANGRDNLLRVTARQAGLMLDKKRPSKQEFISAFHRIYIKHYKEEMLIFQVGFPTNIECHLNNCAK

SEQ ID NO: 148520 - protein, 70 aa, Heterodera glycines
MTSTRWAEIEGEEEKRAFVKREVRRLEGWAMRTARKELDAEWPDVLRLCDLLMERKTAGPTDLRTFVHFC

SEQ ID NO: 148521 - protein, 201 aa, Heterodera glycines
MPKTVPNIIQVIPKRNIVITFKIQGYAWFCCCMLSLALREVGSNGCTVAAVIGFAFPFFDHAQLGLKLAFLSPCFEVLVDKHFDSKSELTLWRPIEIRRKNSVPDRPLTSKIRFKCLQIRSFNKIRKFLNATTSVRYKIQFIIDPLSTQIVTFELANERTKEKLTLIKASENHQEDQWIMKRCQNGETATAVQWEFVNLTI

SEQ ID NO: 148522 - protein, 168 aa, Heterodera glycines
MLVATFFLFHLIYYHIMNIDGILGIGHDDDDDDDDDLFGELWKNIPRKNSNKQNNHGLKEEEAKRKIKIEQKPQDEEQKNVEEKKEVSKNHSMQIKIKKKATFLDDKKEEKSVGTKFSEENCRKVPKFDFEENLAKSLTEASPRTADMCDESEKPSSIDHNDKHKNVK

SEQ ID NO: 148523 - protein, 85 aa, Heterodera glycines
VFGVAEYEYTLYITPCLTLGNNSQKVGRRRRRWRTGKREGSQGGKEQDGEKTPFLEMPKTVNMKRRKERTKETEEKPNKRAPKSG

SEQ ID NO: 148524 - protein, 52 aa, Heterodera glycines
MFLVFNLGFGWTNGAVLDLLVKYGDKMTLTQMPDVNCSKMTKDPEPEVFPPE

SEQ ID NO: 148525 - protein, 75 aa, Heterodera glycines
KPPCGRKTKKCKTYKFITWSIFNQINNSSYHSIALGVFYQNIILLNFLLKYIKRYGKIPQNLKSEFFVQNFFEPQ

SEQ ID NO: 148526 - protein, 103 aa, Heterodera glycines
MTEAQVSELKKFVRKNFGKAEGVLKQHDPEDWMENPPAFEKIKDKDLKEWAKDLNNLWKQLGRKMPDEELEFWETKRSVTVVVKKKPIKLCQYRADSNVSIKQ

SEQ ID NO: 148527 - protein, 603 aa, Heterodera glycines
RADIVPSASFARPSNAPAASLPFYANPPFLRFRRAVPFPTSKGTGRTVADIFSAKEYRNWASEVGPKHTYDHFAGGRRRTRWTGDHFAGGRRRTRWTGTAGRMGAPRSNSLPPKAILMDNVNGSIIFPLNPNSALSTFPDILDRLHVSPLTNRRVPLRTAGPGFDVDGLSVANSLSGILSVTIVEGRNLKVPDRVHSKQLYCVLEVDEQHRARTGISTPEQHFRWAEQFDIDILNATNASWAEQFDIDILNATNASFFIYAWHPKLRHRFCHKGDIRLMDAFLVEGFGTDRMFTLQLESRGQLLLKVAFSDLAHSFVAFSDLAHSFCRIRRPSADCSGVFGRSLNWLVEHENVEVPVVLNRLATELERRGPVVLNRLATELERRGVDTAGLYFLCGATERKLPLRCGATERKLPLRMQLEKNSAETDIGERPVPDPNILTCLVKDFLRELPEPLVPFNIYSMLLDAASLATPNKVRREGHFCKQFVGIIPNVLQNSLVFLMAHFRTLLASEPHNGLTAQKLSVVFGPLVCQFSVFNFIYAIPSSLSNSLSNPANSLLNAQHAAKALRLLLDHWPREVKSENGKDKRTNTEAKLIICFLRWEFR

SEQ ID NO: 148528 - protein, 103 aa, Heterodera glycines
MCQGAGPEEQRKPKIVASSHRCSVLQRHKNGEPSQALHRATPAGRGQATQRTTETPVEAAPFSTRWDWYADRRLEIPRRAGMRNEWDGDSCTPPKNELCCLLY

SEQ ID NO: 148529 - protein, 156 aa, Heterodera glycines
MQAPDWGNYDTNGTDYDYIYNNSDERDNWNSEQAGVFRHLVGQLGTGQTLQNLALPTFVLERRSLLEMYADFFAHPDELIAGAYENTAEKRFLAVLKYYLNSFYPARKTDDAKKPYNPILGEVFRCRWTLPGVPLSASRTAGGPFPGSATNQVQFK

SEQ ID NO: 148530 - protein, 293 aa, Heterodera glycines
NMTKSDVSTGMVLLTGNSHPELARLTSDRLGIALGDRLGIALGDTTIYNKPNKETSVDIRQSVRGKHVFILQSSNKNVNNCVMEMLILIYACNVNNCVMEMLILIYACKTSMAKSITVIMPYMPYSKQCRMFRRSITVIMPYMPYSKQCRMFRRSSVPMKLVADMVCKAGASRIASRIVSLDLYRKEIQGFFSIPVDNLRASPFLLQYMKYNIPDYKNAVIVAKTPGVMNKATSYSERLRIGIAVIHGEEKTDEGVQEDGRQSPGIAVIHGEEKTDEGVQEDGRQSPPPSPTD

SEQ ID NO: 148531 - protein, 25 aa, Heterodera glycines
DTPSEKTRCVPINRECQRKTLSFFL

SEQ ID NO: 148532 - protein, 767 aa, Heterodera glycines
VTNAAPQNATPANLSNANLASSIDARLSAFHYNPEVGTTFECCTLPEASKVTLPEASKVRLLLGKLGEEEYNKYRDTISPTQPDQVNWNDTISHLKSLFAETRSLFVRRYECFKIRQQQGQDVSSLIAQINASCENADLSLTKEQLKCIILIIALNDEHHDLRQKALKMLEDAQKNANISLKKIEEELRAIQLVKESALSLVNPPIATNAINTRPRQWTDPAQRQSGSNQRQHHNANSNGKQTRGRPTLPCASCGKSDHWRSDCSFKDAICLKCNKKGHISTICRQKKAKSAPNNNRSTQSKDTHCLHISTTQGRWWKLIILINGRQTSMNGDTCAQATVISLQTWRELGEPNLTPSDIDAKNCNDQPFALLGKFQCTVLSDKPPQTLIVYVSGEVGHNLLGLPWIEAFEIIPRQILFPTNKTADQATKMIDNFSTVKPPNKSINDVASLTAALQSDFSEVFDRVLQIGAIKPIDFSHWAAPILAVKKNGKTRVCIDFSTGLNNALELNRHPLPRPDDIYASLNGAKLFSNLNLRDALQMDEESKIVAINTHRGLFQCQRLPFGVNSAPAIFQHLMDQICAGVPGVFAYLDDGLIATKTLDQHITTLYTIFGRIKEYGLLIQLDKCLQTELLFLWHIVSANGIRPCPSRSDAIRKMPAPIDKNTLRSFLGALNYHGRFVKCMRELRAPLDKLLQNDVIWNTSGQQNAFEKAKQMMMSDCAHRTPRHCAHEGTCSSPRVLAGNGLSEKSCEHMRRVAIGPEKSNKSTS

SEQ ID NO: 148533 - protein, 55 aa, Heterodera glycines
CGLCKRVFPNSAASYRSPAIGRRRQSCAMILEVISGMSDQNDKKQIAIFFASFFV

SEQ ID NO: 148534 - protein, 229 aa, Heterodera glycines
ISRAISQAGPVLDPFTWSPSWVGHICRRTLSLAPDPIGGQPKLSVPVPAAFLYSSMSSTKWYQWRPAVSTTNGENWRERRPFRAVRPPAFGLSLLSDEGNLYKGITLSDRNLLMPFPMPLSGKKCRALFIVPYVETSNELNESLYLAINDDRRVHLVASFTHCTFFLRFVVCSSKTRETNIEKAVEVIREMADKVTTVEKANEATERDKAAKALADDGTEESGTLRRTN

SEQ ID NO: 148535 - protein, 43 aa, Heterodera glycines
MPNLDEICFIDHEGTRKRHTRTGQIEMFLYYAVKKDNFRISLC

SEQ ID NO: 148536 - protein, 41 aa, Heterodera glycines
VGYQPDKQRPNFFRMIISNPAIREIDLDFLINEIVTLGEDL

SEQ ID NO: 148537 - protein, 331 aa, Heterodera glycines
KHNVNPFEIIWKESIVFPLFKKGDKFNPENYRPISLTCSLCRVMERIFSKNIYKLKNNKISESQFGFIRNRSTTNQLNSCRRLVSLLMEKKVDCIYIDFKKAFDSVPHNLLLYKLEKIGIRGKLLNWIKAFLINRFSVKIGDSLSSVKVCSGVPQGSVLGPLLFLIYINDLPDVIPSGVNIKLYADDVKIYLLSKNNGNYDKALHNLFEWAIKVSIQKTFVLYLGSKNPKETYKCDGNTINAVDTIRDLGINIDNKLQFSDHVPNNEECLFMRSLFRIIKSKSSKIWITLYKTYIRPLLEYAPEVWKPSLQKNIKKIEKMSKISTKIVFKC

SEQ ID NO: 148538 - protein, 102 aa, Heterodera glycines
MEMVPFELVNECTKEKLTLAKANENELDKSWIMKRCKIGETAAVNWKDGNWDNNCNNVFFWLFSGTNCIGPLSPPPPASEDEEAGQSITKGEMSEGQTNKNS

SEQ ID NO: 148539 - protein, 38 aa, Heterodera glycines
LLIHSKFPCQQRNRLGWPSFLGECNHLDNAWPAEIVRR

SEQ ID NO: 148540 - protein, 58 aa, Heterodera glycines
MVAQSEKRWHAEAIAFLFEGATKYGMGQHSQKGLCRHVANGVQLFEGDLMHLRNVRSF

SEQ ID NO: 148541 - protein, 262 aa, Heterodera glycines
MDETAVWFDCPDSRCVDNKGAKDVTVVTTGHDKMRVTVCLTARNNGQKLKPYVLVNRKRPVPQIVKQFAGKLVINFAGSIWMNDDTTEDYLHKIIGAKLFVGERLLVWDAFGSYKSERTKKVVKGLGMETVFIPGGCTKFIQAPDVSWNKPFKERIRHFYSIWMSNEAEKEFTSAGNPKAPALHVVLDWIHRSWQEISKEVIIKSFKVCGLTTPLDGTEDEKIACFKPEGAIGPIGIKFLRKFRINETAKDGRKRSRRRRLI

SEQ ID NO: 148542 - protein, 76 aa, Heterodera glycines
MVETVANELALSASQTHALLNKAIRRLSEYFDSICREALEHNTMPMIANNKQKQQQNQKENWWQKRKATNARRSKN

SEQ ID NO: 148543 - protein, 135 aa, Heterodera glycines
MAKCTKTQNKRSRSEPGQLRPANSVPPTPSRQLRPDQLRPSQLRPANSVPGQLRPEPTPSRANSVPPTPSQYKKGPGQLRPEPTPSRQLRTGPTPSRQLRPRPTPSQANSVPPTPSRQLRPKQKFKNFLKINLSL

SEQ ID NO: 148544 - protein, 433 aa, Heterodera glycines
MLLTEYGRMPLSAASPIGEGNRSVPSGNCPVGTIGQWHVRDGIRIGCGGRRGKGGGADGRRTGGSGATRGANCCAKGTGNGWTMRWLLQNASKVLYPYNGKGIEVLGGEELALIDGTNRDWWRVLTRHGVEGYVPANYCELAPDEEKKVRDEIRGQGSVQLRQLDATADELLEQEHSRSEDIDAAQKAMRHLWNQLQKAMNGKQNELERTARLAQFQDECADMRNWLTEKSALLEQKPGGEADMRTLQIVQRRFQNLERTTRGKNDRTQAKSGRNNGGAEAKRAAGDQRENGRIGQNVRTTADQGTAVHRRGGTKPRQGTIRADGEPTTHSLIKGAVGMDGKDQRLHSVGASLGPFSSGGCPPPARQNQRPNAGEGIRIFLCRRTRRASNEKRGSERSGKAIGRIGGSERDVGKRMGEARNGMQAVAGVTGRK

SEQ ID NO: 148545 - protein, 70 aa, Heterodera glycines
AQIYGETESFGNSFPIACTLIMRWISAPHNCLSTPNGHLKKSIFLFSGQSPRTDAPRFMGRPNPSGIASL

SEQ ID NO: 148546 - protein, 258 aa, Heterodera glycines
MTVCLCGQRQMGGADSEQTRAAVAAVQQQSVGRDIIAIPCGTLLASATGVITKVMESEKKVSVVLVCGSGENFVVTEFKQNSANALQKYLSVGNVLKLQSVKAQRFNEKFDGQKFFQTPFPFEFVVTKHSKICLVKTEVLVAEKFTQLVAGQIKCVLTTPFSLIGEMFAAVVGDFCGKRADLFISGEKLPEMFGQLDSKDQLELKRCFVKIEDECMQLNVLASDVNVCGCKVTIDDKLVTPVKRKSDEAILSPQSAKK

SEQ ID NO: 148547 - protein, 163 aa, Heterodera glycines
NPPAFQSLGLNSAFQSLALNPPAFQSLALNPPAFQSLALNPPAFQSLGLNPPAFQSLGLNPTAFQSLGLNPPAFQSLGLNPTAFQSLGLNPPAFQSLGLNPTAFQSPGLNPPESITETQFSGISSNATQIKQFSDILPVSQSPDKKLCQIHHCNIISSKHHPK

SEQ ID NO: 148548 - protein, 268 aa, Heterodera glycines
GGLSPGDWNVGGLSPSDNAVGLSPSDNAGGLSPSDNVGGLSPSDNAVGLSPVEVGGLSPSVNAGDLSPLFNAGDLSPSDNAGELSASDWNVGGLSASDWNAGGLSPSDWNAGGLSPSDNAGELSASDWNAGGLSPSDNAGELSASDNAGALSASDNAGELSASDNVGGLSPSDNIGGLSPSDNVGELSPSDNAVGLSPSDNAVGLSPSDNVGGLSPSDNVGGLSPSDNVGGLSPSDNVGGLSPSDNAVGLSPGDWNVGGLSPQDNAGE

SEQ ID NO: 148549 - protein, 224 aa, Heterodera glycines
YVDLDVIAFLNRIQRLLQDGEMTLRVRIFHHQRRSLQIFCAQIWPLINKNIVTAVVYPSIWLPPLQQDNAQQQTTLNDLPNLKLLEYCDVSPSQEVIDWLHNSSADGRPKAVRCGLPRQMVDELRARFVAASSPTIFIVLVHCLHPIERFQIDNDVTNERMELQLLENARPNTTELHHRRLLVRCPIGRNEEQWAQFEENAQNWKLAEQPFLFIELDDRHLGEE

SEQ ID NO: 148550 - protein, 111 aa, Heterodera glycines
MREAKARVTNESDRFVAASSPTIFIIVFQCLHPIERFQIYNDVTNERMELQQLPDADPRTTELHHRRLLMRCPVDRNEEQWAQFEENAQNWKLAEHPCLFIELNDRHLGDE

SEQ ID NO: 148551 - protein, 26 aa, Heterodera glycines
MEDQMGTELAECFSSDVDWLHLKVVL

SEQ ID NO: 148552 - protein, 179 aa, Heterodera glycines
KEMNKFSWTLNDFEIGKPLGKGKFGTVYLARERETKYLTALKVLFKKDMDKHGVSHQMKREIEIQYHLRHPNILRLHPNILRLYGYFYDEDRVYLSLEFASRGSVFQLLRKSKCFSVPYSARLIYQLADALIYCHSSKMITKILKPENLLINTNGDLKIADFGWSVHAPSSKCVFVIFA

SEQ ID NO: 148553 - protein, 214 aa, Heterodera glycines
MPCQPKLPFPSLAACPRPVHSHAIGGAAEAPVDCGEYAQESVQCAIGRFRESFGPQIVHFVIKLMFICLEKGTERERTRKRTRKEKKVEEKEEHKVEEEVKEKEDRKDDQKVEEKDKEDRKVKEEKKQEEEQKEEEKVEEEVEEKEEQKQEERKSRRKWKRERKRNGKRKSKMPVGHWFYYIFEKWGPNGNRWRYLLLPVCHGNLRFGMRPDVL

SEQ ID NO: 148554 - protein, 434 aa, Heterodera glycines
MRKYVLMCADWVNALFMLAGLDSPQEKLTLIKNAFVAFYTFEQATCTAKVCRNAAATSNAASAAGGGALLGGIPPQAICLCNGTLVARDVPQDCTTNCLLANNIVGKVLDELVTPLRRLNLSEQERVALTALILLDGGPVLSGRHFLDPVNLWHFYVVLIARFPLPDQTVAVRWAVSAATPATTALPLAAIMAPAPACTWSRTSCKTHCSNMCASDGQNVCAPIHGPVVGRNLRLGGVKPRPVVVMEFEPLLLGFDEVRRRQQQHHQLHQQQQQQQLDDIGVEQRPRRMSATEMDQLLLAPLFVNGGGGNFHHLHHQQHHEQQQHQQQQQKSNNNGTGSNELLLSSSSPEGTGGAATVTTTAATQPSSAAAVTTGGGGDSAAGAANMYFGCHSTTNVDRSGGANGTDDGQSHSREWVSRISQDPGQHSLPGFNS

SEQ ID NO: 148555 - protein, 74 aa, Heterodera glycines
MADIVQILEKTISPSWLCTFIYWFDSFEPEFIQQLAVVLSNTSNSPIVRKAAGLQIKNALVSREQAVSDQKRTR

SEQ ID NO: 148556 - protein, 33 aa, Heterodera glycines
VCILYIEIAMDTLFDVRNNFYLGAFQQCINEAQ

SEQ ID NO: 148557 - protein, 391 aa, Heterodera glycines
FGRDYETDPNHFYFGDFERHNAEIATFHLDKSLTHCALSICHCFFRILGYRRAVPTVGRVMNMTTKNRCFVSKCDYYCDTTHAICGSPELKEGSVQVFLPDDTSVPRKHNKSPYRRYSMPTKVTVTVRLFRTYSKKTQLAAWQQDMNYCQSKVKGMKQYAHGRRLLDLIDLHLMDYLIGNQDRHHYETFSVFGTDIPSYAIHLDNGRSFGRTDFDDDDILMPFRQCCLIRPKTLGTFFGFYSGVKGLSETLHDSLSKDPVFPVIAFKHYAALERRLYKIMEYLLECMDKQNGDLTQMVVNEFHNPTVAEPLPGEESETEEDETNDAPAGPPADQQQKQREVGAAPAEAQHQPADENENAKNVLKAPAVEPILKEEQRQSAEGHGKFPKPPA

SEQ ID NO: 148558 - protein, 55 aa, Heterodera glycines
MIDIDCFFEQETNSLDPGCLVRLDEYGFYLVWEPKGKDAGILDMNQRFFGNFLKT

SEQ ID NO: 148559 - protein, 77 aa, Heterodera glycines
MYFPGHLSINISALINQYFTDQPFSSYIVITVKHIATQQCLRQLYVQQEIVGQKMVWEEANSHANYTPPIRHGRSVN

SEQ ID NO: 148560 - protein, 24 aa, Heterodera glycines
MAKQKPVLFLQMECVLCLLGVEIN

SEQ ID NO: 148561 - protein, 126 aa, Heterodera glycines
HGAVTSEISPNQRLISFGSASFIRLSSSTRNSEDTLLDEVPPPTQWALSHASSFRTGPTRGPFLRLPYPPSPHFHRPMDRPAALAFLPTIGSLYGSISGVLIVLMILLVALFGSALWSCRNYKKKC

SEQ ID NO: 148562 - protein, 430 aa, Heterodera glycines
MSDVPENANENCPGTASANAGKTSACAGCPNQSACSTGERAVDPDIALITERLAGVKHKLLILSGKGGVGKSTVTASLAYAIANLQEGAKPFKVWRRFTRWTPIFVQNNLFVMSIAFLLDTRDEAVNFCVKTKVPVLGVVENMCQFVCPCCSTASQLFPNTTGGAKKMCADLSLELLAQLPLDPRLAKSLDEGQSYFEHFADSPVAKQFSDLAQLVRKEKRRQRKNHSLVGLDAEEDTDASDFSSSSASSSSDGSSEDSSDSASGDDNDDAEQFTADSLPGCSSSVAVQQPQKRKKTATESDGTTAPSVLDGVVKRENGEPKRRGWSTTDAAWDEDEALDIGKTAEECDGTVPSVAGGTARGKRTAQQQKTEMAEQTAEEQHKREAEEEQKRAEAKERNQRNRAANRKRRLRAVVEEQMMRRHLGPNHHR

SEQ ID NO: 148563 - protein, 188 aa, Heterodera glycines
MSGSTALSPVEQALWLGQPAQADVLPALALAVPGQFSLAFSAFSHFSQNVPFAIFSNCWQTVSTGNVNATNCETVRDNAAKLGIDEKGNFTYSVDTSGYRPEELNVSIEGDEVVIQGEHKETVEDETVHRQFVRRVRIPDGFQKEGLKCAMDDACRMCVTAPKAGAEPAAERRSIPIEVKAKAIDEKK

SEQ ID NO: 148564 - protein, 301 aa, Heterodera glycines
MKFKLLLLLSLLMILLYTIKQTVQVKLKQGKSFDEIFGQRCDDGAEEIVCRIDHKIHGEIDDQNNQIQQNSRQFDQFFDEILEVKKEDSEEMSNNCDELEQLNENNGQSYDHNKRIVEKFHKIKDKIKQMGNKYSAKEWKKIERKFAKKLGSTQKKIYEWKKEFGLNIRNRYSDEEKLEILRHFDQIYGQIKSKLKGKLDGKREKCQKILAKHLGTNIKTIYKWKKQLKDGNSMKKQKINDEKTETVEKYFKIKNEFMQNGKHSRKEWEEFRAEIKQMFGVNYTTIERWANKLEIEQNVSK

SEQ ID NO: 148565 - protein, 45 aa, Heterodera glycines
FEDICKLLIINTQSYRTTPTMLNLIDNEQSYGSKSLPTMFRPTTF

SEQ ID NO: 148566 - protein, 94 aa, Heterodera glycines
MLFKNKHSLALECFYICRMYKQLQEQQKKNKPLSPPAYKEEEADQSNEKVCSTIHGPSDQRNEEEDNEEADQSNEKVCRTIHGPSDHQRNAKGL

SEQ ID NO: 148567 - protein, 101 aa, Heterodera glycines
MPSSALRFISADCWLLVFDFLSPSQLGFGIALISRRFDLRVDEHFKTRKWKLNKQLLIQWDIEENGTKKMQIVEPNGNPLPIPQEPLPSKVIGFNGRINIM

SEQ ID NO: 148568 - protein, 202 aa, Heterodera glycines
MFRASIRGINLNAITFRRMCQLAPSMLTDCPALRYVDSEDAIFPEFLLPDDDNAHAADGQAVAKWLFTPLPDGASKRMKCLVNLSVDQWTASMEQLRTAFSNASSPVTFHINLTLSSTLVGSVVPFFMMNEATGEQLALEQYDLDDFELFRCPIEWDWENWKNEWKESCAARPRRISFWIRDGGFEEGLLEAASPGPSDQQQ

SEQ ID NO: 148569 - protein, 98 aa, Heterodera glycines
MNKRWICGDVWMDILPSFNRPQLGLKMALLSDRFDVLVDAHFDGKSELTIWRMIRIGKDEGPKAKLLVEINGYFVQFPMPNRPLPNKIRFHFLLIRVI

SEQ ID NO: 148570 - protein, 350 aa, Heterodera glycines
WICSDVWMDILPSFDHAQLGLKMALLSYRFDALVDTHFDGKTELTIWKWITIFKDKGPKPRLSVWIAGKFLDFPLPDRPLPNNVRFQCLQIEYIDHSVLTFLHANKHIWDRSGTKLTLWPYRTEDEQRIWDVFIREIWPLFATNIRHLSFASSVDLDNLRLRTSPTILTDLDQLHSIDSGHLCPDGIADFDVLNPTAGQVLSKWLHTPSKNGQPKRLRYSNFPLNLGWVNSFKEAFRRAITSVSYHIQLYLFTTTMTTEPFELVNGRTNEKLTLKPSKEYNLVIWLLQRCPIGETSTAPVKWADQHENSGANANLNNINFSLWIFNKTIGPLSPPAEEENEEEADESNEN

SEQ ID NO: 148571 - protein, 88 aa, Heterodera glycines
MDQSSMINQNSLFSTNLPALSSVAFLLDVYMPGQSDLLFALLYFSFCAHLVGMASSVVALLLQMNSVCVLLQLPRPAPRGWTHSQLMR

SEQ ID NO: 148572 - protein, 172 aa, Heterodera glycines
SKNIAILPRRDSDLEAFSHNPSDGSFAPLVYRPSTTKCLNLRFLSYAGLLLATGLGKTNLSHDGLNPAHVPYWWVNNPTLGEFCFAMIGRADIEGSKSDVAMDAWPPQASYPCGNFSDTSCWKLYTLKDRATLSRSVFVLKIRIKAFAFLLYERFPSSLSSLHPAYALTDVP

SEQ ID NO: 148573 - protein, 163 aa, Heterodera glycines
RTSRRWTQLRGQCTGTHTSTPDFPVRTLPQAKGLRALMPRVFSNASTLVPRQGVPIHELIGLVNHGNTPLTRIPTPPPTLGSASPVLSSPQHLCLRPHLHKSINSPNFFNTQTSCMFYSFRQLPNAGETEATTKVAPQQQPSPFNAEHKRKQALEPRRPRSPQ

SEQ ID NO: 148574 - protein, 174 aa, Heterodera glycines
MLADHLEGDHLKHSLNAVGEILDMGKLKSLANQRGGLNFEMGHICSFIVFHNFVVVIKDVLDVVGRLCAPIRDEMVANLKKETDIVKLFDGVFSLVEMMEIDMTNFKISQNRQLIGSYSAQIEFEEFEKLMQIDESWSYFAYLTTNNFSRKTFVRFCWPGPLTQEQPHANTVRP

SEQ ID NO: 148575 - protein, 250 aa, Heterodera glycines
MQKSQITFAPVSSYTLRKQKRPISRSTEEPPPVLTKGSETEFDNCEEPPPPLLEAETATDGDGSEHDFVQNGSIKSVRDLSVIMTSAAEIASLIDRHLPSWFRNCPGCHPDQNSELLFRGRIAGGPQSGPIVSIECAFCGSPIYNSDCHWERRPTRAESVEKKSTKGSQSACDLTDNELEPSTSAAEIGGKTADKTQAKLTTRKKKEIGFDQNYSHQFGLSFPVMFETEDGQRKSHCERITFRGFVYCHV

SEQ ID NO: 148576 - protein, 108 aa, Heterodera glycines
MAASDVFETMFRFDAQNAATKHNANGKGRKKIRFNWSFNRDARKKRQSKIVVEEGPSPILITDIDVDAFKTMLRFIYADDLSGLDGENVISVLYAGPKNTYILYMFLL

SEQ ID NO: 148577 - protein, 143 aa, Heterodera glycines
MPFSDFGGRAMQNDFLRLNGPSFLSDYADLWLLGLDMLPMAHQTEEQKEQLKMKLFSSRSSKCFIEAWNDQSHKFCVHTRRGDFVKRGWDSKKEPTEKGIDLGFEYLKVIQMANCLHTRDHFLPEWIPIKLINGTMALDYQAE

SEQ ID NO: 148578 - protein, 89 aa, Heterodera glycines
MKAAQAFEVPKLGLLNYALIWLGGCAEYALIWLEDFAELALIWLDDVQNLSDPADCAKIVVYQQFINKQIKINAQNGEVGGVQRRRRTK

SEQ ID NO: 148579 - protein, 94 aa, Heterodera glycines
MTAFHQTTNRQGNLTTSERNHRRMTAFHQTTNRQGNLTISAREQTTGNRKIVNVPPINVMDERNRRDKVKGIKKRNGPSSSAAKKRGRFMFGTR

SEQ ID NO: 148580 - protein, 28 aa, Heterodera glycines
MRLIARKKSPQGLPMHCFGGNKVLMITG

SEQ ID NO: 148581 - protein, 34 aa, Heterodera glycines; identical to SEQ ID NO: 145298

SEQ ID NO: 148582 - protein, 52 aa, Heterodera glycines
MTRRIRSFFTPSATVNRECSTRVEEAMAAPLEDFDSLIDDTESASDDSIKCI

SEQ ID NO: 148583 - protein, 190 aa, Heterodera glycines
MGLFFVWLSLFVLSPPFGGLCSANANVTSFPTIANGAVPTTLSPGRSPVVISPCAPIEIAFANVVKPGEASVCQCILNVPPPIGGKTVPTPHQKGNGDQFWIGCTRHKMTAVFRALQTLNGTRVPHLHIWDSLINILPNDPKPMFTQLLADRLTIERSRVGLIREGAFATIGRTLRGLSLRHNILKAFFN

SEQ ID NO: 148584 - protein, 73 aa, Heterodera glycines
MSKPIIKVRIVQIIEADEAAGQPKQVVAEYVDGTGRRVTMKASGEVRIGQLVGFFDGPDKRHIQTCFTNNNNN

SEQ ID NO: 148585 - protein, 181 aa, Heterodera glycines
MGSRPMLNRPETIGDRQIVKKKTVGNGQQNQLKGFGPELKDVALVAGDNLKRTASKTGTLVKRAFSNQQNGGKAELVKEASENVLNKSEEKSKSKTEGSKNSEKWETNSENGRTNGQMAINDTKKDNENDETENDQNGKQTEQSDQKKEKYEHKAAEDDGSMIEKNEKSKTIGEGSSIFSN

SEQ ID NO: 148586 - protein, 101 aa, Heterodera glycines
ATPEHGGPSYKKRFIGVEKKQGIIDRKPNEKKTPSVPGNIASASLEEPSEGKIYMVEKGSTVDTVLGVRRDRPAVVALVRYMDEQYELVPTPLLVKHNPAK

SEQ ID NO: 148587 - protein, 45 aa, Heterodera glycines
MLAPNASAETPAPKRQRRNAVDPPVPGFFAVPVEKLGPGPDFSGP

SEQ ID NO: 148588 - protein, 19 aa, Heterodera glycines
PVPGFFAVPVEKLGPGPDF

SEQ ID NO: 148589 - protein, 82 aa, Heterodera glycines
MPSIAMIYQFRWQMPINLANFCLILCQNVHGFVVPTPSEFLAPKIFLLTLQFLGQTKTFAQIWPSSSRFSYNLRLLQLIVDV

SEQ ID NO: 148590 - protein, 224 aa, Heterodera glycines
MKLHLLLVLIIFLIIEIDQIKTEKKKLQQKSFDEIFGEKWEEKEEERRNELKKREIIAKFYKIKEKIKQKGRKYSTKEWEKIELKIAKKLETNRKNIYKWIKEFGLQKQIHKSYKSKTDEEKLEIVKKFIGMKNEYKQKRKFSEKEWKENYDEICKKIGVSHYVIMKWKKHFGMSKFITEKEKMEKIIIYWEIKKENPKMSDKEIAKTLQINRKSISRWKKLFG

SEQ ID NO: 148591 - protein, 309 aa, Heterodera glycines
LEQREEEDERERGGRTRTKRCSCASQGTPGRKGMKGTPGAKASKGAPGIPARLPCEPLKGAPGIPARLPCEPLQDLKKYCPEKCPLGLQGPPGLRGHMGEKGRRGPIGPSGKNGDDGLRGHMGEKGRRGPIGPSGKNGDDGKTGPRGMPGPPGVPGLDGEDGESGTDDGEDGESGTDAQPMQFVPGPPGAGGESGFVPGPPGAGGESGDPGPPGPRGDPGPPGPRGLPGIDGPQGPQGRKGAQGNAGKMGAPGTSGPPGPIGEPGEDGHKGPPGPIGEPGEDGHKGVCPTYCAMDGGVFFVEPPEWFFK

SEQ ID NO: 148592 - protein, 177 aa, Heterodera glycines
MLKAEVKKKREEVERAKEERLKKLESEAEGLRAMVAEACFPHKPAEKSGEEEKSGEEEKEARAPASPPRTIRHVVIDEDCLSIDSEDGPEEERQRAAGGSVANFSIGNERAEEGSGRRPTPGRGVGDLGFLVFNRDDGTPVELDEEEENEWGGGVLDHPAAPPRRAPEDAKRKKWRR

SEQ ID NO: 148593 - protein, 106 aa, Heterodera glycines
MKPLGESYKKRQLACGNYCELDHVIWQIFDLNKAVLYITSKSEFKLAFRVRPGPGSRPGFFLDSGPGHFLTTWIFPGPDFPGFLSRKSRSRSRQNRKKPGFSWTKF

SEQ ID NO: 148594 - protein, 527 aa, Heterodera glycines
MSIVNLLFFAVLFKLPPFLHSLDKAYVTEPFSFLLTGGKIGKVSVPYFALDQCKPYKSITHDPKAESQNFGLYFLMKHRGGHCDEGILICYPGTLMRNHMTSEFKKMSDFRLKRTFQVGNKECAQKAEQFVGISNPKQWRGIKVYTKLTNSSNPLSARELILETSLTNRSYTFEPMTRQLSLNFGTRVSMFTWVTTHFGQPFHDEEFDLAEQYAQQMGYGPFLEQHVGLWLLGMDMLPWMAEEYVSLYVYRGCSCTMDAWVLYYYLKFYCNLLGYNLMKFTRPTDENDPIEPIVPSAGSSQCPTKQMDETFELGQLDAQHLQADLVFTVLTDEEWQNFTVELLQQEEEGKKLSVVMNFTIRTIDDMKVPFSGINTSVVNGTQMPNGIQQLRFDIFLLEHWHVIMVNGEQLGEVFWPKEWWQGAAWKNITAIRLNGQVLLLYGPELDEYGIENENFNVSVPLPFSQRIDGFRVNSTFFFRVQLLNETHNTVNITFTNGNSTDATDQTEMNIKIENFETIEITAYYVIF

SEQ ID NO: 148595 - protein, 93 aa, Heterodera glycines
MEFNVDAGGLGKEFFCEHIYVENASIVTRQGPVQENSLNILSRRALSLKILMAQDGFYGRSYGDYIKLCPYFWTYWQYWGMWPWTIDHVQVVN

SEQ ID NO: 148596 - protein, 30 aa, Heterodera glycines
MALVDFTKKFCDFFFLDVWHRRCLWGFDGR

SEQ ID NO: 148597 - protein, 43 aa, Heterodera glycines
YGTKRLPISDIFGVGIPTSEIFDEKSEIFLIFFFQKTSKFCTI

SEQ ID NO: 148598 - protein, 389 aa, Heterodera glycines
MGSSFMESVGNRRSSRLKMKKKNRKISCEILSSFFPHFSWICNDVLMDILPFFGLRQLGLKLALISDRFDVLVDAHFDGKSELTIWKAIRIHKDAFTEVPKLSVLIDNANRVEFPWPDRPLHNKIRFNFLLIDYIDHSVVEFLRSNQPIWDRGTNLYLHFCSSNTESNFRPIWDVFVRQIWPIFTTINVHHLGLHFADHLDTLLRLTSPTILSDMNINSIQSVRLFPEAIDDDDGPTNTNSHGQMLSKWLHTPRTDGRPKKLRCDKHFESPNLEWINSFKEKFLRATASISYELYFELKSSTPIEPFELENERTKENLSLEKIPPYPGSWLLKRCPINGETAPIKWENEIRLTNFNGVRFVLNINKQCIGPLAPPAEEEKADQSIENVV

SEQ ID NO: 148599 - protein, 25 aa, Heterodera glycines
MPSLIGTAGPSVPSFLKNCTAKNIF

SEQ ID NO: 148600 - protein, 43 aa, Heterodera glycines
YGTERLPISNIFGVGIPTSEIFDEMSEIFLIFFQKTSKFCTIS

SEQ ID NO: 148601 - protein, 84 aa, Heterodera glycines
MKNLIQKIKTCRERKGVWRPFGWRPFGWRPFGWRPFGWRPFGWRPFGWRPFGWRPFGWRPFGWRPFDWRPFGFDPVRKDHCFFY

SEQ ID NO: 148602 - protein, 362 aa, Heterodera glycines
YIFTTELKKLFYKYVPMKLLKTTIKQKHDEKKLVREKAEHIACKEKLSVVSLKLNTKYYAGNIKNILINYIVKMRLNTILLRKLPRRNSTSPDGIPYILLKECAFPLAPILTELFRIILDSFKIPEIWKTSTIIPVFKKGETDNPINYRHISLTCTLCRAMEKVIRLEILKFLNKNQFFSPFQFGFLRQRSTTTQLLSTNDFYKSIENKSCVDVIYIEISKAFVSVPIELLLQKLKNVGINGKIHKFIKNFLNDRSFRVKISEQYSNSKNIYSGMPQGSVLGTLLFLIFINDLPNNLPKNVGIKMFADEIKIYIEHNDKNRENLSSALEAINKWQKKWPKNINRKNNGPFGPGRSRKPIEKE

SEQ ID NO: 148603 - protein, 466 aa, Heterodera glycines
MLPTITSLVIMLVEILSFRNVEANDTVTIQAYCIVEEPYPPEPVFKHVKEYIENCEKLGYVQQPEVKAIKDGIYYAFTLERPQDFSAVDIPKENKCMDYEDEKDNKLENLLNNYQNAKKEMESEREYQQKLDDSESVQSQLTLALEAMLKKKRWCEIEKFKLDAYIKTMEEEKDLVEYRKYYDANGMDEQFEKLLKTYKETREKKEKCLKDYIQIIQEPEQADMMYFAKQALTNEEESCEIEKFKLDAYIKTMEEEKDLVEYRKYYDANGMDEQFEKLLKTYKEIREKKEKCLKDYIQMSSIPELADMMYFAKKALTNKEESCEIEKFKLDAYIKTMEEEKDLVEYMKYYDANGMDEQFEKLLKTYKETREKKEKCLKDYIQIIQEPEQADMMYFAKQALTNEEESCEIEKFKLDAYIKTMEEEKEKHKSDSPKRGKFFLNFFKLPKIAKEGKEKRRKFEKWRRKI

SEQ ID NO: 148604 - protein, 69 aa, Heterodera glycines
MNIYEYSNIYGFVESAFYDLAYTCRRLTSFNLAFSLALRCPLSQLFVNRCEFLFRLRKANYVPKTTADQ

SEQ ID NO: 148605 - protein, 297 aa, Heterodera glycines
MAPFSLSLFPSVCLFFSLLFPIEFAASSADQQKSNLDKFFTKFADELPPNERSADTLALFAEMDEADALLTDQMSKVIPPPPSPAHPTFQTLYLDKNKGPNSAEKNSAFQSDPKSAVVRRLKGSKLSKLRSLFPRTKFMKQTERIVKVYLKLKDNPGGGWGPLIQKMFGEMILAKKLGKGDGASLRANCQLALELIGEGDGATEAMVDQLAKAKPYSNFWTLTKRTTKAILCLLKGNGTESERQRSTEDILRMLKTFAEDGESLKMVQKGGKREADKAGVIRDSRYRKISNSRLPPP

SEQ ID NO: 148606 - protein, 62 aa, Heterodera glycines
MPTTILERPNTLPHDGGNTEPGSGSFSLIEHLKSSRMIPRLLDLDVKEKSYSPKTCAGAQLR

SEQ ID NO: 148607 - protein, 241 aa, Heterodera glycines
GTAKEAVTQNYEQRLWKGWDIGEEILNEAFSKLATNSENANSNESDALTLKFCRRINDSYCAESVNNKKFVIVVFNGNSKTYTGPIRVPINAPNARVIPTFVRPYQIPMRKFWPSKWELVFYAEIKGLGYEAFYVDTTLRQKRLYISLTFGGNGLLASFEDLIGQVKMDFSQKFAFYTGANGRRSAEGEEKQQQTSGAYNDLVHEARQIVQPWLSQIVRLYMDKPFVEFEYLIGPLHKDQE

SEQ ID NO: 148608 - protein, 268 aa, Heterodera glycines
EKFKKANKEVRHLQMELKMICNSGQLEFVGGGWTQPDEAATHGWTQPDEAATHYYELVDQYALGLGKLSEKYGVCGRPKVAWQIDPFGHSREHANLVSMMGYEALLFARMMGYEALLFARMHYLERKFRIENKSLEMMWSTDDTVGNNSLFTGALSGTYSAPKGFCFDVLCDDDPMIDDPKLEGFNVEQKVNAFLEAAVEEAKTKRHNHVMFTMGGDFSYGSANRWFTNLDILINAANERVTNSTGIRLFYSTPSCYAKSVRESIKIL

SEQ ID NO: 148609 - protein, 460 aa, Heterodera glycines
MQLVHIDGDADLTIHNISILPADQCTTEEQRTAKCCCGTGTAKCCCGTGFFYDFNQQKCLVSFFYDFNQQKCLVSANVAFMANVAFMFGRINDAWPHVAVYGFVYPMLVLLMFVYPMLVLLMIAPLSAVMLGMSRREKREGDRMLGMSRREKREGDRRFPNPLYQLISLLCFCAWVSLLPNPLYQLISLLCFCAWVSLLSPLPFTVWYYVLGDGLRQMNQSVYYVLGDGLRQMNQSVAMCHLYRTSMEVIPHTMDTLVTVIPHTMDTLVTLFSVLLKILRFLTQYHRSTLKLRTIERFSRAILFIERFSRAILFIIVISVLLGILRFFEHDAALYSFCMDTEPGPFWAQRCMLTDFCMDTEPGPFWAQRCMLTDGPLISLLGRPFWKVFLPLADLGPLISLLGRPFWKVFLPLADLFAQFLLPGSCLILLHIGFNREPVLEIGNENSHNRFGRSLRDQTK

SEQ ID NO: 148610 - protein, 193 aa, Heterodera glycines
NELLVIRERQTKDSQHENWLLRGRLPRGAYSGYKAQPISALFRYSFRLVCLVFLEALAKRVLEVRSGQMESLANLATKDRSETQAKIMDDISKIKIVRLTGPRGGPGNAGFDGQPGERGPNGPRGYQGGRLIPDDFAKWNEVQNVGHQARPAFMARGALTVHLVNPAKQNSSPTKCHHKTQKKRWKKAPMARM

SEQ ID NO: 148611 - protein, 202 aa, Heterodera glycines
MINSNKSKEKPTEEEKAWTNACQIIQNLDSKKIIEGQNEIAEIVKNIGEMCQRERIATDSDETKRQIQKFTTNGPFILSHMKATEKELQKLNEKNANEKFRHKFAHLASKLCSKVLPEGHYKNAVIEFLQIKKDQMLWPSDLAQFLLAKLDDCLATDTFRLRRMRRALELESSREAERSERSIWFHIYCVFIMVAIAIVFIY

SEQ ID NO: 148612 - protein, 47 aa, Heterodera glycines
MTPRNDTRTETHKTREISRLGNREPKNLNEIDSNAFLNQKHIKRGTY

SEQ ID NO: 148613 - protein, 68 aa, Heterodera glycines
MALKKWAANLRDKIRGSDPDLYAYGNIRQLACDLLNYPLSLTIQLIPRLSFAFVLCHLFLLLFYARKM

SEQ ID NO: 148614 - protein, 171 aa, Heterodera glycines
MTAQFSAIAERLGEIERKINNNGIGSAEEKERKRSLVLIGLPESEEEVSSLRAKDDAKTVEEVLDRLDVEVCPQMVYRMGRRIDEKRKGPRLVKVVLPASTFQRFALMQWGRRRTELKKRPGWERLLVRPSLTKEELEIEREQRQKKWMEFGKKKTGENITTRRGGNEKNF

SEQ ID NO: 148615 - protein, 75 aa, Heterodera glycines
RDSNVPLRPEIFSISGKKSKFFRKKYQSIELEKLCLWKWSPFLWEKSLKNPKIQKPENLFLGLARKIFKIFEILK

SEQ ID NO: 148616 - protein, 453 aa, Heterodera glycines
MTAKIPEIWKKSIICPVPKIQNPVNPVDFRPISLLCSVSKILEENIAGKIKNFVEKNNLLPNCQHGFRKAHSVTTQLLEVVDDFSFALENRKSIDVIYFDLAKAFNTVPHNRLISKLQNIGINNSLLKWIQNYLENRKFFVKIGSDFSDEYPCLSGVPQGSILGPLLFLIYIYDLPKFCETENVKIKLFADDLKAYHVLSNISFSPLQNFINKFNRYCKLNGLKIASNKCLTLHLGHKNQKINYFIDDFPIPKNPGNEPVRDLGIYFTNDLKWAQHIEIISKKALRSAFAILKSIKTGDTKILVNLFNIYCRPILEFGSPIFNPYLKKDIEKLENVQKTFLRVIFRRNNYAADLPNYAELLNIYDQKSLESRKINLQNNESFSFSKNIVKNEYTIRTAYCSTNARYNSFFIRTSRLYRLLPKETRLLNSNEFAKLLERSDLNLLISLPPQLQK

SEQ ID NO: 148617 - protein, 382 aa, Heterodera glycines
MYKKQAPFTGKFDKHFVAGGKYTCVCCGAALFVSEQKFNSGCGWPAFSKSIGDDQNIVRLPDNSYGRQRIEPGLGRGTVVQIQHYEAADCHRLFLSEHCQDISHGPFEVQLLTDAYVAANRLKLTNSAFDQKARQLQLNMERHMISTGAATVDDVDLAQIQTDDKLREAFGLWRDFRDSSVAYLEDFYARFGTKFDRWDAESYHVVEGARLTDEMIQSGLCRLTRDDCLPSSKQSLHFLFSQLFSSGWHQRFAAPCTSPQGLLESLYSNHFGAISESAMHTLMVPFQEKFSRLCSLEHAHHEHMERIRALNADGEWKLNMEMREPGQKLARRIQEFDTVVLTAMKKMDPNPVAIYLVGDDGLESNLCQCFSNKNTRRATLSA

SEQ ID NO: 148618 - protein, 19 aa, Heterodera glycines
MNGFFSVWRRRWVVKLPAR

SEQ ID NO: 148619 - protein, 121 aa, Heterodera glycines
  unsure (1)..(121): unsure at all Xaa locations
ICTGHXIDIHQRIHTGEKPYQCHLCDARFTQDGQLKTHILIHTGEKPYKCTYCPQKFTRAGNLTTHLRRHTEKKPFMCSHCGKQFAESSNLQIHLLTHYRKRKANGQLSNRMNELVPQKIV

SEQ ID NO: 148620 - protein, 146 aa, Heterodera glycines
MEDNNHHLLFAQKINECVTVEQEEVRKLGGEEENERIKEELEQEEKEVNEEEEEEWEENNGRGEEEEQEEENNGREEEEEEGERVKDEGIMAEGHDNYGMENGTESTLGTQFQAHTKFWHNENLEIKKTNFLRIRIFEDLFFRIFY

SEQ ID NO: 148621 - protein, 149 aa, Heterodera glycines
MFATVVTALEHQKLKSAHNALQQKVEQMEEKFSQKIQEKENEIAQVKRANERMQKKMDEALERIGRLNELMESQMIHFYEQQQQRLDNDGTFIAGIDEDNIMMKKNKPFEIFMRETFSEVIQNKSCIQKSRVPRDREFLPKPGPGLAGT

SEQ ID NO: 148622 - protein, 107 aa, Heterodera glycines
MKMTNLKRKCIKSVSRKCQHKQKCQMKNGQMCRLGTAAFVDYYQFLCASLARNGREMKTEKEKIEEIGRENRESKKAKEIKEKKKRKRSDTERKDREDVCGVQCEKR

SEQ ID NO: 148623 - protein, 48 aa, Heterodera glycines
MKLISLAPLVICSLFFVGTPVVLSDGKGAPPPPPPPPPPPSSYGGPPP

SEQ ID NO: 148624 - protein, 353 aa, Heterodera glycines
MNFHFHFLFSFFFAATVVIGNTIDCFKLNLRINFSKEADLYVLIVREIKGAEKIVNSNCTKCQIEIEEEIQILGNYWPEKIQFEAEIHTKTTNESEVIVRQFELFVYNPNLKKVLELNLGNLTTSGKVEKNVIFGEMVPENVLLFGAFFVDLGKTNLSPNRRAKEVVHLGTEQIEIKRGNSNDFQENAQIVQMHSNSNNNDNSSEKSFNLPPFLTANNNGNGQQQQQQSGILYWNYQQKLSKILDHEQNGTFKHRQAAGALNEIKQYIRELNNKIAEFFGGKGYLDKLTLKQQNDSNKIASVDTVRNLLKLIAKVEPGQNAKDLLQQVENVGQVLDAIAKQAFDTMEMMTENE

SEQ ID NO: 148625 - protein, 117 aa, Heterodera glycines
MDEFDNKNCQSKSIKRRKFSLLIGHKKLNIRIVNANSPPQQLPPADVPLPFQCHLCTAQFLKQCHWAWHCFIAHYGERADTAGETLLMTSTGEEHGEESAAIGTNDDGIPSLMVIKA

SEQ ID NO: 148626 - protein, 140 aa, Heterodera glycines
MSPLSNNHLFLPYQRNPMPEFLMKGLNISLSTDDPLQFHITKVIHLNEGFDYEALMEEYSIAHQLWKLSSCDMCEMARNSVIQSGFEVSLALFLGVDHFLPFVQFFCSFGRTGTNVPDIRVSFRHEALVSELYNLFKALM

SEQ ID NO: 148627 - protein, 216 aa, Heterodera glycines
QVPHRDFYNIRKVDTHIHASSMNHKHLLRFIKKKMRTDAHLLRFIKKKMRTDADEVVQEKNGQNGQKVTMAQLFEKLGIRAYDLSVDMLDVHADRHTFHRFDKFNTKYNPLFHRFDKFNTKYNPLGQNEGQNELREIFIKTDNYVKGKYFAEVMKEVLTDLEESKYQQMEPRLSIYGRAKDEWDKLARWAIGHDVSEQNFKKEMIQWHNVIPLIGK

SEQ ID NO: 148628 - protein, 192 aa, Heterodera glycines
MAKKSVIRKLQSKKGAQKRWTKWENKREERQEKLERARKAKSAKKTALQPNPNAETPQQDEAGPSTSAASAEEAMEPPPPTPGPGPTPEMDEEILEFDDPPPSTPATPIGDLVPFPSTPTAPMDTGETTPPPLAIDERSERIEQLEKQLKDRDDTIQFLREQVRNREALISDLRRQLEQCAAPPTATPTTSK

SEQ ID NO: 148629 - protein, 25 aa, Heterodera glycines
REKKIMFFSGTLYLLVHISFFETVC

SEQ ID NO: 148630 - protein, 323 aa, Heterodera glycines
MAHFARERIPERVVHAKGGGAHGYFEVTNKDIAKYSKTAMFSEVGKRTPLFIRFSSVGGEAGSADTARDPRGFAIKFYTEEGNWDLVGNNTPIFFIRDPFLFPNFIHTQKRNPVTHLKDPEMMWDFWTLRPEALHQVMFLFSDRGTPDGFRHMNGLSNVVIGMGLLKDYAIRDLYNAIASGDFPQWDFFIQVLPYIPFLLLHLSFEVMTFEEASRFRWNPFDLTKVWPHRDFPLLPVGRIVLNRNPQNYFAEVEQSAFAPARIVPGIEFSPDKMLQGRLFSYPDTQFHRLGPNFMKLPINCPYRTRVRNTQIDGWACFDDNRG

SEQ ID NO: 148631 - protein, 78 aa, Heterodera glycines
TIVQLFALVVQYSQSSNWEGRVTAAELLNALLEETDKNFEDELVKTKVKFNREKLAQCLRAIDALSMREVLDTYRTLV

SEQ ID NO: 148632 - protein, 506 aa, Heterodera glycines
RNVYLIENGCHLFFVFPKFLCWEICIVFCLFILLGLINSRFAIFSCVFYFASVSLYQGILMVAYSTAYTMLPVFSLVVDTDVTAKNALTYPELYKELGKGRSLSYKTFCIWVLISLYQGAIIMYGALYAFAIIMYGALYAFDDDLIHIVSISFTALIITELIMVAMTVHTWHWAMLVAQALSLTLYALSLTLYGASLIIFDKYFDRQFVLSWEFLAKTTVITLISCLPLYVIKFLRRRFSPPSYAKVKMGVAFVLCCFSVAFTPSLFIFRRFVAPDPLRIILFVLGAFFWLCSLLLSAVVFAVRPNLLLVAIFFSILFQEVARALFYLLLYKTQRCENHGADANRTGTVSSMRLLYSSRHILAIVCGLGMGTAAALFHLANVLAAYWDDGVVGLPGAVQANRTMAEPTDAFFPLFYALGCALLTLFNIVWTVCSWDAFHRCCYKIGRPSAWVTTAVSIVHHIFVCLCQSLYLGVSPLVVLSLQLFLLLLGVVYAYFLIKRTKSCSN

SEQ ID NO: 148633 - protein, 116 aa, Heterodera glycines
CVKSSSLCSMVIAVDHVSVFLPMTLRSRHCAAFLHHRRPQLQFGQQHRKTFPFNNKAVMDGLPNNKRNKHKPLYALASIPEEEETKKNGREKPALVKDDKYGDNYFEDCYYQSTWV

SEQ ID NO: 148634 - protein, 105 aa, Heterodera glycines
MSPCRRFKSRPQKKNSEYKWLHIVKRQKHRQQRHQQNHFNEMCVAFQRCAFLKEDIDKQMTNLIFTITKIEERSNGLPDPQAAHLYGIVKEQLERTVRQIEKDCL

SEQ ID NO: 148635 - protein, 637 aa, Heterodera glycines
MFAWKQMVEEYGDNLADLYKITERVNKKFGLCVIIEGETQLKCSAINVENAEVFVNHFYKIVFEPEFEKNLAKRSELIATNFFNLLRTEQRKSFQDLEGENEQKAKNNAKNWKLAEPSMRVRVQVLVNTAGTKCQQLIKSHYKFVSNKNKQKVKETKAKKLQQENKNQKDKKKKDIDSKNEQNLTEEEEERKDLMTENYTKRLDELNSDFATCIYHYMYAFSENLIKKIEDINGENSYNKELKDIYKNLRQKTRKRMESVYNSEGLENMDKWLNGENEPSASTAKKGEDEDENEEETWEDPFNDCANVVEDHVEADTLMNREGELMDKSFDDHLFQCASQFFEAVRRDQFDYKLFVNQHTMQLDTAMKFPSSMNGIQLNNGQNTKDKCLIMRELLLSLNQNLAHRLNYEKITLREEKENLVSLNEKYGKLRLDKMDNKWLLLEIGKKIGQGYEKWRLTNSLGTLTHPIRDQYRIGREFVGQMLEDYGISDTYKKGQEAVVLTINKLSESLGTPKNQKTKIDRKEDGPVKDLGNEKIGQVRKTLKECIEEDQDKDECDQKIMEMQIKIQKHPLTKRLEAYKMFFRAFYIALAMELFERMSNQAEENWHFVFRSNETDQVGILTEKDKANVAKIKEQRE

SEQ ID NO: 148636 - protein, 113 aa, Heterodera glycines
MLTNYMQLFLLTLLLFVFMNNFSEAINCRNFSVKSAQFAAENFHQIPIEGKGKDKIVQNFVESIKQKISESKKAATDQPKKLEDIIGDPDTIVNNARKMITLATRCSLSREEV

SEQ ID NO: 148637 - protein, 58 aa, Heterodera glycines
QKPFPGGVHVRLLPNSKNNGRPLIQSANISSTNGEQQKNLIAVVEQHLEQYTKDLVKE

SEQ ID NO: 148638 - protein, 194 aa, Heterodera glycines
MKETQMKKEIDELTPEKTYIFAIVLMVNMVQIIASSLIYLNGYDSQMNSLETIDNYFLIIGRIFKSSHWATNVQLEGTFCVFFSVILYALIAVAVQCRKVPSNSNSTQFNNRIFRSLFAIIFANFGGYLFACSVALIYKLLNINESNAIVLWHSSQIVGILCHISASSSGLILYLTRSKWVNGNSYNKIFTKKA

SEQ ID NO: 148639 - protein, 45 aa, Heterodera glycines
MALGGWKRERARLRSLQNLNRLFVRPALTKEQLKEEYEARTYFKV

SEQ ID NO: 148640 - protein, 272 aa, Heterodera glycines
MQIRDQGLQILREQVNKQSTGRSIPFVPPYVWRLAVLKHNDFIFEEMQRNTEEMDRKFEEMEKRLTTKFEQFREDTFELLDTIVERIEDGNKEIAHFCRHTAQTMDLLALNITTTMTAEGTFGGGQLTAAAPSAATSAARGGEFSAKVSLSTAIRQGRLDNPGVDSAIKSNCEKSDKALFYEHAESLQSLLHDFPRKLRNECTDRTSINIAISDFEARFMSSLDEMNSVMNGLRSSIDAEEVAKLKEIVQTLSKWALHIHEKAENVSKVSTI

SEQ ID NO: 148641 - protein, 23 aa, Heterodera glycines
DINIYLIYFTIFTIDQNIGGQKV

SEQ ID NO: 148642 - protein, 188 aa, Heterodera glycines
MRWPIVLSIFLMGIYRTESILHDHLKISKDLPVECPKELSVSIGHEVSLVLSSKKRFEYNLNLVLNTSWTVLKLTPERITLKKEKDSQVQVNVTGLSLSSRTYIELQNCSLVFDNGSFADICPFDPLDFFIPVTVVRSKTISVLVILSGWIYFVAVIGLNFDFLLLNVIGFSCYTVYNVLLYFDPNVQ

SEQ ID NO: 148643 - protein, 91 aa, Heterodera glycines
KLVDNLRHRSLSVDQHIGLELMSIAAGFCSRDRTTGVGGIPSRDPDRIPIPMNPEDFFRDPAGLSGFAKTQFFLNGFLIFSFVLSFVQVLI

SEQ ID NO: 148644 - protein, 75 aa, Heterodera glycines
MEIFRKIIVTSVPRDPAGLVKWSGGIPIRDPDEILIPINSDEFKKSLGMDPEFNPAGSRSRPVSILQTEQLWLPP

SEQ ID NO: 148645 - protein, 105 aa, Heterodera glycines
MAYEALTDKVSQAFCWGKWLGEKCVHYGKVLLGFLVEKLLTALAACPKLEKVAKTITDIFGIGEKANPIEVKKGMSVCEVVKQYTIMQVKQEIPNVVNTVSRTVP

SEQ ID NO: 148646 - protein, 82 aa, Heterodera glycines
MVAAQLELFRLNRIPPIMLHGALYQRMCRRIPEIRAMCEKAGDKCLYAFIQILEAWAFWNNKIAYEIDKKIAETQKEGKSVK

SEQ ID NO: 148647 - protein, 144 aa, Heterodera glycines
MAAPMRIVPVDNMNSGIIEKNSQYSNGLQQCVQSLQDVELTPPSLHISHKNNLGFFLSKKADITSITGTTGNTDEQDFSGNTFNIMNITLPRFKERKYTKDDDKLCESDEEWLKSIREKVEEASQPTEFIALKIWNSGGGKFSN

SEQ ID NO: 148648 - protein, 170 aa, Heterodera glycines
VNSVRPSSELSSTNGGGSAATNAGGAMNGNGFMAPSLPYAVSPLLPSSVVQQPSVAAADPLAQSPCCVRTSANVCCRTVSMGPMPGPAPPATAAFFLPTAHIPSPTGEKMSPPAPTAPLAAVAAAAVASTAAAGATTVAAPLMAPPTATSVQFAAQLPQPQQQQQQQQIR

SEQ ID NO: 148649 - protein, 72 aa, Heterodera glycines
MCRNPKINNDETYARILTAYGKLHTMQPAYAALLYIVEIQQCEGYGEELFPCKVCERFAKQKKKKMPTFKFE

SEQ ID NO: 148650 - protein, 80 aa, Heterodera glycines
MRWVEPDKPIRRQLERWACRRGQKWAVNLAILHACANVFTLHDTVSRSIYYTLLKLDVLQSNKFATLELDKCINLGNLNI

SEQ ID NO: 148651 - protein, 77 aa, Heterodera glycines
MRSIGNSALSAAVTQLALIGSSNVVARRHQTEVHNRESENRSGSRTRAPGAAVIGDGWSEAEKCRFFLCLSAGFTIQ

SEQ ID NO: 148652 - protein, 36 aa, Heterodera glycines
MTNILMDDEQNGAEKYQAKTRSKDQIFPGIKTKYII

SEQ ID NO: 148653 - protein, 232 aa, Heterodera glycines
MTEHNFEQNRRTNSSIVHEGNVQFDNENNGIEMDENEIRRLLLQVKVLQDGNAELARHGEQDIGRRENGRPISDEAQRPPITRRAQPYADSLHMPNEFRENDRSLHPGLVFDGMMAQAIRSLDGFSYTMTLNAIPNLDGNRGSDSVNAFFKQFDVATEEWPEDKRLRALRSKCFGKAERAFNSAVDANRHDYQLIKRAIIRQLDNTDAKQLTSFDQLMRGIRRRPNESIDEL

SEQ ID NO: 148654 - protein, 74 aa, Heterodera glycines
MDRKASTSKRKEQTKKARNEQEKEASDSEDTDYESDLNSNLTCVRDGKFEELLVRVRNALKKRKQPKIDSLRDV

SEQ ID NO: 148655 - protein, 33 aa, Heterodera glycines
LNFLIFLFLAASIFYSNLSVWSDVRQMEKIIKI

SEQ ID NO: 148656 - protein, 304 aa, Heterodera glycines
RAGPGPKHGQLSTTEYRGPGFDRDRDQSRFIDTDIKVRKLLPILLNENFLASVGWLQKFLKRHNFVLRMKTSVCQKPPSNYAEAVAKFINFVEQRRKAKNNFPGGIFAMDETAVWFDCPDNRCIDMKGAKDVISFKLFRAISSNYVTVVATGHEKMRVTVCLTARSHKLKPYVLINRKRPVPQIINQFAGKLVINFDGSVWMNDDTTEDYLHKSGQSFVGERLLVWDAFGSHKSERTTKVVKGLGVETVFVPGGCIKFIQVKASFSMKFTFFPRLPMSFMVLDWIHRSWQEIAKEVIIKSFEGQ

SEQ ID NO: 148657 - protein, 80 aa, Heterodera glycines
MEQALTKHIRSLADFSAQQRTDAGVPFYLENPAFAGSPLQKGRNIRTKSLEEEYQIMKFKADSIQKATKEMTNFFAKPVI

SEQ ID NO: 148658 - protein, 408 aa, Heterodera glycines
MRRVTTEYNILSGASFDTLAHLGKISEKAKNFLKLTGPAGSILAAFAETVFPPEHPVLKSLAFLHQHIDRKFEAQGRFIEGALSSLRSAQDLNHYDTFINTKVNINCKKQKTREMLPIISEVKSVFDEVFVIINDQKYATSYENFFTTYIVVLESFESLSLGQANETLADLRELFTKKDGPDFDLDELIRSIFAVVPGPFSDVCLLRSVYESYAAKRNELLRLSESVTIDVIETALIGGFCANLSFSGAAEQVKEQLDELGSYVRDITGNMSQWIGKELSDAWPEEVIRNIKREITKDITDPYAYNTTANRINNEVLSRGPLGQNDKLFDLGTMIATIEQQTGDLTEHSRFRSFVILHISTWTSKACVIPIGLSTNQFLNYSGFGYVEMYAHHLFTTNDELYKLFLFL

SEQ ID NO: 148659 - protein, 108 aa, Heterodera glycines
MWRKELDAEAEEGAKWEEEKEEEKPWDVIDLPIFGKLEIWINDRASNKMLQKCLISAIDNLIKTLEIPFVAIKQFAFRVRVYGDAYFDNTYTASLKMCSIKTFNELNL

SEQ ID NO: 148660 - protein, 115 aa, Heterodera glycines
MDEESSTPPLETDNGQCEMCANYEIFMDSVNRSEERVALLAKKQETDLADMGHELDVAKEQQTALQTELKTLYEKYQRMLHKNAQKADEMREQCIDLPQTVDELTLLALQLREDL

SEQ ID NO: 148661 - protein, 106 aa, Heterodera glycines
GSASSATQSQAAPPKKLTAEELEERRRAMLTNASWRDDMRERNLRDAADKLRKEQDEMANNRGGAGFMRPMMNTATEDASIEKRLQSNRMNIQRQHDHMDKSFVRK

SEQ ID NO: 148662 - protein, 264 aa, Heterodera glycines
IFMDNVNRSEERVALLAKKQETDLADMGHELDVAMEQQTALQTELKTLYEKYQRMLHKNAQKADEMREQCIDLPQTVDELTLLALQLREDLISEKASREHECQELRDELTVAREQMLESEQQLLIYAQHAQQQQDHMEQLLHQHRISVGEEGGGAAGGETGGNSGGSRRQRAGGQPDMHPSNAVVRSPREQRRQQQQQTPTVVEVGDADCCCPDAKCHEQTVELERRLHRSMNERAQLQELLIEQRNKCSQMQSELDTSEAVQK

SEQ ID NO: 148663 - protein, 82 aa, Heterodera glycines
MTNHHPSDPSKILPGENPANASNLLRKINTIQQKCSKFFISIGLLGPSGELAKPEQTQLDKLARRGELERDIEQLNEQLAKL

SEQ ID NO: 148664 - protein, 265 aa, Heterodera glycines
MANFFIIPRRKTIQLLLFIILFKITLQQDSLIETKQLVDQAKSLFNQVNEGKFDADSSIEWIQKNAIGILSNSEFESKMDESLKKLQNEFCDSLENGNYQKMMKIFQTTKIEKKTFDKRQMDKAIAKDQINKGKNKQMFKQLFNNSSKILEIHEDLIEAERLAVRQQQMPNGFMGRRKKRARDSAIKGCVTAVLLTLISAPYLGYYSNKYANEGNVMVQVNRCKKRFNVRHCYQVQQSVVTQIFEWTILLAIGLICALIFCSCVR

SEQ ID NO: 148665 - protein, 158 aa, Heterodera glycines
MAGEGRMRKKIDYDVKKDGKEFDQCQNALKIPKKYIYLFLYRNFVKRLYLSFLKDNNNVMMVYPSKESQTSVSNLNRTKVNRASEGSRMIPKLLDLTDKEKSYGCRGPTEVYRSKTLFEGIDSFPYHRFLTTVSLPPFPYQTFPYQPFPYHHFLYTFP

SEQ ID NO: 148666 - protein, 45 aa, Heterodera glycines
LILLFILLILLNPFRPTHPISSMATTVASIVLQLLILGTVVHLSY

SEQ ID NO: 148667 - protein, 130 aa, Heterodera glycines
MSWHSFVQLVIIMAFTLDGGVDNESVIRFRFRHRQSPRIPADILDPSWRGAFYWRGAFYQRGALYCWISEIGHLIGGGILPERGIQIADLRPRTINYSTFSKIMTRKAETGLGFFVAPGVPGPVPTLTLE

SEQ ID NO: 148668 - protein, 248 aa, Heterodera glycines
MGWKLVSLFLCIAIIGIVTGYYPPPTTTACPPVTCPCGCKECYTTTPYEVPGTGSTSTPGPESSTSTPSEEPETPSSETPGPPGPSTETPGPPGPSTETPGPESSTSTPSEGPGTPSTETPGPPGPSTETPGPPEPSTETPGPPGPSTETPGPPGPSTETPGPPGPSTETPGPPGPSTETPGPPGPSTETPGPPGPSTETPGPPGPSTETPGPPGPSTETPGPPGPSTETPGPPGPSTETPGPPGPST

SEQ ID NO: 148669 - protein, 200 aa, Heterodera glycines
VLGPGGPGVSVLGPGGPGVSVLGPGGPGVSVLGPGGPGVSVLGPGGPGVSVLGPGGPGVSVLGPGGPGVSVLGPGGPGVSVLGPGGPGVSVLGPGGPGVSVLGPGGPGVSVLGSGGPGVSVLGPGGPGVSVLGVPGPSDGVDVLDSGPGVSVLGPGGPGVSVLGPGGPGVSLLGVSGSSDGVDVLDSGPGESGGSGSNSK

SEQ ID NO: 148670 - protein, 95 aa, Heterodera glycines
DAQRLWRAGEARLGTDEIAFNSILAVQNFAQLRMVFDEYQRQHGHSIEQAISNEFSGDIRDANLALVKSIRNRASYFAELLHNSMKALINFQLLL

SEQ ID NO: 148671 - protein, 251 aa, Heterodera glycines
KAMMALAFWSCIICWTLANLGIVLATWPNQSLSRAPTDIGMQAAMRSLRRMERNTAADQWHRRNGTGRCIISADQAVHFCGFEEEVNEPPIPPPFDGICMQSARSGRVICYPKYEDLDTTCTDAASINERSGLVAPPVIAHANVRTMAFVPPDNLVRTMAFVPPDNLQRLIRHYYRRYGKKDPKNETDKTRPFLFVKYGCDAGYEMVDEADTMFCRKGQWVQTAPICRGQGLCEMDNGGCSHSCISFSHNA

SEQ ID NO: 148672 - protein, 206 aa, Heterodera glycines
LESYSPENNFESNSLMKKRPFLVKGLDAGNERDEADTRRKGQGEQTAPSSRGQGGEKDNGGGTHIYYGCFKVECRCPKGMVLEPDRKTCLPVPKNLCRKLAGCTCASIDDHQYSCACPSPTDRCLLMRGQPKIYLSPPPDYQVEPGGNLNISCAAVAFPFPQIFWEKGADAPQSGAGAGLVKSEQVLIIKEVSNISEMSCRFKAIH

SEQ ID NO: 148673 - protein, 182 aa, Heterodera glycines
WPHENVSEPHRLHTLRGLSPDTTYTVRIRAHDSMGPGKLSNPVSVHTLPPAKRPLLAIPEGNELRVPPKVPFAINCNLSRGDPIPQMHWESNGRPIRPAQDSKHIALQHIGLLMTTEFQCVAENEAGRTVQKVLVTVTGPVTGPSQPEQIRYHVDGITVILQWDEPKITNGPMADYEVFYTD

SEQ ID NO: 148674 - protein, 218 aa, Heterodera glycines
MNTNLELSIWSNKTEDDQRIWDVLACQIWPIFAKSIRHFGFHDGDYLDKLRRRISPTLLTDLDQLISIDSGLLLPDGIADDRPNATAGQALSKWLHTPSKNGQPKQLHRNNYFGPPKLEWVNNFKETFRHATTSVTYKICFGVFLSLIEPFELVNERTKEKLTLTKGGDGTGEFNWLLERCPIIGETAAAVQKQQQKKDGNSDANLNKVFFRLYDDIG

SEQ ID NO: 148675 - protein, 214 aa, Heterodera glycines
YTPSEKTRCVPINRECQRKTLSFFLFFVSFWRTIYFYYEQHSLRSIELFFRLTEFFPRLKTIPSGFHTDWQCDLCIFDQLKKHNDGYKYLLVCIDVLSRMIFSAPAKSKKSEDMIEAFDRVFEKSKIIPMKIYSDSGLEFQAGKIKNILRKNFIKNVMYSPDLHAGVVERANRTIKERLYRYFTKKDTLRVDVIDITTNINNSVRTLVKPSSIT

SEQ ID NO: 148676 - protein, 125 aa, Heterodera glycines
MTDTALVTSVEDGLAGIVRQFASVILSSKVRAVLVVLGRDALLSGETMDTITEYVKRIKGLCLRYQDIQIVWAIPPYVHTQKVAYDQFLEALLTLTENCPIQMAFVTRKGRSLAEIFRYGGTHNG

SEQ ID NO: 148677 - protein, 72 aa, Heterodera glycines; identical to SEQ ID NO: 139926

SEQ ID NO: 148678 - protein, 313 aa, Heterodera glycines
MEYDESIVDDGAVSLVGEADENELLGVSDAHHEQNERDLAGFYHFPRNTNMQQSLVRQKRTVGDENSGRHVNRMPILENLEAFGGHDFEYSFQRHHREQQSRQRPNFEGDSRAYPPPPPWYGSYPWMPPPWFNAEKAPPNQCQNQREATEMQQSASHSTYNRLEAILILDKLPDINGREGSDRIRAFFRKFEIGTEGWTNAEKLKALQLKVTGKAERSLNAAVDFERTASKIGMREVKFDLIKKEMLQTLDELDARETSAFDELFTGLQRRSNESIDQLADRVGRTVQRAYPNLNSRDIDELSIKHFTGLRQP

SEQ ID NO: 148679 - protein, 177 aa, Heterodera glycines
HREQQSRQRPNFEGDSRAYPPPPPWYGSYPWMPPPWFNAEKAPPNQCQNQREATEMQQSASHSTYNRLEAILILDKLPDINGREGSDRIRAFFRKFEIGTEGWTNAEKLKALQLKVTGKAERSLNAAVDFERTASKIGMREVKFDLIKKEMLQTLDELDARETSAFDELFTGLQRRS

SEQ ID NO: 148680 - protein, 484 aa, Heterodera glycines
FRCPFLAFVFLFLADGLSFLFFLIGTNQFERHTFEFMAQEFARRAHKVMTVKPILVPEEPRLVKPILHMVNEKVLKDVLPRRLSEPLAHVGQNVPWGEETDAENALRVPYWAAHNHSCGKMLNSMLNSNLMEVMARGDFDLAILYAGNPCLMGLVHSVGIPFVLFDLEGITMGLVHSVGIPFVLFDLEGITEETLVASGVRLQHFRNISHGKFVKAPEFARVGLGRHSLSLLSESFAQSAVPWLAQLLSKRFRHLDAPIDALFASDFEINRKFRGKFPKVAELRRMARLFLVNSDPFLEAPSSAFPELRRMARLFLVNSDPFLEAPSSAFPNNLLPVGGVHIDSIRPLFSPWNFPWNFSMEANGKGVILCSFGTQMDTGTMPTEFIRSLLDTFALLSDYRIFIRSLLDTFALLSDYRIFWRISPKLSLPGLSPSQIDGLSERMPHLNITSFFPQNELLAHHRTRLLITNGGAHHRTRLLITNGG

SEQ ID NO: 148681 - protein, 151 aa, Heterodera glycines
MTNPRGDQSLFGDSLEVEQHKRNAHGVHQAHLNTSSNIAIYSLYMASNQTRVSRVENGQVEVTPGHHFHEIAVQHLHNGKGGNQMANVRCFSPFIKLVGDLTIEFLNPPGICPVFHFFPFLCFFVPIAVPPAPKWASPSSLCEPFAQIPVP

SEQ ID NO: 148682 - protein, 168 aa, Heterodera glycines
MADLRMEAGNDVIVPVNVAIRIFGFVSRDDLENCKLTCKSWKDVEIDEIEVKKVRHLTSQFDEKKYVFPCGEHLPIRQSHSFVFPAVDIFHQHRCKMVRPTVYQDHVNYTRKLFTPPLSFYERLQQMLKKCKIRLVIFHAFTFTDFFVEKMREFASDAFTRVVFLSLH

SEQ ID NO: 148683 - protein, 159 aa, Heterodera glycines
RALEGKIAVVTGASRGIGRGIALQLGQAGATVYVTGRAPAALFYVKLEIKSRGGEAHPVYCDHANSDDVRRLFKRVEEEQNGRLHILVNNAYSGVPSLIENSLIENAGKKFWECEPEFWDDINEVGLRNVYFCSTLAARLMVPHGSEIIIALTVNCFRG

SEQ ID NO: 148684 - protein, 107 aa, Heterodera glycines
MCRNFQAVEAHPKIEDGQGTVGPEIRAGGGVSDQRFDAKIDTVGRRTGRIGQSVEHGPKLGGGKSVAENPQIGSRNPEQPQSNEGIYLARTLRLGLALTSFFTQIFP

SEQ ID NO: 148685 - protein, 47 aa, Heterodera glycines
MAGTEEPQYTREGRGIRKMQISGPPQPNTHLVFGAVAPRKGGLGEFA

SEQ ID NO: 148686 - protein, 353 aa, Heterodera glycines
MALVDKHFNGKSELTIWRPIEIRKDKGPEPKLYVQMDRKFDKFVPFPLPDRPLPSKIRFDSIQIEYIDHSVIAFLRSNHQIFDKRGIDLHLWLPSHTTNGQLIWDIFGREIWPIFAPNIGHLTISNAEHLDNLRRRISPTILTDLNQLNSIYSGALLPAAFGDDFDGPNSTISAGQALSKWLHNPRKDGQPKRLRCDNYYEQTDLDWINNFKEHFLRANAISSVSYEIHFYVHVPSIQMVPFELVNEWTKEKLTLAKANENELDNRWIMKRCKIGETAAVNWEDGNWDNNCNNVFFWLFGTTNCIGFALNLGLCLRHRQKKRDKASQIGRLLLAISDGQKNKKHNDEQGFRGR

SEQ ID NO: 148687 - protein, 256 aa, Heterodera glycines
MGKKRRTTPNLNESDDILDRLDRLEQQINSIQSPPLNSVLERLENLEKLVQNLVNKTKNQCQCHAGDDQINNSATQWGQPPHFVRQSSHLQPGSISQMVNNAILDADQIKAKSMRAVLEKVPEGINVNELVQKVTDECGITEHLNAGDVHRHPWTVVGSDQSNKKPRIVKIPFTERKYRDIFIKNFRKTLKKHQNFPQNITVRRDLTRSELQVLYQLRTQAYERNKSEGLFKYIVVDLSIITLKNPHPLKTRENNA

SEQ ID NO: 148688 - protein, 160 aa, Heterodera glycines
MEVNPADLNFPKAVIARIIKEALPDGVTVSKEAKNAIARSAAIFILHATSLANDNAQSKKRKNLIADDVLYAINQLECDELENPVKEALTLYTQKKNQRQQHRRERRAKQREEKRFETKGKGETEEKGQQEDGQSDCEQGMENGDDDGEEEEEMEDEVGQ

SEQ ID NO: 148689 - protein, 15 aa, Heterodera glycines
GDFGGKKFNQGKIFK

SEQ ID NO: 148690 - protein, 76 aa, Heterodera glycines
QVKEALTLYTQKKNQRQQHRRERRAKQREEKRFETKGKGETEEKGQQEDGQSDCEQGMENGDDDGEEEEEMEDEVE

SEQ ID NO: 148691 - protein, 154 aa, Heterodera glycines
MKYTDSKIHDGKTNTQSDTETKNLLDDMGEEMDDDLSILHEMNCRSKQNGSSELDSKLFELSDEQLNYYTNCFLFLMQKSQGFFSLQGALQGNDRTILDFFRKSSLDDSILSKIWSLSDVNEDGFLNLAEFILAMHLVVLHTKGSVPIPSRLPS

SEQ ID NO: 148692 - protein, 399 aa, Heterodera glycines
MTMAFLPNIWDNDQNKPLIKWLWMDGNMADELFYNDPLLSAQYSELLSTLVRKNAVSSWLNLKLKLDLFVFVRWMDAKILQQKEQKNALRCANFWARNKFLLAILYDRLFDEHSDEMPTFEICQTNLLNEFYLFLDSLLSAKNAKSEKAMENGLRKIIEKTEQIYELLKVTAELKIVKYSQMGQYKHFEGLMMEKHVETINELMAKDGQFKEQLQFVFDCSQLNKLQQFNDGSVGAEKCLNILNSIKIDHSALIGQLKKIGEKIEKGNEIKFKSKKSKMKKQKNIKEKNREGEKEKEKEGEKEALGTVETITDNWPTAEKDTVETVMDKGPTAEEKHKQSSSPAAVMEEKSIRDTVQASPMVAKSAADQDTVQSLLAAKFVGATVPDVPSMRAKSKGDT

SEQ ID NO: 148693 - protein, 361 aa, Heterodera glycines
MTNESAFVRVRRFLLRRSDAPLADNDNFLQFGTALLIDYMIKFGNHLRNDWPKMPPGIATLATKIADVRRDAFRHFGSARHFCVMLKLILFGTRIKQTLVAKKEKTLLKLRTDECDERKAREKLIEGSSGTELGELIEFAIAGMVKASPARFRSLIKCSGTKRRFARLIGTPERFKAFAKRFNLTALFAENAFTSDDSLWDHYFCALQKPDTLAAKAHKISADLAVFVRWVQRQLSAAGRDRRLLPKFFEFVDEFYEEIFDLDQMQLTVREHFLRRKLIVETKKYAEENLGEKGSEKSGEKRGTKVIRNGKKQFDGGEMKPTEEEIGQIGPWIWQLHNAELRSILESDQNKNAAFMGWKIS

SEQ ID NO: 148694 - protein, 48 aa, Heterodera glycines
MLRAASGPTITSRRQSNCASRTQSDSRPATVSAWKFSGTAKALRSEEK

SEQ ID NO: 148695 - protein, 124 aa, Heterodera glycines
GLAMPRYCLFGDTVNTASRMESSSSPNKIHMSSETLENKIHMSSETLELLHKNFNGSYHTESRGEVIIKGKGVMETFWGKGVMETFWLLGQVENGTTINADYAHRMHLPVIKFGEEGNETGKNA

SEQ ID NO: 148696 - protein, 18 aa, Heterodera glycines
MLVISGWQTLVQGRQDGE

SEQ ID NO: 148697 - protein, 34 aa, Heterodera glycines; identical to SEQ ID NO: 124987

SEQ ID NO: 148698 - protein, 39 aa, Heterodera glycines
KWENLNLIGNVPPLRRSIQKIFVCLHSILIHFSHKNVLI

SEQ ID NO: 148699 - protein, 371 aa, Heterodera glycines
KGGQQQPAATVAGAVAASRAISHSATNDGGDTHQQNANTANANDDAGNNGNANDDDADNGNNPRAISQAGSGSLSIHLEPVMVRANLPEDPQPRPRPCRWPTKAKLAGTSGFFVQLDELYKTVSMASEWSRDSIDMCLCALFINGISNDAIRVELIKKGDKDLKFKDAVESAVLLEQSNLDAQAIGSNAMPEVAKVGNQQRGPRTPTKSTRSCFRCGKPGHFANVCPNQNSTCRKCGKIGHWAVGCKSKNRDGNANFGQQFGQKPRTNGRQIKNIECSNVSVIHEIKGISADPGFIQLNIHNGKLEFELDSGADVTVIDEIDWKRIGKPKLEPSQGLVAYGGKSIAGILGKAKVKLTHEGRTIESNIHVIS

SEQ ID NO: 148700 - protein, 52 aa, Heterodera glycines
MHAENIVWLEKYPRYFRINWNGMEDRRIDRYEAFVKQLSGVDDWARIGSLPV

SEQ ID NO: 148701 - protein, 204 aa, Heterodera glycines
MEVVLSRVDYAHVGTTSKGWRKGMKANNGQSEKVVIGGQNGVLLCMERRNNDTNVLFKTPPGSPISRIVLFKTPPGSPISRIYLGGALGSVQDKAFVACGTEVRGYSRKGKQFLTFESNVRGYSRKGKQFLTFESNLTEDIRSLFVYGVDMFIGGTNSLYHFHDCVEKSHFSSADPHFSSADPITDCVCLPVTEGGWVGRGLTR

SEQ ID NO: 148702 - protein, 329 aa, Heterodera glycines
METLSISLQQGQEVQQNETNSVSTSSTDSNDIDIQALVRPSARRQGDVISPHRAVLTLSKSMFNAGCFSLPYAWMLGGKWVSLALTFVIAGFNWYGNHILVRSSQHLAKKSGVASLDYGHFAKRVCDYSELPFLRRHSKRIMYVVNITILFYQLGPFPCPSFSFTFFRNVIFIGMSMYAFEGQTMILPIENKLATPEDFLDNFGVLPTTILYSAVNGFLCIQSMLGHSIAMYVVFDMFYKGFRRKFTARFPNVPSLVVDKGFRVGWVFLTYLMAILIPRLAVMIPLLNMSPVRRAFLIGRNCFVIVLGFFAIGAGVAANVLQILNPPPS

SEQ ID NO: 148703 - protein, 66 aa, Heterodera glycines
MPKKKPARLLNFEEEEDEEMEPELDHELFGKLTEELDEAIEKSMERTYSDTLNTFNEILRNPSKYN

SEQ ID NO: 148704 - protein, 19 aa, Heterodera glycines
SGLGEARLCTRSRSRKRSP

SEQ ID NO: 148705 - protein, 305 aa, Heterodera glycines
VSAGLAMGQTLHQIQRLYLRFKDMVFDNRRPHNTQVLEKFIRQEMGAETMFSDLKWPRLMFTTTRAEFFPVQLELMRNYKLPTNDEENEELGYRTPDDLLLWKVLRRSSAAPTYFASVDNKPTYFASVDNKYIDGGIIANNPSLELLQEIQFWNSFNKYKNFPNAVNVGCFLSNFPNAVNVGCFLSIGTGVIPPTPLKVSLKMENIFSLKVDIFPPFSPQKVAATEGVPVLRAGAFCIQQRAPFFRLSAPLFRNISMDEKNDADIARMMWDCMVYIYKHQDYVERLCTLLRRVGHAEHRRRLFQT

SEQ ID NO: 148706 - protein, 214 aa, Heterodera glycines
MSKFFRVDLLKSLIICDARRCPLTKVGCVSGCVNEKQLHELKRTSTSSMPSSATGNTTSTSSTASSSSSSSSTTSAAASATAAAAATAPPAQPATSSQPAAGASTTAPKPASYTSVTVEDFENRAFDKEHFRFNKLLDIQHNVKTIFGKFLPFKWPEINGEFSILRQYVVKDIYDEVLEKLPEVSSDEDSPPDHNFINVLSLDGGGIRGLVIIQ

SEQ ID NO: 148707 - protein, 46 aa, Heterodera glycines
NFFIWTSLFVTRNHYFGDFVTKIVKNHYFGVLSLFFHYFDIFWKIP

SEQ ID NO: 148708 - protein, 165 aa, Heterodera glycines
MSTSIVLGAVQSNSFNSNAHQKLLQRLRHAIEDTNAEADRLENDYFLLQEQIAAMRHQLVVHLRRQLEQQKKIKKHIKKEQQGGGKRVGESERGGEDGQEQREADEEKDGGGGEKEERQRGGAEKEGDLSHLLDSCFLMCFLMSEMCKYCLKKSKNNTKFEKKDG

SEQ ID NO: 148709 - protein, 55 aa, Heterodera glycines
MLSSSSCCTLLVALISAAFVSVANAQKVKQCLCSKIQPCTQKYMNTWKTCMRQCK

SEQ ID NO: 148710 - protein, 35 aa, Heterodera glycines
FFDSVRRFDKDGFRFAISRSTFGNWSRIFSAITCN

SEQ ID NO: 148711 - protein, 79 aa, Heterodera glycines
PSYRTKAQIDHSGTKKVVNSRHSPAPAPHSQRKEKQGKKEKAKSSSSSSSAEEEGKKHRKKGNGRQIVKHFGKGKKKDD

SEQ ID NO: 148712 - protein, 488 aa, Heterodera glycines
IVLFLFISSLIALSFYNFYYKRRNFPPGPTPLPIFGNLIAIHLSGAGELAFKKWAKEFGPIYTYWIGELPVICVAAYEQMVQIFQKDAENYALPVICVAAYEQMVQIFQKDAENYANRYIFQKLNISDGQPAFGILISNKLNISDGQPAFGILISNGQRWRQHRRFALHVLRDFGLGKNLMQQRVSKKIAKIDLNIDQSENNEINLAEFVEHSIASIVNQFLFGVKLKNAAKNAADFYEIKQMMDEHSGEVGGHSLFWIYILKTLDLILISINFGILRVTIKTLDLILISINFGILRVTIGVHRYFEKRIFERQMKMENPINSSSDYVEAYLKEKARRDAAGEKGHQSSTYQLGMMCFDLWITGQETVVSVLSWGIALLLNNGEPLVKMCEEIDQLISSRMITVADKANLPRMITVADKANLPYTCAVTNEILEILRCANIAPQNFIRTVASDVRLANGFVLLKGTSIPQISVVPVKKRVKSSNKYLP

SEQ ID NO: 148713 - protein, 256 aa, Heterodera glycines
MIVTTDLHHSCTKSHTGTSASAPLAAGIAALTLEANPNLGWRDLQHIVVRTAKPVNLRAGDWRLNGIGRNVSHSFGYGLLDAGAMVRLAKVWHNVPKQRKCRATYPNPYKKDSSPKRKKEASSGDKSELSEHQCPHFHGVNFAKNNLTTKITNMASVEMVALQYRAERTLLGLSSDEMKQYLIRVSKFFENEFRSDLIHVMSISQSYVEAEFVRASLSMLPYLGFGFAVMAFCTAISIPLSAAYFQQATVHKAFTH

SEQ ID NO: 148714 - protein, 80 aa, Heterodera glycines
MFKLLTAFTFVLVLSIAWCSQWKRPYQSELDILKKTFTWTCIPCGPGLPGQKARKNPGSSRPGSRPGPGFFDCFKKQTNV

SEQ ID NO: 148715 - protein, 74 aa, Heterodera glycines
MQAILTEKNRTKLQHNGHSYIFHKPSADGEVRFGRVNTITQNFCPYNHFWATLSRCISAFVWHRDQSLSEKRYS

SEQ ID NO: 148716 - protein, 49 aa, Heterodera glycines
MNKQIAITTKESLREFKHLLTQLYGEQIFECRGTLSLMLDLVEILELKL

SEQ ID NO: 148717 - protein, 159 aa, Heterodera glycines
DEVDTDPSPEEVEKWTPKQVIKWDQRCYEKMPAEEELWQEFLDKGEANPQPGTSAPAPSTGLSTSTVSNRSPQSVRPEATSRDQALAHQPQARGWALAPYPTFVLMRQAGGHKPRPGTSTPTPSTGLGTSAVSNRSPQSVRPEATSRDQALAHQPQARG

SEQ ID NO: 148718 - protein, 247 aa, Heterodera glycines
MLCKCGECFECEDEKRRLKRNRELNTRKEQIKNCTGNHLAPAMMDLKRRNMELFKKAYRPVKGVINKITGGPWNVECEVCHETFTYFMVEWENSRTDFSWGPGRTMVEADNINQKEILAHYVGQNDLLQNEVDYYQNLGNNPPLNVSPMGEDAIILTRDDGMPIGAEANDGARSVAGESIVSKRGGGQRKRERERKKRAEEAKKAQRDGAEEEEDDDFFFFARNGGEKRGEMDMESMVVKMKYKFKN

SEQ ID NO: 148719 - protein, 182 aa, Heterodera glycines
MPKKSETRKAKLATALVNPNKTNGTFILKIEKLSEFAQEKNGTKRSSEIMFIRGIPWQIMAIKEEDALYFYVQCSDDKTDSKWKCPYSVTYQIDAQNKGNEHFVFGTGGHIGTNFECRSCRNRRGFQVINKCQIWSINVISGIVTGIIKKSYLVSDERVQRLVQQSGGHVDFACRCAYWRTI

SEQ ID NO: 148720 - protein, 59 aa, Heterodera glycines
GMCLGFAFRISPFALFAFFGVSHFAFRFLARNATFTPLRIGLNSHKIFQNFTYKLANFQ

SEQ ID NO: 148721 - protein, 85 aa, Heterodera glycines
MNFMIPTFLKKNATRVTKGIVSSTVLAPLPEGTTTTTTTTTVSTTTTSTASKTISTPSANLVTDISDEMSETTVDAILALFFIPI

SEQ ID NO: 148722 - protein, 162 aa, Heterodera glycines
MNSQQRQAERAQLRARLNLLVDEVDFVVQGLISNYQADGLINEAPHEGQLMGMDHGQGLQHEQQQQQPWELDPPMPAQQLEIGPQLPDAWELVPYQPTPQWAQVAHVEQHPQQQQHYHHQQQQQQQQQGAWDEEWEGQLSPNALAQIQDEVKGLRQDLSKDF

SEQ ID NO: 148723 - protein, 122 aa, Heterodera glycines
MEIKFEKKKSFDNENFPIKKEAAIIKEEQLSFGEEQIMMGDQKRLKMVKEEKMIKKEENIDEMERKIKIEEEEEQTIVKEEQEEDEEWEEEEEEQMEDEEWEEEEEGEEEQMEDEEWEEEEE

SEQ ID NO: 148724 - protein, 34 aa, Heterodera glycines
MLAFCSLLVPAILKIWQKKANENKNVVKRNRDLH

SEQ ID NO: 148725 - protein, 144 aa, Heterodera glycines
MASLLLCLLLILCFSIFKTAEQQQQPDEKDHRQLLFVQAIWRHGDRLGMTQMRELGQFLRQRYVTELNFLDPAYHREDVIGGLSKVHRNLHLDKGFCPILRLRPGIGFRAGTAPRDVPTGGGVGAVRPHTQLAAHPRALDWAKP

SEQ ID NO: 148726 - protein, 68 aa, Heterodera glycines
MKKEVKQQLEQNLTNTYPELFTFIQQNVYKSAQPISLHQAAKLSNIKREQCKKDGFCEIPIEKGKEDD

SEQ ID NO: 148727 - protein, 127 aa, Heterodera glycines
MFSIAIHPIFLVAVLLTFFSLFLSSTDGAIARRQHNTQKKATDPNSSDEYDYRVDDDYSIGVFVDAVPIAKNGDESAKTPQTNEDGKAYKRTNRYPTKKLRRFFDESKARREWYESLFSRTAERRRR

SEQ ID NO: 148728 - protein, 79 aa, Heterodera glycines
MEKCLDRKDVEMCQELAEEAKQSIELAKNYRKEIGQTYRTAYSQPDLGIGDLANKLKETMRENQIRGVHLMGHIRECLN

SEQ ID NO: 148729 - protein, 151 aa, Heterodera glycines
MNSEKSEKANSILLEAAKKETERAWRDVATLTDEVSDFAKSSRETLNRAIKSREKAPYANGIRELYLKMSDSIWEIFTILDKINLESEKAESTWRDFERCKTFDQATKLEEQSQNSLMEARRLHFESRRVQSQMLNYENRLQTIVWEHMGI

SEQ ID NO: 148730 - protein, 175 aa, Heterodera glycines
MAHPTISSRFQGQVHGLRTADLPLGRGGSWPIPPFPPDFKAKFTVFGLQNFPWDGLDHYAERQWILSEDCYGLELCVDFTRQAATEATLDVLSGKPVPAEHRALMESNQKFKKRNNENEAGSADDGYDILFLHKKLALSATQHTNDGILWMPRVPRAIKTEASKCIDAFVDEFMK

SEQ ID NO: 148731 - protein, 121 aa, Heterodera glycines
MSMQQNQGSDDVLPMWAVPDFDEMDQMPQRQKQKKIPTLKEFRHQWKERRLLWEREQAEKKDPKTWKKRTDEMKKICEERLEQSKGAGGSNKRQEPDTYTWNWDELLRQEREYLDGGLWGK

SEQ ID NO: 148732 - protein, 54 aa, Heterodera glycines
MAKIVIAPYKKITPEQSGPSKKTLRQKQKRKNKSMRKKQPKKTHKTSLVTYCQK

SEQ ID NO: 148733 - protein, 51 aa, Heterodera glycines
MSCAMALLLLMLVQLQLLRLLRRTKARTASDRWHRTKAAAATMANNMGRSF

SEQ ID NO: 148734 - protein, 134 aa, Heterodera glycines
MDKERHNFLFGAAAREPGKRQFKPNAAFFDQLQLIAADGADDDEEDDDVIFPSPNVSRSSSDNEQQKEEGDEEGEQSSTNDNGEDDETGGNSSDDEDSGDGEEEQQQQQGKPWKSKRQKGAAPNAAQVRNKMGK

SEQ ID NO: 148735 - protein, 323 aa, Heterodera glycines
MANKLILLPYEHYKGLVAARETKNDDDDDIAERTNLGFVKRQVTAAVQKRKGNVSERNAMYNQHLRRYLKMRKEHKERPVRVQLSNGVQLLNKTVETGVQVRPGPDEPKDKSVMVTDEDEEEEEIEVPKFLTPTSQTQGSSRSPRTNKKAAKQQKLIEKKDHLLAIIMSDPQRFGATDRGKIINPKTGREFIDSDLAWSIERLVDPRPENAPSPRGTKELKRKLAQNPLASSLLNRLFVGSGFVGQALSRKNSGYRYLLLAVDVLSRRMFGAPVKSKRPVDMKRAFEELFEQMPRVPDTMYTDRGLEFVAKPLKEFYAEKGIQ

SEQ ID NO: 148736 - protein, 1434 aa, Heterodera glycines
MPNLRSPPLTRQRALNLGIRLNNNANQQGGQQIVEPQHLADRRLENEARHNSVSSVASSLLDPTEIRRRLLMSGIGENAAGVENGPRDEQQFDALLNQHGNDLFQNENRGENFERDVFQPVVREPPLQFSENFENGPRQYELVGVRPVVTSTPHAVQPQRRPNSEPLNPGLVRPQAMFLNSFQQNIAANPNGNQRQRAEQRFIDEDERQAALVRHRQANLTHYVNNDRDFNAFHPIAGAQHVWRAQIQHVSYPNNPQIGEVNPQQIPRQNQGFVGNQQIFRPVAVRNDFHPENYGDNFNFGHPEQQNFGQQRTEQIQIANLEYVLTLDRLPELKGNEGADKVKIFFKKFSNATEEWPEHKRVKALETKVSGRAERAFNAAISSGPHRFDSIRRAMQNQLEETDCREMGAFDELMSGVKRRSNENLDALADRIQSLVSRAYPGLTQNLCDDYAIKHFVRALANPELSLTLEMSRKSGMSFDEFVALAARAESIQRATRVSSNENKYSDNRNRGFYFSNNFSRPQSSEFQGNSQQPRGRIVCYNCNEPGHLSRDCNQQIKGQRVNSNENERIRNQFATGSNSVAIRNNEESPRNNQRNFQPKSQNFLKQNCIVMQEDQPPDAFCCGVQLTSEFSNFLENELHEENQSEESKEKDHVGKILVIRVETNNVRTDAMLDGGAQISLIGAEFLYKLIKEHGLDLRKSGFSRTKARIADVNGQQLKCFGMVTIPISRKGREKTPICFHITTAQFGYNLLFGTNSMTKLGFLLYDSVNKEMIEFEEGQQNDGNSARIIFSTKIEPRTTKLIEIGVDKEWNGKDVIILPSNMESGVKVEPTVGKVEDGRVIAQITNYSTLSQRINEKTYIGMIEKVDEIFDTENSILSAEISSTMAYGKNESGKLGRADLHIGEILGHHKTELLELISQHTEIFATSEQELSQTDLIRHKIETGKALPIKSQIRPVPYAYREKVSAMIQDYLSRGIIRSSNSPWASPIVIVPKKDGTLRFCVDYRKLNSVTVKDAFPLPNIDNTLLALGGKKVFSTLDFISGYWQIKMDRNSIEKTAFSTEFGLHEFLVLPFGLCNAVATFQRFMTRLFAECLNKFVFIYIDDVLIASESWDKHIEHLKEVFKRIENAGLKLNVSKCHFASNELPFLGHILSREGLKMDMAKVKPVLDLPIPSTKKQLQSLLGFLAYYRKFIYGFGGIAAPLYSLLKKDINFKIGDLEKKAINTLKSKIVSDVMLHFPNFEAAKNDTTRKFILLTDASKIGIAAILCQPNEKGNIRPIYFASRQCKNYESRYCPTELEALAVRFGTKKFSQFITMMPTKIFTDHRALIPMFKSKKETGNSRVDKWLMEMNAKFILEVEYHAGKKNVIADVLSRSLALKCLDSPSEAEKVIIGQVRRFENGQRPQEILSHQEWVKKTKEIGREVFLAEYVFRLC

SEQ ID NO: 148737 - protein, 391 aa, Heterodera glycines
METDNIDFALTWDMQCGGLGPEHRNCVQLTTADLDPVLERAGFGLKVAESRLKPQNAKFGLKVVGTPLKALLATFLLKTNAISSSAAGRKLAQSVIGAPVGGRIPVEEDLEAILEKWTECCAVTRTKLAKCGFGAINVPIPRSIEDLPEGEGKPWTELLGKAGFVLEKVKATSVLRKHQFVTSPRIIIGDSSAKQLEDLWPTSQFIRATQGSVGDVMPPPFIRDQQIEHDMLIDRMKDHFALIRGNIRYVSTTPSGRSLLEIWRYGNGYNTEHVSAEGTMKEKGLYMLKAWLMTQVNDFPGDRELGIEKKRAESEEKGRGKTEGKNVRTGEPDRKPSHRPIPSPFRHTGRAFHRSNRTPTHHPYANPVDRHQPQPFRMPNQQGPSRRQFQR

SEQ ID NO: 148738 - protein, 44 aa, Heterodera glycines
CTHSGTLPGGIGYQRSSPLMMFVRWASCGRRNGPSTSDRFFTIF

SEQ ID NO: 148739 - protein, 17 aa, Heterodera glycines
MAVHSPSGQCAKVNNIH

SEQ ID NO: 148740 - protein, 96 aa, Heterodera glycines
MNRRWICNDVWMDIFPCFDHTQLGLKLALLSPRFNALVDKHFDGKSELTIWRRIEINKRIGTKPKLSVRMDDKFVPFPLPDRPLPSKIRFKFLMIE

SEQ ID NO: 148741 - protein, 69 aa, Heterodera glycines
MPFELVNERTQEKLLMLTKGNENGFDDWLMKRCKIIGKTVAFQQQKKDENWNNVFFWFFSGTNCIGITF

SEQ ID NO: 148742 - protein, 102 aa, Heterodera glycines
MLSSAIIQWWRCRRIQKQKNSHFGEGGVTATNELGNLPQNKNHSIAANVARKQAGISAFFKGRSRLWKKPVSVGKSTLFLVIFVFSYKTKLIRFLDAKHIMN

SEQ ID NO: 148743 - protein, 118 aa, Heterodera glycines
MFIPSNTHELFMANAWPSIPTTSASAAGCGPTAAEQSVAADPTVVDPQFHIAILYGRIIIMDGKSVLVVYKMLPCTADAFQKNPNYHRYVEPSTGEVRAMNVSGRPYNLALAIFGVPT

SEQ ID NO: 148744 - protein, 320 aa, Heterodera glycines
GCDIKIKKRIENGNYPFHFKYFSLCRGKFISPEAQAKLHCYLKRDKPFLLLAPHKVEVVHLDPLVLIFRAVISDTEIFSIKTLASKKLCRAKVVDPNSGKTALANYRVASKKLCRAKVVDPNSGKTALANYRVSKSAWLKDGVHQVVERITKRVHDMTNLDTESAEDLQVASYGIGGHYAPHFDFFRSNEVDKRTFELYGNRIATVLFYLTQPHDGGFTIFTDLNLTQPHDGGFTIFTDLNIGIEPTEHDALFWYNLRSDGSVDPRTRHAACPVLSGNKAACPVLSGNKWVANKWLHERGQEFIRPCPLKKKIQDEFGHM

SEQ ID NO: 148745 - protein, 372 aa, Heterodera glycines
KGAADDNDRTGGSVAAIIQRSQLNRRNNSHQQRRRRHNIKNTSTSTKRAVSATSCTSEESEESGNSSKRKKYQSVVPENSVCLITDKPVQYAFLMLVFCGTLNDIVLSYITSGPGNAPLPDIAFTYLPYWPWALVVSECLMITMFFIMMLIAVLHKHRWVVLRRIFLIGSLLYLGRCVTMFVTQVPVADTNYYCSPRLNEQRTFWNILARALSVVVGLGLKINGRHTLCGDYIYSGHTIVHVTCCLFIREYSPRRWRLLHLGALCLASVGVLSLLFSRGHYSIDVIIAYWVATRLFWIYHTLADLPALRNELQGRNHLTKTVWYRLFLWMEGGVQRPIPRKCVPKTNKITIANFRLVSDRAMIGLKSNPNFV

SEQ ID NO: 148746 - protein, 56 aa, Heterodera glycines
MSNYTKKFGLTNYDARLFLRKRVPSRKVHLGSYGTLEGAKVLLEKKKTKTPSRLQK

SEQ ID NO: 148747 - protein, 30 aa, Heterodera glycines
MRAIVLRNLHRIMCKILMAMRKIDQFLTII

SEQ ID NO: 148748 - protein, 96 aa, Heterodera glycines
MFGNGSRKSEFRAIPDVKDEKGLLVHKLKRRFALFAKMDLQEMECWELHERLAKLKVAKKKKKPNKFERFDADFGKAMMTEGPVFVEDFIKAILLC

SEQ ID NO: 148749 - protein, 88 aa, Heterodera glycines
MFCRFPLPLSFASSLLILLLSSNLVLLVGGVFKLLDGNAKLVSNPLENVVYLFQFPRTSTTPSQAPYNLMVETWLHWKHIPFHVPYYL

SEQ ID NO: 148750 - protein, 134 aa, Heterodera glycines
MVDREAGLEWMTKDEALVEIIVPQTFTDRPLTVQLGEDGNFNVSVNQQFWEQYFDAYNAKGQTEKVAFVNAFLKPLNGTDQKEENGSTLTDGRLWVDFSAWLRQNVIKRTMETVLMVTVNGQPNTANPGNSQAK

SEQ ID NO: 148751 - protein, 118 aa, Heterodera glycines
MVSVPKDYRAWKAAIKVGTDMIMQHTCVQFKIVNVEEKDNYSEGILIREIEFAEAHKVLKTCLFGESKAGKVGGWQELKLAMEHTCPHRSVLSDHSATVLPANDWPTRQNIFQRRGDN

SEQ ID NO: 148752 - protein, 70 aa, Heterodera glycines
MLRSLSIILLINIGGYLITLALYRFIDIISSIFGSLIRIWQNECFLGILLNLAAGSNAIVLYFSRSFIIF

SEQ ID NO: 148753 - protein, 63 aa, Heterodera glycines
MLSYWVRRWRFKIPEIKKPKCERISKERRQTIKCISPNTKVSLYERNYMVSLKFSFSFPNSIK

SEQ ID NO: 148754 - protein, 229 aa, Heterodera glycines
MVVSAKQVFNELFITSELGKSIPTFIKLVMAKVVCGKFPGPLLEQFNKFKYLNESAQNLPPLDNDAAKFALMGMVASGDTLESYLKKEKTKNEQRYSIFLQIAFALAVAEKKYDFEHRDLHTGNVLVEHCRDNENIRFLYGNQQFDVASKGVRVTIIDFSLSHFRIEMMHSNNTLANGCSTPCWCCCCSFPATHCTATGAFGLPATNGGGSGATNPWKEMQWEKRMEPN

SEQ ID NO: 148755 - protein, 44 aa, Heterodera glycines
IFLFSPLTFCVPPYSIFCAVGCQCCQFNHADDHLFSMPVLEFLL

SEQ ID NO: 148756 - protein, 1050 aa, Heterodera glycines
MCNAVNGSDTRALLMTATSTVFNPAQPHLSMTAAIFIDPGSHRSFISAKAAQLLDLPVVHTEECHLTSFGEREPKRYISDLVKLGFLCTSGEKLIFNLNAMKFLVNDMPMIQLSELDKTELRQQKLNPPHEQRQPDIMLGIDVWHELQVQPIEKLPSGFTLCRSKIGKILSGSGRIEMHQASNVTFVLSVHGTEQEEANQSVTFESTKEDKEVFTSEDDVKKDEQLNNFFGLNLIGMDDTSTPTDQDQVMVYFKKNLTFVNNRYQVALPWNDRVDALPSNIHQAKARLVSLIKKLRSLNLIDEYQTILDEQVRQSVIEYIGPPESPSSAWPLHFLPHRAVIRADKATTKIRIVMDASAKPKNCPSAPSLNDCLHTGPQLLKDLTGILLRFRRMEHVILADIEKAFLQLGIRYVDRDACRFIWLNNPETAELNPIDHSELRIYRFCRVSFGLTVSPFLLNATLREHLALFDSDLARRIEENLYVDNIMFDAKPTEKLQDLVTQAKTIFEAAGMKLREFYGSNIEELKKLQPDDLAKDLEDNKVLGIRWKPKQNRLIFKLPIFEGKITKRTILSQIAKVYDPLGLMSPVLLPAKLILQEVQNMNPKWDDELPANISKDWLKLMAQWLDRGEAITIEFPRHIQAIDSVEFHCFCDASKYGMGIAVYQKAKTTIMKDECNLIYAKSLVKPIKVAAHDGTIPKLELQALTLGVKAVKFIQAQIKFADHQVIMWTDSQCSVERLRENKRQDRFVANRLQKIREANFQVRHVRTDSNPADMASRGADPQCLRSSLLWRFGPVWLSKADKWPKSNVIYRPGDEFKEVEEPPIIELTTTPVHVEEQFKPSIHFERFSNWNRLKATAAHAMRFIKKLRTIENGTISEPHQNNKPLTMAQLQQAENWILREAQRLHPPSNDQIRELQLFRQEGIWRCGGRLEEAPDLPYDSKHPIFLPPHAWITKLIIRHYDKQLKHCGPRILLSTLREKVWIPRGRKTVQQLLNSPQHGCLECRRERVKPYTYPEASDLPRGKSQRSTTIDKNGEWTTFVHSRSNKAMTW

SEQ ID NO: 148757 - protein, 40 aa, Heterodera glycines
FSFSLLTEIKKIVRQNERCFFLCTLYLLVHFSFLKRCVGY

SEQ ID NO: 148758 - protein, 23 aa, Heterodera glycines
MDIITHCHGVFFVFLIKSWRDFK

SEQ ID NO: 148759 - protein, 170 aa, Heterodera glycines
MYIIKRFAHHPTLTATEHARQQQGKPLSADRQQHDIDQQKDFDQCQNGEIEDQNTTPDILDLSLGQLDAMNDQQNLKFTGLNRSQSDAFYYHDDQLCFAQNNCQNTAHRSGKPNGVGQASITCADQQRSRANTVTAADQQIFMHYKNQCEEAEWADCETTLPLSTTAEND

SEQ ID NO: 148760 - protein, 220 aa, Heterodera glycines
ASKEFKEFHRSAQARVQKLRNEKIRMMKLMEEDDVGYRQLLDEKKDKRLVHLLKQVEDQFLKKKFFTKNGRMSCGEFDRPGAPASADGEEAEAGRAQGGQAGGAQAANAPNSTMPAAMVAPTEAAMTHCTSLFGTVPPAKRSKACAGGTGRGRPGTNDCTCARSGLGQGPYNGRLNDLDEEQRNRRIIEKARNDEDEYDNKNALAQMESYYATAHRVKEK

SEQ ID NO: 148761 - protein, 72 aa, Heterodera glycines
MPVYITSSRKSTLILRSFIYLFNTNCECSFHFKIDESVQMSATLKQCRVTDQQFKMAIKVFILPEIIIGTGN

SEQ ID NO: 148762 - protein, 49 aa, Heterodera glycines
MHLFILSNFISFFIVLFHLLSYGQLSPIKPFYLTNGTDGVKRIKVEAPS

SEQ ID NO: 148763 - protein, 192 aa, Heterodera glycines
MKVNNNKQRKALPQELVYELVNALPFCVRWAAVRVASNFDQFVMERQLDWIKTVNACYATYLTFKESLNAYKKSISVHYDEWTAYQEKWTIYQQKWTIYQHHQQQQQDGSQGEEVDEQKMDEFIQEMKGVFEKIKKTSQQMKVVFGLGWKVFQKNKEIFGLLLKAYPKINTEFWSGGENDDEDEDVEEEEEH

SEQ ID NO: 148764 - protein, 84 aa, Heterodera glycines
MAKFRTKWYTKQAMVLYFLSQGYKKSGIFGHPGQDLRRIYLYRQVTLTRVSKSLNRKMASLFGKTLEPELNLEPKVVLKTQPAT

SEQ ID NO: 148765 - protein, 229 aa, Heterodera glycines
NSGHFEVSDHEYGVCFVLFRLEYNIKHIFNPTNSFIFAAKDCVVFATENKHSVLTQPVSKISKLSDHIACVYSGMGPDAQLLVKKARKIAMDYQVLYGYEIPVPQLVSRVAAVMQEYTQSGGVRPFGVSLLIGGWDSEKGLLFQADPAGSYFGWKSTAIGKNDQLAKKLLEKRYNEDIEKVDAIHMALLAMRETYDVAMTEDNVELVVCTKDGFERMTKEALREQIQAL

SEQ ID NO: 148766 - protein, 44 aa, Heterodera glycines
MSKIKKPQAILEMACFFPGKIRCQKGFLVSNPKEICCQQFLTFS

SEQ ID NO: 148767 - protein, 45 aa, Heterodera glycines
MAKLAAFFKQHINFFPLSHSPSGKLMQIEYALNAVKGSAPSVGTR

SEQ ID NO: 148768 - protein, 23 aa, Heterodera glycines
MNKTFISLHSIFLQYILPLHYKL

SEQ ID NO: 148769 - protein, 249 aa, Heterodera glycines
VSTNPSGKPISFEEANKECQQHNPNAKLASIHSPMEEDFVAAFTKNRPFRSQKQGQSLYWLAQIKSAVEHPNNDMDGNYDNEGGSNSNGPFVWSDGTNVGYGNPTDKKSGKNFPWYTKPSTKYLEKHPGVVMYGKKKDGENNPWMDEKHTGTWSAISTQSATHGESVPDVHGYVCKMPTMKATNTHHLNPRAPPNADEQQQFSTKMAQNFNSPNPTENIDEKDEEPHFSRNNGNQYGLGSDDEHRRRWP

SEQ ID NO: 148770 - protein, 29 aa, Heterodera glycines
MALLPYLVFKKCTVSLTILFLNFHFSEME

SEQ ID NO: 148771 - protein, 15 aa, Heterodera glycines
MGVIYSLRSLILVLN

SEQ ID NO: 148772 - protein, 517 aa, Heterodera glycines
IKFPQFFFFFIAVVAAWILYFQYHQKKHWHRFQYHQKKHWHRLDVPGPNVNIFFGNKISQNMEIHLGKILLLINIKYLLSSFLFDRREFCTKDPDMIRQIFIKEFAHFQNRFVSFSGIDLINGYINMLRDDDWKRVRNRVTPAFTTGKLKKLIPILCECTERLCKVLDEYASKKKEILLKDLYGRFLLDVIGRCGFSLDLNTYEEENVFLEQSRLVFNFGRKAQRIRTILCELNLNQIIIEICLPEVLDIFQLLMNAVEEDDDVAENSAISAEDAQIIHSEMRSDEKQQKQGKHLTKIELFAQGFIILVAGFDTTGTTLTFATYMLAIESEVQEKLRKEVNEVLGEKVSENITYEITYEHLKQMHYLCAVVQETLRMFPVAPKTNRECNTDCVINGVPQKGDLVTLPIYVIQHDEAYYSNPDAFDPERFMPEQKAALDPLFMPEQKAALDPLAFLTFGIGPRNCIGMRFAEFQMYVTLALLVRRFRFCASSNTPVKPKINSNKNKFTNPGIIGRKFA

SEQ ID NO: 148773 - protein, 53 aa, Heterodera glycines
MSDCGRDSVVMVSEEFYDKRVLIRSGSPVRHSTIMEEMESSDEAAQFALLALL

SEQ ID NO: 148774 - protein, 47 aa, Heterodera glycines
MKFHQAMAFIRCELETQCSKWHRSASALSWASRICPEAEFDAFRANR

SEQ ID NO: 148775 - protein, 84 aa, Heterodera glycines
MVKEQWQNDADALIDFELFFRKYGVTKSEEKLSLLQEVSQRAIGAKSHCDEQIYLRDYGTVEKIGHSFFSVDRSIIIEEKNIKV

SEQ ID NO: 148776 - protein, 202 aa, Heterodera glycines
MNGYQPSRNEHTGDESSKKTRHNTNYFRYIYNGNSEQFGLCVAITEFNTENMPNYITEKLKNEFKIYRKLSKDSKHMLKVFESEKNGKIFKLVSEVVKYDFWELFQYGAKNINETRNILYNEMLKALEEFHKSGMHLSINLTKFYLVEKNNGNAKSYDKNDDDNDNNEMEIEGEKWKMNTKLADFGAAILFNEKPPKINVNG

SEQ ID NO: 148777 - protein, 75 aa, Heterodera glycines; identical to SEQ ID NO: 132731

SEQ ID NO: 148778 - protein, 83 aa, Heterodera glycines
MLEMNCNWYRAMWANWFKKSLTRFCETIRDLTEFWKLVWFCAANTFKRICRRTLLQCSNKRPFSRVKWSVPFQHTKIFWQTIG

SEQ ID NO: 148779 - protein, 29 aa, Heterodera glycines
DEMRCTSCDHIVKSPMKSVFLRVEIADRF

SEQ ID NO: 148780 - protein, 131 aa, Heterodera glycines
MNTISSRDNLLQFASPSLNMLSILMYSMLLFAALVLLISPATVVANEDVVGLAMRGTQQFFRRNAKWINLPSGGGSLVSGRGNFRPGFHSLHRSRTQLAEPLFITFKRSPTNLASMMVRLQKNPRHNDGTN

SEQ ID NO: 148781 - protein, 278 aa, Heterodera glycines
LYDVSSAVDSPLIQFDFNALLPDRTPDDSEASGDEFGRGRAHSTLGFITQLVSFDFGPPQSVDGNRTVLGSLLALDSNGQLYATLFPFDGIGPCAPPKGPLSLFGFPASSQHRLLCSALDLLHIRHPFGVQHFSLWAMASEDGLLTHFILPMVRKFCDHCAYLVVGQRDVFRVELTALADHLWHQCTMKSNANPTKAMDEVNRSSSNVHQLLMFADSGESPSIGSVVCVQAPIGTDVDEDDDGGTDENRQQRRDLLIAAECSFSIKMGRKSAFLANVA

SEQ ID NO: 148782 - protein, 59 aa, Heterodera glycines
MPTSNHGKYEMGQQSVLRCHSPQRKVLNTERMTNVQQIERRTEQTGALIERNLGIWQII

SEQ ID NO: 148783 - protein, 88 aa, Heterodera glycines
MDFLRLFPSSSSSTLSATNEQSQIAPSQSLLFSAYRNLGLLCYSNGEPNKLHLVISASAGPPSTAKTLEKSSNSSQPVKTCVLFKRIT

SEQ ID NO: 148784 - protein, 140 aa, Heterodera glycines
MIDAICQKIDTKTAPISREECAKFDNNLFSSAIHMVLQLTGEEVMCKLIAGPCNSTNSSASAGPVKCDFCLLLHKKSENIINNFITLFESFNMMCDRLSSGVDVCKKYVKAMMNGISNIVGIHLEQTHAQFFCKNIFKCT

SEQ ID NO: 148785 - protein, 113 aa, Heterodera glycines
MSLLNGKNATGHCQSDGDFKHELHYVLTTIFDEKAAENLKSLSLVQLIKKAIIPQFRNFLRTKSVQLEKLFGVLNELSSNSSNCFRLISELLRQDSQRAKMDEEHKKHTETVP

SEQ ID NO: 148786 - protein, 355 aa, Heterodera glycines
PIGVNPNVNEVTKLWCPKGTYSAVANLFFQNPEESVKSLFHSPSSSFRPFTLFVFAVEYFVLTLWTYGLSVPSGGQIDPGKYALVGAAAQLGGIVRMTISLTAIIVEATKNITFGLPIMLVLMIAKWVGDWFTGGLYDEHIDLAEVPLLGWDPPKLSRNILAKKVMRRDVVALERVENVGRIVEILRSTRHHGFPVVNRIDASIGDSQFPNYGNLLGIVFRSQLIVILQKKHFTLDYEGKYPANGHTPISLEDFSEFYPRVESKISQLGLTVADERSWVDLKPFMHPSPYRVPLDSSLDSIHRVFRGLGLRFLLVVDRENRLRGIITRKDIARFKERRVKGAYLVHEIHISPYNN

SEQ ID NO: 148787 - protein, 58 aa, Heterodera glycines
MASICDELRNLRGKSGEKAGDFMGKEWKRDCQFKGVCLTFDADQKGLLHQLDQITPSW

SEQ ID NO: 148788 - protein, 31 aa, Heterodera glycines
MDIGHCPNYSWLCNVCKHLNSLEEKVLFLGY

SEQ ID NO: 148789 - protein, 139 aa, Heterodera glycines
MDRLKPYEDEIVDGRTCAEIIAGRENANGTSQSRTNAAGDGCASSSTPITSGSSSVIDAVIDAVIDASSSNSANAQGTTVTKLSTAKRGSRAKLTIVGKETGADQPKKPPASTTKRSEPKEEVGNGKEKRERLASRIGI

SEQ ID NO: 148790 - protein, 36 aa, Heterodera glycines
MEKVIKCQSDRMNMAFIFIIPKPEKRTQKLKAQIVE

SEQ ID NO: 148791 - protein, 21 aa, Heterodera glycines
MMMIDWVVTSTTTNSRSELEN

SEQ ID NO: 148792 - protein, 232 aa, Heterodera glycines
MEQCRMDVDFSLMDRLSPLLCVQPFFTTKNAVQNKLSPPPALFLSSSESVFVGGLKDDFEMGGGGCCGQGGEQPMPKTFHAKCYFNKLLLNLRIPIANPSSSVSSPADGTADYRKRCLHPEYLHLALDSANLELPKFSLADLSLFWTLSLECKTAKGTFVGDPTVLQCPREAMTFFFADTSNAEKTFGNKGMNFFLNFFESETNCSPNRLPFKKNCANSQWIFWWKPRKSMC

SEQ ID NO: 148793 - protein, 199 aa, Heterodera glycines
TSIATLVERRPDIFAVSVRAPALVAVITHDDPLSADAILQQQQINGDEERLSFSSSSSSVLSPHPPHPSPLLVASVVQQMNERAQKFFAAAKCIKIGKQRRLEEQREQFGELCDGDCLRFVANDFFTSFTFTTDLQRVLFESKSHLKECDFIECLQSAQNGMPPQCIDILNIAAPDERRTVLKNDILTFQINNSFEKQN

SEQ ID NO: 148794 - protein, 59 aa, Heterodera glycines
CLVNIRSLYNKIDEIALNLVNKNIDIFLLTETWTKEENPILFSPWIIENYNFIFCHRKS

SEQ ID NO: 148795 - protein, 274 aa, Heterodera glycines
MYLHKISIPSHDTLSYYEDLYPYDPRKLDFCWGPDSCVEASCSFDNASKKSTSDYPYTALSDQLAAISQQMDNNSVDPITKQLLKICVELLQQVQQQQAVISEQDLQLQHLKQQKMMEEAIQDHERRRSVVVMGLPESQKQKPSERVAEDRTAISGVLDELGIESPITVYRMGSPDQAKTGQNRPRLMKVIFGCSKHQKQTLAQWNKGRAQINQKLGMSNIRIRPSLSQEELKARRVLQEECSRKRKEDGGEWVVYADKVMLRSDIAAFKNNTN

SEQ ID NO: 148796 - protein, 108 aa, Heterodera glycines
MMSAKFFTHLINSASVRPISTSCCRKELRELWKLDKRNPFQEIPEAWVTSLDDVEQKNCGLIQLHPGMASIWSENGTMIGHWQKIYSKHFLNVHKQHKHCLISVDEKR

SEQ ID NO: 148797 - protein, 58 aa, Heterodera glycines
QKQSLRRWLTLTFVCWLFFAAQCDLLRLLDFKIFAPFCGKLDYLHCFFFVALPVTFFV

SEQ ID NO: 148798 - protein, 52 aa, Heterodera glycines
FAQRGGLNSHGRNGGVKKAPHSQRSIDHFETEHNAAEHQQQIPAENDGSHRD

SEQ ID NO: 148799 - protein, 478 aa, Heterodera glycines
PVQCELAGGDGLDIMNLVAGFPLIFTCLGLNWSTELLRTNLMLYAPYWMVNETGKQLAYYSKSVQISHPPGTNPMILPLKESEFMSEKKAKMTVDVQLGQSGLTKVVTILPFFLLQNDSKVDIEVREPHLTKWIVVPAESVIGFWPAEKKKHKKLVARYAKTKEESVQFPITEAFEGFCQIRNNLIGLYVIVSLLDESSVIHMEIFVPGMVPAILMNDTKYPIRYRQTGHRQWQIVKPNQMAPFAWTDSLNDCKLEWESGDAENSDELLRNRDISYLPANNDGYHYCVSFLDGRQRVLLFTADKKVSFIAHQAYEMEQPDIELELHLHGLGISLVNNLKSIEVLYMAISPGKQKKSDEKSLKMATGFWCQYRQTTHQQTLHVKLHNFQMDNQLPASTFPSLLAMVPQPKYMVKNDPKPFLECAFVMSQSEHTNIVQIKLLEALVQEFAIRIDRTLLNELLDIIPKGIIQTGYTVNKDD

SEQ ID NO: 148800 - protein, 27 aa, Heterodera glycines
LSTSPPNRRCPFWRTEDRNWKMDPIRA

SEQ ID NO: 148801 - protein, 748 aa, Heterodera glycines
NPIKAYSNFTERLTKSLNLSQSPCDNFYEYACGNFKGPISFDQLTVQNVKTFVGLVEDERYSKNLPLPVKQSIQFYQKCVGALPLPVKQSIQFYQKCVGAMSDWSAEVGDGSRLRKKMIMLENLLDGVPFPAVSAKTQLNVSTDTVDTLSIALGYLSNDVDTLSIALGYLSNDEGVNTFVSVGVSTNWLEPHGEHPYTLHFDQARLLLPTNYYLKARLLLPTNYYLKAWENVRAMLHANLVSSLKAYTKFAGANVTNEQIDADAREVMDMELTIATNLLKAPDERRKFARTHSRKRTKRWARTHSRKRTKRWASIWTLDCSPWALKVPEGVDPAHRAFLHPRAQSDQKHNAIFGHGKHSLFVNYPLFHISPRTLYNYLYIRLLSANLNYLPCPIDLAKSRAFSVPVGLEFPLSTTVALSKTRGHMTRMASILVAPRGERAMCASINAQYFTYANARIFLDAQLPEKEQRTKLRENLRTMVAGVVDSFRGMVAQLDWGMVAQLDWMSSEAKRASFLKMDNLVTNLAWPDFVEDDAALSEFYSLLAFREEDTFTQMKDKLRDFWTNSQAEKDKLRDFWTNSQAERLFFANDTDRLDFGIPSIVNAWYSSSRNSITFPLGILSKPFYDPSSRNSITFPLGILSKPFYDPNFPASVNYGALGVIAGHELSHGFDDEDEGIQWDGTGTLRGWMDAASEANFEQMAQCVVDEYAQFEPLSGMHIDGTMTQGENIADNGGHVGKNEQISQNFPVL

SEQ ID NO: 148802 - protein, 288 aa, Heterodera glycines
MTATIPLIQNLDFYSNSDFGSFIDDLDDLPLSPANSSCTLLACDDEYKNNTDADDHLNFADKASSSAARDETASTTSTVSHSYRMEKLVPMPSSSATAASSSKRRRKMVHSNSQRQQKKKQNLTKQQMSKINKKDTKSSKLDYELELKRRQEEEEELIAISSISGPTTSSHQHQQFDFTKVKGKRGRKSKDNSQFLSRLTCFAPTNTGRNKLAAQKCRERRVNQKQEWESEGWSVEADEDEIFFMKEEDDDDELGEGIHTFDDVSTQQTAAEDKHLHYHPNYYAFCNN

SEQ ID NO: 148803 - protein, 97 aa, Heterodera glycines
MPSAISVGLGRIAGGFVPALFGGSFGPVSAWLTRGWYGQHAVPLGKRFDRIILNSFNSDNYEEFYQKENWVVAQLSSLSGTLFTKITLEGKMLPIVQ

SEQ ID NO: 148804 - protein, 116 aa, Heterodera glycines
MPSLIGTAGPSVPSFLKNCTAKKHFLIFGNFLNLIEIFSNFPKSRNPARDPANFKCGIAEFAGLIPRDPVPQKVLSSSPAAGSANLKFPGSNGLSNAYTDNLYTYAPRPSCYGAGQ

SEQ ID NO: 148805 - protein, 43 aa, Heterodera glycines
YGTERLPISDIFGVGIPTSEIFDEKSEIFLIFLFKKLASFVQF

SEQ ID NO: 148806 - protein, 76 aa, Heterodera glycines
MGEFFACNFSLALEVVMSPMREFFDSYGHVNVNVNPDIISDYLVEVNGAAINLENDGQFDGNNELIADKQQLKVGE

SEQ ID NO: 148807 - protein, 255 aa, Heterodera glycines
MDETAVWFDCPDNRCVDNKGAKDPYVLVNRKRPVPQIVKQFAGKLVINFAGPIWMNDDTTEDYLHKIIGAKLFVGERLLVWDAFGSHKSERTTKVVKGLGVETVFVPGGCTKFIQAPDVSWNKPFKERIRHFYNTWMSNDAEKEFTPAGNPKAPALHMVLDWIHRSWQEISKAVIIKSFEVCGLTTPFDGTGDEKIACFKPEGAIGPIGTKFLREFRENETVKDGRNDHEEAGLSDDDGDVELDGVGDDDEFFIC

SEQ ID NO: 148808 - protein, 58 aa, Heterodera glycines
MVAQSEKRWHAEAIAFLFEGATKYGMGQHSQKGLCRHVANGVQLFESDLMHLGNGRSF

SEQ ID NO: 148809 - protein, 373 aa, Heterodera glycines
LFPLSLCFLLLFPSSISATFSVTFRQFLRERYGDAVDKELSREDVGGGGSFGGGTHQKGQQRRPVIFVHGIRRPVIFVHGITNNAGTFGSIQHFLQNNGYGDEEVYGQNNGYGDEEVYGTTYGDSGRTNVAFVTMSCHYVKVAFVTMSCHYVKVIRMIIVAVSAYTDNKVNIVAFSMGSPVARKAILGGMAILGGMCVDTNEDVGPPLTDVGPPLTNLVRAFVGVAGANWGSFLCVLPGSCNLLNGMSCGSRFLKDINSKKRYEGEFIYTIYSTGDEKRYEGEFIYTIYSTGDEKVGYQTCGRIASAIDGENAAFQKEGLNHDGVIFGTANLQYNLVTYFQKEGLNHDGVIFGTANLQYNLVTYNRPTFERNI

SEQ ID NO: 148810 - protein, 187 aa, Heterodera glycines
MVQMWCMETYPCGDPRLPPHHCFPPKLVNPDELTKRTGALYYKLDLLDLEDQVALSKRIAIMKLERNFTKEDTYTLDAQTTNDFKEKIAEIAELFEETESDEDQARMVLEGSAYYDVEAKDGVWIRIFCDGVWIRIFCEYGDLLIIPKGIAEYGDLLIIPKGIAHRMTTTPKNYVKVRRFFKSSDSD

SEQ ID NO: 148811 - protein, 30 aa, Heterodera glycines
MAGITILFVTLLALFLTVLVNYFEIFRNLK

SEQ ID NO: 148812 - protein, 37 aa, Heterodera glycines
MQQMSVKFAQEMQRMFSATFPFGPPAAPPPQFHLPPQ

SEQ ID NO: 148813 - protein, 17 aa, Heterodera glycines
MWLYVQWPMCQSQPTND

SEQ ID NO: 148814 - protein, 93 aa, Heterodera glycines
MSSIVYIFYCFCFSVLFNLTEKNPIEYGEEAKLKIEQKIIGKNIGNFVKKETKSENIQENNRKKIKMEEKDEEMSQKFGRPQIKWEEKFFKIN

SEQ ID NO: 148815 - protein, 21 aa, Heterodera glycines
MANSAKKITIKSTGKNGNPNN

SEQ ID NO: 148816 - protein, 47 aa, Heterodera glycines
MKAMLQTTQRQNKMRKTVQFFRYKKNLRTNLPLELPFPENDVTKNER

SEQ ID NO: 148817 - protein, 98 aa, Heterodera glycines
MTTPANAARARSAKAKLRDAKRRRAAVGRAGYTRKAQRGERCAICMRNVGDITRTTLGCTHPFHHRCLYRWLRYHTNCPVCRYNFVRTIPRSERRQPL

SEQ ID NO: 148818 - protein, 88 aa, Heterodera glycines
MLSLYTMLEFSLLVLNGIAIINRERVLNKVNKHIAVFYPIVFPLFEVFEESAAQFRSRNLFVPSVVIKFFHFAYLTDKSLPNFQHTNE

SEQ ID NO: 148819 - protein, 76 aa, Heterodera glycines
MVADSAVVSARTECPLQFPISFWNVHPRAQMITSVEIKKVMKELMMPMEIEFYHFQHFIFIFSLEFNKYLFAYMYF

SEQ ID NO: 148820 - protein, 50 aa, Heterodera glycines
MLLIITVTTIIYFFIPPNFSIQICVRIVKQLENCFSADGSFFLPVWSKIW

SEQ ID NO: 148821 - protein, 66 aa, Heterodera glycines
MCGLLSQVLNDYGVNAEKVHLIVRDNESAMQKATRIAGFESLHCTAHNFNLVILINQKFHDYLFLI

SEQ ID NO: 148822 - protein, 137 aa, Heterodera glycines
MPPQSKYIKYFKISHGTAKCLSCSYSYGSKSTTFPKTCLREHLQRHHPDKYEELLKEEEKAKVKPNGQQSIQSLLLASTSTGRLCLSPTPAKMPRNESPFSSSQPKIVKSFCNYLDILKFQSRLSTMEFGWRNDKKG

SEQ ID NO: 148823 - protein, 16 aa, Heterodera glycines
MLKVIAGRYFVLVKGT

SEQ ID NO: 148824 - protein, 203 aa, Heterodera glycines
MARVEDEFDVVIVGGGPAGLSAAIRLKQLAAEKAKAITPLNYATALDDSPVMKELQMCRNVRPSFNSRLGFWGGMAYTGTFFVMGRGIEPWTMHHGHPDNEKTELKEKHSEIEYPKPDGALTFDLLSSVHLTGTNHEEDQPAHLTLKDDSIPETVNLALYAGPESRYCPAAVYEFVPKEEGSAVSAQQRLQINAQVAKANWQC

SEQ ID NO: 148825 - protein, 60 aa, Heterodera glycines
MKNAMDDDDKTKVTHFQNVKKEFLIFCYQKFIMCNLIRFTYWIFDQRVKMLRAKTLIRDH

SEQ ID NO: 148826 - protein, 151 aa, Heterodera glycines
MATKRTALATAAKTTVQDQNLKQLVYRKCLQALIYPISATTPHNFCTTNFQTPTWCYECEGLLWGLARQGAAEKSNKHGEGDRAQNLIAVIRDRMKAQERNKPEVFRRIADAFTMDDRTQQEALRVVKNSILEGSSKWSAKIQLTGGIFMC

SEQ ID NO: 148827 - protein, 132 aa, Heterodera glycines
MSSGLLWRAVLLLLVDCASILFWFFLDNVKKRRRPHKEIFICADCWLLVFDFLAPSQLGLEIALISRRFDLRVDEHFKTRKWTLNKQLLIQWDIEENGTKKMQIVKSDGNPLPIPQKPLPNKVLGLRGITIA

SEQ ID NO: 148828 - protein, 140 aa, Heterodera glycines
MEDEHLFDSYSFVGLSELDDELEKCADDPDEQIYEILKEFPTGITSTFLEQKYMERLIIAFEMLRIEASLLFRYVTKRLAKPLPRNWLSLMRSTEEFELKDVSTFTMLVGQTNQMSSVEEDFRGTFDPSGRFPSKSILEH

SEQ ID NO: 148829 - protein, 150 aa, Heterodera glycines
MEYESNELPPIYLPVGTEVSAKFKGAFCEARITKLVKSVKIKVQLKNSNIIAVDESAIQNGRMEINQNVEVIYMKQIHKGQIICIKLYHPDKRSKKKKEEAEKNSSTFNSPSSQRSPRYFRSSSVTPLKGIASTRSATRAIAHLQFEVKN

SEQ ID NO: 148830 - protein, 415 aa, Heterodera glycines
MRSQLLALLHGASLPLNTVSHAFAYGSGAIPQREEDPNTKMVDFLIVCNDSLLFHQQNLLQYVSIALLGLSSLHPIQFAKKPKPLLSSLPMVRCELGRLIKYGIIQEDDLETDLLDWTWLYAAGRLQKPVLEVYNGRGETSDVQRTGRNIGRALFDNYRAAAHAALLQLDGWFTMDQFLNKVVSISYGGDVRRYFGAEDPQKEEKLVAGASRQLRALYKPILEADREVHLHADDKIEQDCSTPIVFFRLTQMPRAVLERISKTYYPQRKAADTEQTFIKINNVYGKKRMTSSDSVVIERLGKVSSAWPFTFSVGEFANLLLVRCDQMRNCFTLSVRIERRRQQQQRMVSQTFGDCREGQLKPAELLSQSQRLAAVLCDFCGHCPQGIGPTVAVFVLVPISKESITANFGTVVEKT

SEQ ID NO: 148831 - protein, 54 aa, Heterodera glycines
ELLVLFDSSMCLLLICKISKIFVKFQKSYDQKELKNPVIRTFFALIFLCINKNF

SEQ ID NO: 148832 - protein, 74 aa, Heterodera glycines
MCLFRESHVRDHLRKVYGTLALTMLSAILGIVVNAVMDFSSLLPVFSLMELGFLIGIPFFGSTVYVSNQVLRVE

SEQ ID NO: 148833 - protein, 85 aa, Heterodera glycines
MPTVRISSPIVYRGQKTLKEYEKTITLGYEKMIGVWFSLTKRILAEYVTCYGDKMGEEIFFEMTLIKKAFVWQRNILCVICTITV

SEQ ID NO: 148834 - protein, 183 aa, Heterodera glycines
MLFVRPTFLLLLLFFCSTNFFPIISASADQNVENSEAEQSENILLQRPLNIIEVRTKQIKNCTKFQCFKKVKLADTDGDGRISLDGELKQFLESTKFERMFKALFDHQSRGELRLEGFRKTLTKHFEGRKYAPKLPTLVNEVNVNKNGGIDWHEFKLFMYELGKQVADKGRKFDHFEKGFRKQ

SEQ ID NO: 148835 - protein, 49 aa, Heterodera glycines
MIARIAEKIRDQFPNVDRLIAKRKPSLSKRLTESKNLEMYLICNFNQQI

SEQ ID NO: 148836 - protein, 82 aa, Heterodera glycines
MAIKYGPKIAKYGHKMAKISKYGNKWQKCQNMDINFSKLSAKFLQICWLKLHMRYISKFFDSRKINNKSEIFAFLLIFDIIY

SEQ ID NO: 148837 - protein, 73 aa, Heterodera glycines
MKVDELFIIVMRSLVRECLDWGPKGEAVPLMCLLTFFKGNSKNSDMPSNLSKELHTFFLSFLFILYFTLVFFI

SEQ ID NO: 148838 - protein, 207 aa, Heterodera glycines
ERDDETDTHRKRKIEDEEIDPLQNQSLTKKARIEALEEAARQRDDGKEEKEERTGQEFLEMYSVNYREKLNEVRLELIRDLFNIQDHMKKYQGVTDGRTIQALNEEALRMRTAMKHRRKNLNAFNKAVLKKDLQISAEEYERTSYEQNKDYVEPFFDSHPTDYWEHIHKKYEGLQDDYKKIRELREQQQFLTDEQKKQSIQDEIDQL

SEQ ID NO: 148839 - protein, 837 aa, Heterodera glycines
MGVHVHKGPPRDELLSSLKKPLLLILDDLLTIIDEKSLSELFIKKAHHLNMGGYFPLTKRQKYRLLPYANFVRKLARVRTEKGAKKVFQQNGDGSLMVFKPKQRERDSKIPTQIVNDEGLDETGSIPTLEDPYTTAEESDAEPTTSTPKTRPLIRPMRVGTTKFRQKQKSFVVKKQQKIMSIINNDPEKFGVGSRGHILRADGTAYLKSNVNQALERILRRSPENAPSPIGTKALEQRLRNDPRTSGILKQKFNEQSGSGVKNRGTEFENREIHKYFQEKNIQKHKAHTSTVKAALAERCIRTLKQRLYRYFSQKHTIKWVDVLPKIVNALNNSKSRITGMKPVDINPGNAQKIWKRVYGDEFSRKAYRKPRFKEGDHVRLAKYKSSFEKSYLPNYSDEIFQVYDIKKAKPHRYGIKDDKEEPFDTRFYAEDLAKTRKDAETTYRIERVLKTRTRSGQKEHLVKFYGYKEPEVHLPRTLTFGGHWLCGLHSIIYTNSWPAIGTTENQWIKVHLKNGDKIKIDIPAGSYQNEQELENAINESIKNGIKQPATRVKRQLEDGVDLFFHYNPDDYWEKIEEERQRYKELLKLIDTKSRERDDETDTHRKRKIEDEEIDPLQNQSLTKKARIEALEEAARQRDDGKEEKEERTGQEFLEMYSVNYREKLNEVRLELIRDLFNIQDHMKKYQGVTDGRTIQALNEEALRMRTAMKHRRKNLNAFNKAVLKKDLQISAEEYERTSYEQNKDYVEPFFDSHPTDYWEHIHKKYEGLQDDYKKIRELREQQQFLTDEQKKQSIQDEIDQLRRLVDYRKKRFAALEYEAKKRDALQQQPMALALTH

SEQ ID NO: 148840 - protein, 64 aa, Heterodera glycines
MIRISRRIFCEQSQTWRRLTIEDFERTVSEEMQTSNSYKERAEMEMISSGAEMTTTACEYEKNN

SEQ ID NO: 148841 - protein, 37 aa, Heterodera glycines
MENYDNFLLGQFVHDGFSECHDQNLSEGLSCQNRPRK

SEQ ID NO: 148842 - protein, 225 aa, Heterodera glycines
MLVAHWLVCGRAEQRADELIRRRQEKKSVRRMLHGMMGDVSKVYGVDPTAQHRRELPALDIPPGLSCALLLLASVTAVLALLNWFVGLYFAINYDLMMPSVLDDFVECVASGCQLILFGTLWWWTRRVITFKRWDPHHKAESRGDLVLIGGSAAFMTVKLFLQVLELNFQRIDGFLPLSEAILRTASLVLIQSAEWLQFCSLQRVMALHFEYSFGDQQQGCPSLN

SEQ ID NO: 148843 - protein, 210 aa, Heterodera glycines
MPFNFALLLPLISVILFQFVHHSSSSSSSSSSQIPTTIPDQFELNPAKIDIFLRRTALMALLRAKANTLMDTVPLVEQVLFKQCVAESKEAICPVKLAKCLAKLIRSSRDQQQLHRQNKWAERNESTKAAEKARQMFISQHSSKDNNRKLRRIRHFFALWRRREGRRKRKELMGMKQRRRKRAMERRTTEWSRKMKRMGRMGEAVRTAAG

SEQ ID NO: 148844 - protein, 89 aa, Heterodera glycines
MVFMMCRNLFLFLAIPYDETPPPKFVYTFQGPGRGRWTFSCQFTSADALDLFRKGHGMYQTKKDGCRYFFCSVKRCPYKMIGIENEIFV

SEQ ID NO: 148845 - protein, 126 aa, Heterodera glycines
MCRDAFSKCPPTDALPPISDKMQTKSSSSSPKKQQNSPKANRPRIVLKLRWNAGGFLPDHSPNDSTAASSSSCTATADDCANMKVPKSETQPPLPLPQAKLFELAMCVQEMRQIAAGWNLLFREKR

SEQ ID NO: 148846 - protein, 396 aa, Heterodera glycines
MFCYTGATMKLCCERFENEKSQPIQSHLTTQVSGEVTISNSGEKQRTEKSTKSGQKGDGQRVKPQKELARKSSAQIQSVGTVKKESKSNYPALTHKTTADPNETDIPQQEESVSAFSVDVPPSQIPSTQQMVKMENIMAKNERAPGKDYAEGKALKETIEKEREDAEERRSQKAFQQYFLEKINDGWPYDDKFYRPTNNEGEFGKTVVELTTKSSTTGEELDWEKLLPINTAKDLFMALQPSGIRDLRDGQPNALSILCYKAVKLLVRATQTNPPQKEHRKVMLNCIRLLTRLMPFFFEQNEWREFFWTNLPQDEKAGLNDSQKELPLSKLLLTALSDLLFCPNFTIGILDKNIHLENISKVDSCENIWQSGVGFANKTPQSAVYDANRTEILKLL

SEQ ID NO: 148847 - protein, 57 aa, Heterodera glycines
KWKMLDGWENEHEAMQGGDRRVGKGTFIGQILCKKRILGIFMARGPGKIANNNQLEL

SEQ ID NO: 148848 - protein, 35 aa, Heterodera glycines
MSVSFGSAVVFDESLWAKGKKRREKVKRMKADENA

SEQ ID NO: 148849 - protein, 180 aa, Heterodera glycines
LVLLRYNGLDKVNGKKTKIEFWQIFLLIGIFPKALRSGGQSSSQTRQALSTVDNYLRKIQVIWRTQLIQALIPQKEELDTMDLHQSTNLVVLSDHGLMAVEEEDQFYIDECLADPSMVRRVANSLAFAMVWPIDGEEVLRPMSLYCISATPSFRTQLSSNLKCAISGLSSAITKMKRRHL

SEQ ID NO: 148850 - protein, 19 aa, Heterodera glycines
GLLGSWVRVPPGELPFMFY

SEQ ID NO: 148851 - protein, 80 aa, Heterodera glycines
MFFMQKLVLIEKKLIFDKNQQCSSPKSADLMGTGEKAADVKWKNLSDENKPHLPQTLQTQERYVIKRMPFNLLIIPLKIN

SEQ ID NO: 148852 - protein, 66 aa, Heterodera glycines
MMPNILEAQLPNDYFFYILRLFAVKLDQNAKERHELKTRNLLINEILVSRLVALGAKLSQRQELLS

SEQ ID NO: 148853 - protein, 369 aa, Heterodera glycines
MSFIHPFFLPERWFMNVHASDKISLDRSLPDFRLSECKGIAYELSLLPRASVVIIFTDEAWSPLMRTVHSVVNRSPPELLEEVLLVDDANELKDNLDAYIRRFGGKVKLLRKTERQGLIRAKLFGALHSKGEVVVGAVVGPNKGKAVGHCLSVNRSHRCRNTFLQRLVRTRLHWGLLVEFAFSVGSNPRPNSQRAKVENRSHSVGQLLSVCFYHLFFTFSSPTMAGGLLAADRNYFLEIGGYDPGMDIWGGENLEISFRVWMCGGSIEFVPCSHVGHIFRAGHPYNMTGPGGNKDVHGTNSKRLAEVWMDDYKRLYYLHRSDLKHKDVGNLEGRKALRDKLRCKSFKWYLDNVIPEKFVPDENVKEYGA

SEQ ID NO: 148854 - protein, 56 aa, Heterodera glycines
VWMCGGSIEFVPCSHVGHIFRAGHPYNMTGPGGNKDVHGTNSKRLAEVWMDDYKRL

SEQ ID NO: 148855 - protein, 81 aa, Heterodera glycines
  unsure (1)..(81): unsure at all Xaa locations
LTKGVDLKTASKFFANRFACGCSVTVGSADELVIQGDFKVKVCSPSHTLPFCXLKDKLFVEIPKKWGVDEEVIEDLDDQKK

SEQ ID NO: 148856 - protein, 340 aa, Heterodera glycines
RQRRRRKSERCRWLLALFLSVVFFAIYVLFYAFLSGRQHFGTDYFSDGSIQILLSLWHNVPSLFPKSAPEGQPGENGAAVTLTGEEAAEGRRQMSYWFMNVKASDKMSLDRAVPDVRPNACRSLSYDLANLPSASVVIVFTDEPTSVLLRTVHSVFNRSPVFNRSPMSLLREVVLVDDFSQREELKAPLVELKAPLVAHLRRFGSRVRLFRANERLGLIRAKIVGAKYARGDVVVFLDSHCETSPGWLEPLLHRIKDKRSAVVCPVIDMISDSSMQYSGGSAAGIGTFWWSLHFKMDPIPERVAKMWSLHFKMDPIPERVAKMRKHADHLDSPTMAGGLF

SEQ ID NO: 148857 - protein, 868 aa, Heterodera glycines
MAAPECYEKFFECLQVRIGQLNEANDKEVGKMICTFPEIFALSDDDWKQTNLVEHQINTAENSPVKMKMRLVPYAYREKIAEMLQNYLARGIIRPSMSPWASPIVIVPKRDGTLRFCVDYRGLNSITRKDSFPLPNIDNTLLMLGGQKFFSTLDFMSGYWQIRMDENSIEKTAFSTEYGLYEFTVMPFGLTNAVATFQRFMSRLFEGMINDFLFVYIDDILIASKSFDEHLKHLEAVFSRVKAAELKLKFEKCNFCTTELPFLGHILTREGIKMDADKLKPVMDLPMPTTKKQLHSLLGFLTYYRKFIHSFGTIAAPLFKLISEKAEFKIGEQEKQAIEELKSKIIRDVVLHFPDFDAAQNDLTRQFIIMTDACKTGIAAILCQPDPEKQIRPIYFASRQCNVHESRYSATELEALAVRFGVKKFAQFITMIPTRVITDHKALIWMFRSKNETGNSRVDRWLLELSSRFILKVEFQPGKKNIIADVLSRSGKSNESVTESLQEEDIAFIGKVRVFELSNNVEDFNEHREKWIEETKNSEMRPIYEFLEKKIMPADPRIRQSTMDKCHRFVLIEKFLHLCENDGKLRLFVPLSFRENLVKERHEGKCSGHMSAKKLYKQLAELYFWPNMFSDCIHAHNACRICAHTRNARSNEPPLKVVHSSEPLELVCMDILDVGPSQSNFKYICVIIDHFTKYLVAEPIPNKSADSVAKVFVEKFLLIFGTPKKIHSDKGKEFMNTIFKKISEILGFERSFTAGYDPQANGLAERVNGVLIQILKKSTASNWTWDERLPYSVFAYNITPSESTGFSPFLLMFGTSAHIPMDKITEMKFNPLYTIDYENYFQFVFGNLLNIQNDGQQNLDEYRKRSKD

SEQ ID NO: 148858 - protein, 229 aa, Heterodera glycines
EVFTANQDGQGPCGYSTSQVALETAGAASSTPQQQVPTAGGPPGAAGSPYPPNTVGCPPVGPGNQFPPYTKTPQHSLFPHYFGNGASSTLPRPLFSSSLWGASTFYVCLLISLFVPQIPNSLMLHHNDQIVEIDSKYLSCDPINNKVPVEDDEQEEEEDEEEEEEQGGYYCKFSVCLEQQEGNKCVSKALDFGEMGGARDKDKSGPIDERNDNAKKRITDQEYSGLTDQ

SEQ ID NO: 148859 - protein, 66 aa, Heterodera glycines
MVAELEKKSNNECKGKPIYCACDPLHFDHIMTGMCCDKTTSCECCSKLFLDTTTKTRKTVKHMYVN

SEQ ID NO: 148860 - protein, 135 aa, Heterodera glycines
MNREMFARVTEFIHLTVNISVIVISWRTQWCVIHAANISTEALGRKNIHATVAQRTRELQNYQSFSNLQNGVKTTSANWRPQSIILKEMKTITSHAISKKEKRRQNVAMKIMRFQLLNPLSGEKQARWNMLVLLL

SEQ ID NO: 148861 - protein, 128 aa, Heterodera glycines
MIGFLRLIISLCAMRNVLSIKRISAVGKPMPWHLFVSQECKEEAQVVCTECGWANCVPSEYNNEPNDVTCCPHVRKRPGSINRHGKPFFYPPDLELRDQSDLGFCCPTNYVFKCCTLVHIKTVFAYER

SEQ ID NO: 148862 - protein, 87 aa, Heterodera glycines
MAKIGKAYGNDISREITTAEEFAVRIAKDRRDQLCFRRGIQLKMEAEESKAGDGDFLRFARPSSPARLKAASPHFPMFAEHEHSQRE

SEQ ID NO: 148863 - protein, 48 aa, Heterodera glycines
MKGTHLRRKKVSGKAINGPLVKMQLAMVAVDPTDGKAFVEADEPFPFK

SEQ ID NO: 148864 - protein, 215 aa, Heterodera glycines
MQQMMQSATTPVLSTGGGGLGNTQFLYERQSALGSGTMGRGTGGEVAVASQFTTTLQQPQQQRSLVQPQQQQQLQQAVTSGTPLQGSQFQCPRRPNHGTEGRAILLRANHFKVKIPGGFIHYYNVDIQPDKCPRKVNREIVNRMVESFGKIFNGINPVFDGKKSMYSKDPLPIGHDRVELEVVMPGDSAVDRKFKVAIKVIIIHYGCSIYLLCAC

SEQ ID NO: 148865 - protein, 232 aa, Heterodera glycines
MKRTNASNITPPRAKRAMPPALDLDQNTATLEEQERQRTLVFIGLPESNAIRPSERVQEDREAITKILDHLEVEAQPTAVFRLGRYDPQRTTPRPLKVVMPTPTHQHVVLGGWKRERARLRSQQNLNRLFVRPALSKEQLKEEYEARLRKRQQNPAPPAPPTQLPKTTNDQTPDVAKGPNQNEASEDVSKPPDVFDQTILACYEALISLPPTDKIIHQIQSLKKQYPHLFNK

SEQ ID NO: 148866 - protein, 201 aa, Heterodera glycines
MKRTNASNITPPRAKRAMPPALDLDQNTATLEEQERQRTLVFIGLPESNAIRPSERVQEDREAITKILDHLEVEAQPTAVFRLGRYDPQRTTPRPLKVVMPTPTHQHVVLGGWKRERARLRSQQNLNRLFVRPALSKEQLKEEYEARLRKRQQNPAPPAPPTQLPKTTNDQTPDVAKGPNQNEASEDVSKPPDVFDQTILA

SEQ ID NO: 148867 - protein, 54 aa, Heterodera glycines
ESIGNMFMGVFRVADHEYDLHWTNFESRTRIRTKSLKLKILKILTLVPKLIKTC

SEQ ID NO: 148868 - protein, 414 aa, Heterodera glycines
MVVGRHTFVADGQNATAQQQHHHHQQHQQKPINNMPTGKNVILQSADESAADTAFLQELFMKHVPAAQPSPPMPNAVVAVCQNEMPKMAVMVKQEEPEVVEMDQQHHQQQQLKWKANNTNNQNNNNGTTTGNELSNGTSQVYLSYNQINCLENVHRLLKSQSSNGSAADGEPCGGGKMPADSAPPSQPLPPSQLVPSASPPYATTVAAAATTPSAGGGVGTALTRELLQLHDQRWEERCRAHWRRRLSQQTTTVVAASPRCHQTQQQQKQKRPLSQEQPGNFASRSPPGVADWHHHPQQHHHHVAKLARCRSEQRRSAWPMQAAVAQFEDELSPLHAVPPSAAGAVVAHNEQPPCGGALPPTELIALIAAVLQNVPPPSPPAETAKIGIVASPPIMNDSNGTPLGLHPQLLDQL

SEQ ID NO: 148869 - protein, 45 aa, Heterodera glycines
SEDAKIKKMSHNRDLYYLMYCTFVCIYHLLCIITLFPSVFRNKLN

SEQ ID NO: 148870 - protein, 83 aa, Heterodera glycines
MSDMSAYMGSGPAEPAPSSGAAEASSSSGVASAYMGSGPAEPAPSSGAAEASPSSGVASAYMGASPAYEPPAPEKSPDQSAYM

SEQ ID NO: 148871 - protein, 184 aa, Heterodera glycines
MPFATLPEQNQPNFGGCENAFIQQQQLTENADLSSIPPPTPQSHQKFGSGSGGTLSETGNQLPRSTGHKRIKKTKPKGEELAKKAKENVPPPFGPPNQLPQQTIGYVPPATEPNNFFPNPNLAWLQALAYARMNPGAGTSTSAYIGGTMPTTVWQQMPYSAADGMPSSTAANHHPMTNIQSASN

SEQ ID NO: 148872 - protein, 315 aa, Heterodera glycines
MQQMRKSRTLGDRVQDKWRQQKFVKTESRPWKGSNRVKQIQLQCGAKPLAISSLEQKSAKTVTVPPSFIQLKVHEGNADFELDSGADVSIISSQDWSHIGKPELKQCQGLMASGGIPIEGVLGMANPGVQPKRCKARPVPFALKAEVEKILDQWVQQGVLEPMNNSDWATPLVIVPKPNGKIRLCCDYKVTVNQWLDVHQYPLPRPDDLFSVLNGGQKFSKVDLKDAYLQLMLDDEAKKCLAVCTHKGLFQFTRLPFGVASAPAIFQQVMDEILQGIEGVAVYLDDILITAPTQAEHLCRITQVLQRLKANGPES

SEQ ID NO: 148873 - protein, 85 aa, Heterodera glycines
MGREGKGKALYYSPGTPTSSYAEGQKSRDGGEATSEAPTMLGGKPNAAEKCARSQLIAAPFPFIGGNASGVTTLLIKEVWTLGTS

SEQ ID NO: 148874 - protein, 326 aa, Heterodera glycines
YESKQIERIEMLPQSITEMIFDKVGKDGSSKIDKDGLQTILSNGTGRAFNPDTCRLLIALFDFNRNGVIDRNEFGPLWKHPSPLFPVAILSTQCTKMNRNNLKRFQIKPLSAESKGSEEQPTSRTKTLSEVKEFDSAGTFFLRAKLVSVLFCIYKSCPMRSKGIPCRKKLDSEDFCVSCVHRAKKPSRNLYLRVVLQDCDDEECEQETTAFSYAAINFLSIASVEAFYNLSENAPNKLESILQSKIDQPVLVKVNIKENNDTAKLDWIISSISVEKPVSVKLLDDKNNDDGVEEEASSSEPPKKRTKNNQVERAIDEDADDIHTIE

SEQ ID NO: 148875 - protein, 86 aa, Heterodera glycines
MKRTASVTASKEMESCKKEESIGTGCRKGVKRRYPYPLLSARSQDAWSAKLDQLEEKYSKMQEELSEDSDDAINFFEDSIEDIVEK

SEQ ID NO: 148876 - protein, 1408 aa, Heterodera glycines
DMSSNRKRTAAENNCKQSKPKQPKWDFRSMVYFEQYPTEPQLEEETTQQQQSSSEATNQTGMGDRSSDSDGGQQQLPLYKEITNHSHTIERFSVQRHVTEFVLNAQHEQPDEALRQAFDELIARAIQNAEKGSGRTVSKLGIMVTGKGLNDPVVLPIRSPLQNNVDVVMAELDKLGQSEGDEGGANKKTLLLSEPVEIVVTCLTPPAGSAPRLHKYQNWGYDEAQRIRIHNVDNYCLFHALAAGRAYHDHDIFCSNPNSTNSPFFSNIKKRRDFCKNYEAFNRLVSNNERMRTVAEELMNASGIQIGQTSYGIEHLQHVQQYWDNVFPGTYRIVLFEDRPEELPRPIWKGAGGHRFNVTLFLSDNHYDAIKKIHCFFKLGRKYCVDCECTYTLDAKHTFHCKSRCPQCAKVGPEQPCSKQQGIQILCPECNRYFFSQTCYENHRGSTCRVIKRCSLCNRTHWSDTGEIHKCYTSYCKRCKVYHAEKTSCFIKRIQIPKEKQRYRIIVWDTETRLEQLEDECQRIHRVNFLSARITCTDCCESSESNNDCEICCQNNRVLEREKEWWDVIEKINLNSDNRSEAYGNEQPVAAFVEWILRAWNKKFKTYIWAHNASRFDGHFALNHLCKTARRPDVVMNGLKIFEFRVQYSRKHSMLIWRDSCLIMPIALAELKKTFNLDCEDKPFFPYAFNRRENYTIRLENLPDESEYEPGTMKADKYEKFKKWYNDNKETPFFLPDELRAYCLNDTEILLKALVKFRQILMNEITDGFDVLPISCTIASACMNIFKVQFMQEDQIAMVPELGYERNDRASVIAIKYLDWRAKSEGIEIQHAGNGREKRWKQFKLDGWIERQQRCIEVLGCYWHGCEKCFKPNEELVDGKTCRELNETTHDRLRQLREPDDNGICLQVEEVWECEINDQLKKNDEMKEFFDDLGNERGPLDPRLAYCGGRTGPLRLFAEPAEDEKISVFDIVSLYPWVNYDTDYPVGVPTVVHPSAEEMIVNWTKPEHLSYRGLYRVRVIPPRGLQIPVLPMKIDERLLFSCCHRCAALFRKSLTRCSHKCNHTDQQRAFTGNFTHIELEKALEMGYIVDRFWRAWHYTEWSDQIFKGYVRQFIRLKVESSGFPEGIETLEQKQEYIDEYRRIYGVDLDFGHIKKNPGLRFIAKLMLNSLWGKFSMRNQFGSNKVMTRPQEFYDLVFDHKTEISSIIPISDAAIRVMYKPKKNFITEHTSSNIVLSLWTTSRARLKLFDYMQQCYNTPGAELLYTDTDSVIVRHKRDLVPVQTGEFLGQMSEEYADYDILTFACGGAKQYALKMVHKQTKEITYVQKIRGITFDVNNSQALQFERFVHKVLNYGKEDEQNDAAVFNYKKIQPTKDSRIITRKQNKRYLPVCQKGIITENLDVLPFGYE

SEQ ID NO: 148877 - protein, 76 aa, Heterodera glycines
MSLLSALRVPYNCAIVRPATRKPFAFGCFADGQPRDNAFVATENAQKLCTRFAQRKEFDGFVVGTAQQFAMVSEKS

SEQ ID NO: 148878 - protein, 91 aa, Heterodera glycines
MATNDSVLPQRPNSTMNGNTSKWYSWPELSGGAICSEMFGCVGFMGNNQIPQFNKYWTDTYTLTSNGQRRKMEIIGKLAKIFHKSVGNAFG

SEQ ID NO: 148879 - protein, 247 aa, Heterodera glycines
MITEFADVLLCYLFPCCVVVVLNSVIASKVRRSEKCFHIGPSPTPSATKKSYCTLPTSASTGSTTAAAAVASASAIAPPRRQHYASPKAMTTVVGGGASPSADADERPAMRKLSTRTAPGNVPVGARTAGGSSSGNPAGTTRILLVVPVVYILLNTPFYMFRILDTVALNVFNSTMFQYDGLNRNPVLAWCYNVAHYLYYVNFACDVIVYAFSRLKLSLGIRFLKILGPGMPCIKCQIGRTFTGANE

SEQ ID NO: 148880 - protein, 151 aa, Heterodera glycines
SIELETIVVEAVTGRGVHSPHVFCFCYDCSQKPNNYIIRIGLNEVDELPTPGQWVRVVMKQEVHGKRVDYSLWEAQNMSKAKHETDFTIDNGIRTVLVRVPLKVSGDGFYNQFLGPVSDIKRRLKIPTGKERRFVSAWCRKVMPLSICTMD

SEQ ID NO: 148881 - protein, 240 aa, Heterodera glycines
FVGSRYRSQPTTTEGQLAKGTTPPMPQTSQQQQIQQVEGPMTISKPNQHHNANTGGHRANASLSPALGSSGFGSSASSNASAQVERDLIDLFDEKCSIGPPLKWTPSPPPLQQHQFSGVMYPHTGVIASMDLKSRGYYVYSNEFDNELYLLTEELLEKGSWIKFNILDDYYRLTIGQYALLKKSPFDVRVERNTIYMCVSAYITPEALTQRTIDTSYVKNVYDRCRLLQHAHVGKELKLE

SEQ ID NO: 148882 - protein, 51 aa, Heterodera glycines
  unsure (1)..(51): unsure at all Xaa locations
FQTAQCCAPLNVGLFKLEFRSIGRXGKEERKHTGILKVVLLSCGSSIGGSS

SEQ ID NO: 148883 - protein, 104 aa, Heterodera glycines
MADPPALSRDRPRSVVSNIEHGVVLHHRLPHATNTAGQPSPLHHAQAVAATPPPPSSSAVASALFHHHRSPQNVTSSNSASSLMTMAAMMHHQQQRQQQQQNSG

SEQ ID NO: 148884 - protein, 173 aa, Heterodera glycines
MANNSSLSSPLPPADKSCIDIETALFGSNYLVIHIQLFLLGVVLIAICSLIHKYNKNCIPIHKNLKVKVSFISMDYTLLLVNTIILYIINSLVWIVFFLRYRIQMFTYKHPCDFLSPVWMVPMFLGPPKLYSIAYPCFHFAIAFERIRSTFLAKRYERMGTQSTVIIIWIIVS

SEQ ID NO: 148885 - protein, 89 aa, Heterodera glycines
MNIKFFFKIHTKIKSFLNFNYLTNDRFTVLPCGAPLQYDGHDNRQWPRRKRHFGKRYHLWTRDRNQNRFTKANMDKTQESIISIALSLP

SEQ ID NO: 148886 - protein, 60 aa, Heterodera glycines
MQETHIVLGIASLCSLLAIIVTVVTLPSLYSEMSQLNNKVRDGVQAFRVNTDSAWTDLMD

SEQ ID NO: 148887 - protein, 59 aa, Heterodera glycines
MLLYLVALALLCHLCGKTSNIYWAFVRTAIFAMFAIIGANWQPKSRRPLALCGRVERTL

SEQ ID NO: 148888 - protein, 44 aa, Heterodera glycines
VVDVQNYVMEKHPFSGQFHEHAQKVVIPNIRRLIETARQLKIEV

SEQ ID NO: 148889 - protein, 123 aa, Heterodera glycines
MTESRCRICISAAHDKEMLDRVLDAIDEVGDISATKHSHRTHRYRQLDVKCLGNASEFRLFGGTNAFINQNQLKIPATEERVRTKCCAEGCSLEEMKEEMCCMTDACLRRCYPGKGYRLGSVY

SEQ ID NO: 148890 - protein, 19 aa, Heterodera glycines
MFFIDIRQFEEKMVYLVIQ

SEQ ID NO: 148891 - protein, 145 aa, Heterodera glycines
MLENRVGRVRVFGQKSGPEKRGPSPSFSTGYPGMGPGQVPEPGQPLYFNKKFAFCCTKMQFPQRKTESESVDVGLVLTEALSNGAEPFKVPIVPFYALRDTKPGEEELSMDYGTYNILGSQGRSSEERNWKSETETTQNYRKIEN

SEQ ID NO: 148892 - protein, 48 aa, Heterodera glycines
MCSDKQLPEHKSKKYEYIIQAMYGIFIDNIKAWILIYLNFIAYLSVRH

SEQ ID NO: 148893 - protein, 41 aa, Heterodera glycines
IFYRFLNVWIFFRLTKTSSNLALSILIQIAPNFFYSLTRPN

SEQ ID NO: 148894 - protein, 48 aa, Heterodera glycines
MNVIEKEEKKKWRRSPHQCFERCIRAPTSKNDDELWCGSVVTDQSGDR

SEQ ID NO: 148895 - protein, 34 aa, Heterodera glycines
MAATDASLLSFASTAGTKAFVAAAVLKKAFRPKL

SEQ ID NO: 148896 - protein, 145 aa, Heterodera glycines
MEDVDRDELSAAASQTGAADQHASTAENPTTVVPQPSYSVGTTAATAATTADAAAGDNSSSSPFSPVAVELTASQPKLPEAAEPFPSSSSDNAPRVAAAAQRSPSAAAADSDGNINMNNEAKNTHAVGELDLKSDRELAKLMRRT

SEQ ID NO: 148897 - protein, 103 aa, Heterodera glycines
MLNQKDNFTLKELKNQTDEEKQLFQLINEDKIEETEELVKSGKVRVNSLDNSGMNALDHACFKGNEALVEFLLENGSDSDNRAHSDGYTALMFAALAGVATSY

SEQ ID NO: 148898 - protein, 15 aa, Heterodera glycines
MGIVLELQLCTWKSV

SEQ ID NO: 148899 - protein, 166 aa, Heterodera glycines
FCASKVAAGGDILNARVQKGPKGLGFTLIGNDGTNLHDEFIQVKTIIANGPAAAEGTLRSGDVLVMVNDRCMLGASQDDACQVFRAINVGEFVRIQVCRGYPLQMDPTNRIFTENIFTENVYAAASSREQHVVELREQHVVELCKGQKGFGFTVYDDLNSFNLKII

SEQ ID NO: 148900 - protein, 131 aa, Heterodera glycines
MEAFNPDTKICFKIDQFSTFFQQRTDTKKRYPNTLNNGQFEIKCHLSSVDIRDEAHGALSPIGIRKAFRIALECRGHYCQWSFPVEVASTTDDFGNGPYNSTETRPVTIRLSIPILKFRTRRDCIETLLVI

SEQ ID NO: 148901 - protein, 362 aa, Heterodera glycines
SQLAIYSFCICWPFFFMFPKHMGVQLKVMEGKLRTVDLVIEVHDARVALTGRRVALTGRNPSFGAKLYSVRPHILVFNKMDLINMKRYKEPIEEYYRNEQNITNICWTNCKNLTNKTLQNLMDKMLDLLRNEHRFNRNSEEEYPVMVVGIPNTGKSSLINALRNVNLDFGKAVKEGARPGVTIRVQNRVRILDRPPTDRPPTYLMDTPGVLNPWANNIDAAMKLAICANNIDAAMKLAICNLVLDTTTRPNFVADYLLYFMNKYRDFSYVDFLRIREPSDYRDFSYVDFLRIREPSDDIKQVLIAVSKLRNCMSNSYKVPGIEVTWDLHSAALQFLNLFRKYAKDPFLDRDLLCYNTFLKNL

SEQ ID NO: 148902 - protein, 78 aa, Heterodera glycines
FSKNFYILWYTGHYFLSALLYSIFLGPFAVDRFYLGYSAIAVGKLMTLGGLGVWWLVDIFLLLFGHLKPADESEWQPF

SEQ ID NO: 148903 - protein, 157 aa, Heterodera glycines
MNDGSCNHMQCVLCHAEFCWLCLKQINELHYLSPTGCTFWGKKPWTRKKKLLWQIGTLIGAPLGIALIAGLAVPGIICGVPIFVGRFPIFYLQNCNCFFSTRRKVYQRFENLSKMRRRFVTALAVFGSLIVSPVLAVLSVGVGVPVMLAYVYGVVPL

SEQ ID NO: 148904 - protein, 121 aa, Heterodera glycines
MESDKQKMVPLTDSGTEKDGGGCSASGHRLTKSLCGKAADELRHAHTDGTDGGGGGGADRDHGTTSYCAVNIEKGDSSSSGTGCCGGGGMASIGKANGCVGNVMVADRLSIKSGASSTSSS

SEQ ID NO: 148905 - protein, 45 aa, Heterodera glycines
GFARQMRAGLELVEIGGVLSNVTDGAFPGLHLFAHTQIALGLGMG

SEQ ID NO: 148906 - protein, 89 aa, Heterodera glycines
MISSSNSSVGAGGSKCLKNLDIVMESADEGQALLQDNPNNTTTITSVSAADGIPDGEGTSSSSAEQQQPNRTDSAQAQHAQPSTTMLKM

SEQ ID NO: 148907 - protein, 51 aa, Heterodera glycines
MYHKKMPIEECEAAKQPSHKISATNTMQFRIRSAMRTSQGIRIDLTEIYYL

SEQ ID NO: 148908 - protein, 78 aa, Heterodera glycines
MKIVGEALIFSHWKCHFWAMALLCLSLLGQLCSETEAADDSAKMPFAQSVRRHFHPIGSGRPTIIQHGHNNFRDETVE

SEQ ID NO: 148909 - protein, 21 aa, Heterodera glycines
CSKLCRPIIERHMRRSLRMRG

SEQ ID NO: 148910 - protein, 210 aa, Heterodera glycines
MLPKSSHFASLSYCTNDVEILMPALVAFRREFFDISRRQEYVDGIDDKENHDGIDVLRECMTIAGACMRHFRTNQMPDAHLAIVPERGYDNAQNQSLLALRFFHWYAEQHGVEVQTAHSAGGEKRIGAYSLDGWIEAEGLHLARVQKVLSQRQHAAPQWEDRGGGARAGRQTPGLPAAASEPSGRLLGVRNPSDAGAEQRNAQVVFGLCG

SEQ ID NO: 148911 - protein, 272 aa, Heterodera glycines
MVAKTRGWPRWKFYDYLHSRRGQQGCLQRDALQLMQQIRVRAGLNAYDAEICVPAISALNPSVNCATLFTIPSGGASSNPTWRSRTTAGCRICGPHRTVAFCQRRFVDTHVNHQVVVADNPLVAFVHWLVFELPMSYDTYAYSHFGGRFDMVLVFRELFRIGFNPEMLRRGNKMYEMKVRKQKKRNPNVVFRDSFNLMPCSLAALVPSYGLEVEDKPFFPHMANRPENYGREIHPTPDDYLASGMMPSKRRQFDAWYAENRHHHLQLDEALA

SEQ ID NO: 148912 - protein, 322 aa, Heterodera glycines
MPCVSKNADMTQNELKILYSFRQQAYQANIAAENSVVNGSLTQSAQNKTKLSDIELNAGIIWNILRKLPRRNSTSPDNIPYILLKNCAEPITKILADIFRLALDSGQIPEIWRTSLVVPIFKKGEKTDPLNYRPVSLTSTVYRIFERILSSKILEFLNGIRFFDKEQFGFLKNRSTTTQILKTMDDIYNSLQKDQQIDIIYIDFVKAFDSVPIDLLLQKIKKIGIEGKIQNFLTNFLKNRSFKVKIGEVLSESFSIFSGVPQGSVLGPLLFLIFINDLPSFIANEASSVGIKMYADDVKLYYAHENDDKTEYFINSKMIFRI

SEQ ID NO: 148913 - protein, 24 aa, Heterodera glycines
MLNLSNRNEKKWSTTYFFNIKFEK

SEQ ID NO: 148914 - protein, 122 aa, Heterodera glycines
MKIFKSYYGMKLNGIFDCALFIFEFIVNYKFSRSVGTESSACYLTDPIIADHSALNRQCAISPIRSKIVAGNFHVFIQIIVHHYVVVRRDVLHHTHFHYLLVKIWKRFPSNHDLTVRWIRTR

SEQ ID NO: 148915 - protein, 135 aa, Heterodera glycines
MAWQTFTDKMKSLEKQSELYRVLLFYSKKNDTGFNVFNEIAPPEAEPIYNYFKKFIKEMKNEEEYQVNRLRPYEIDHTRGFSDRPRLKKYLENDQAIRRLVVAYDAKENKNDEDLISHIHALQYRLGMKGFEEWN

SEQ ID NO: 148916 - protein, 57 aa, Heterodera glycines
RDVPRFRFSHFAFRIIRIFWRFAFRFLARNATFTPLRIGLNSHKIFQNFTYKLANFQ

SEQ ID NO: 148917 - protein, 108 aa, Heterodera glycines
MNGAKYHEDPLQGRHEVWAPGSLGAGSSPHQRFGRRLSLRSTRGDCGTGDGDKYIAGNVTHEGRGSIAREEILNFYEDGTSPKEAECRGSWKWYWTSIADDISYLDMG

SEQ ID NO: 148918 - protein, 141 aa, Heterodera glycines
GFTDPTYRARRKYFADIAANYRHGEKIPRVEYTAEEIGTWRTIYNELINLYPIHACREFNYIFPLLQQNCGYAPDRIPQLQVSAIFFWHYLMELELILGCDFLKGILAAFFQKSRHRLENLAFFMPTKSVNLKILGIKNFF

SEQ ID NO: 148919 - protein, 25 aa, Heterodera glycines
CTGFTLRPVAGLLSSRDFLAGLAFR

SEQ ID NO: 148920 - protein, 155 aa, Heterodera glycines
MARSRQSIICTFYVRNPITNDGRVQWRKTQIGLVRPEGLKNFGRNAAAARRAGGFILERKSIEKPFNFIATKSGQFQSIQSVAITKVKAVEKPKCFPKCFFFFISEWSIENAQTQGNAEKEWQIKQSAEKLWKIKRIFEKWWKIKQSAEKWWKIK

SEQ ID NO: 148921 - protein, 24 aa, Heterodera glycines
MSDGRESAKTLKIQYGLLLNSCEF

SEQ ID NO: 148922 - protein, 86 aa, Heterodera glycines
MPFSLKCMSTRKLHFIFLIFGAAITFAISVLFTCILRRRCFLFKAFLRHNKKHHQKRGPSVSEKSHQKHRGAESTSLVQRGTRVKK

SEQ ID NO: 148923 - protein, 59 aa, Heterodera glycines
MKLCGCKCIASEEQNSTVATQAPLPHTFADFWAMVWQERSSVLVALTNIVESGLKKCDQ

SEQ ID NO: 148924 - protein, 181 aa, Heterodera glycines
MDFILLEFFVWIQNKTVGCTAITLCMKTKQYKKSEKPTHNAFCDGQRVPVMKRTASLNEQNNEICQILPNNYLAAIDKQRNKKAMLNEDKNAFLKAHGVRICSKPIEAEARRLYPPAIACLLAEEDKDQKNREHLEPNQNGDLNFCFTEYYESLQYTKPSNFPEKLKWVIVIIGESQQMCK

SEQ ID NO: 148925 - protein, 19 aa, Heterodera glycines
MKKVIVQNMAGAQPFRPQL

SEQ ID NO: 148926 - protein, 102 aa, Heterodera glycines
NFYDLLKDCAKHRGVVFTTPVVQNISHKEANSLELVRKSFEAHKKNNVRFLLLLAPGKDSANSIDVHYFFKLMEQQTVPQFITRNHYFGALPLKKTISEVGH

SEQ ID NO: 148927 - protein, 34 aa, Heterodera glycines
MNLKLGGINYGICASQAFMNARRSTEDIVGPNPI

SEQ ID NO: 148928 - protein, 281 aa, Heterodera glycines
GDDDDLLLCAVSRVRLVQFSKDTEEPMGITLKITEDGRCYVGRIMHGGLIHRQGTLHVDDEILEINGVSVANRNVEQLQRLLRDARGAVTFKIVPSYRSAPPACEIFCKAQFDYDPAQDDLIPCPSAGVPFRTGDILQVISKDDHNWWQARFVCHFPALGGSSNATATGNVNMAGLIPSPELQEWRTACLAMERARENSHCFMFSKKKSGNKYYTTKYLRKHSELFDGMEMISYEEVVRLASFRRKTLVLLGAHGVGRRHIKNTLIKLHPHRFAYPIPRKS

SEQ ID NO: 148929 - protein, 81 aa, Heterodera glycines
MVFRPKFICCRNQAQIVRKDEITYCRNHSFETNHCRKDIAPAGVGSQGFSTPSPVFLYAKNGIAEAANQVKNIFFVRSRPF

SEQ ID NO: 148930 - protein, 153 aa, Heterodera glycines
MASDGQAMAKWLFTPLQNNVPKMFNCSLHLNDGILPSNIEPFKAAFASASSSVNFIVVICFQLSFADSVVPFDLTNELTREQLALKRINNSHRFLLIRCPIARDESKWTKWEKEAIVWRFCDQWDRISTNTYYENAIGDGLLNATPGPSDQQK

SEQ ID NO: 148931 - protein, 107 aa, Heterodera glycines
MVFSTLLAFCLVSSFDSASAKAQSVNNSVRNDEIIEKGPTSSKNGLLNMCMDSGLISNGKAGDEAEMDGLVELLTELDEHDSVIQAALANPTKVVSVTRKFVVIAIP

SEQ ID NO: 148932 - protein, 174 aa, Heterodera glycines
MSDEIKELKAITLQILKNQTLMIAHLVNQARQNKPQQHVQPPLMLKQVKTEPCEPPSTVSKRKAPSAVEQPLKEISFINKNNGGCATVNKRRRMSAPNTAGMATKQNNTKGAHSEKDDEREGGLVQCVQFRLRRQRMRLPYQQVVLDNRENSEPLFLATLAQCYDRMSDSEKDE

SEQ ID NO: 148933 - protein, 154 aa, Heterodera glycines
SGPLSRKHNSFGRIMAWNYRMFFQFLFDYEIPHRPGQHLHCRWGFNSGSVFTGVVGITAPRYCVFGSTVTLAAKMENSGQQDRIQMALKSYQLLSEQFPEFRCIPRGGVRIEGVGTLLTYWLEGIDSGGMIKIRNLFYDLYTFFYLDSKKKPKW

SEQ ID NO: 148934 - protein, 219 aa, Heterodera glycines
MTSDLGTQVNRDLKRRIRVSGDFVPSVATLSAFTSPIDSHRPIASNTLRQAARLVFLLDVREGLYREEAEDGEDEGGRSFDMGEFNGVDDSRPSPVLFADCPFCGLLRCRPLPARGPNAESALYYNNFITDPNRPHSPQLFEQPKTRAESRQLIESGTDSQHVSPHMESTNERIPGVSRPPMNTGGWRRMEPMNETTVRGVNGGGGGGMRDPRAPPSYR

SEQ ID NO: 148935 - protein, 272 aa, Heterodera glycines
MPPRMAPPDTMMRFNTPRPAPMSLRLEPWQMFPSATPPQRMMAPTVPSHPQIQPMVPATTGGTMSQFSNKELLEDNRVGCSSAGGGRGGGTGRKGGGRGGGAGSKRKAGEFFEELTTSPMPPRMAPPDTMMRFNTPRPAPMSLRMAPRQMFPSATPPQRMMAPTVPSHPQIQPMVLGGGPDSKRFEQMSFRGICQRLGTLSKDAPEMVIDWAKNEICAHFSIPIRIFDNVEFTEKIKILYPMFKDVNTDELSTDCKFVSDICDEIERRKRMA

SEQ ID NO: 148936 - protein, 179 aa, Heterodera glycines
VLRPGRDAVHHRDGVEFGVRRQLQACPCPPVLLVRLPVRLSAGRLRLRPFRAQADGDRLRHSVLHVRSAAALLHLLPHVPVHPLLRRAADLAAYVLCMEITGTRYRAMVGSLLQAPWAVGYATLALIAYFCNSWQNIQLITAALHTVSICLICVLPESPRWLIVNNRVDEAERYIRKAC

SEQ ID NO: 148937 - protein, 53 aa, Heterodera glycines
  unsure (1)..(53): unsure at all Xaa locations
XVVEKISLSHFAFRIFAYFSFSHFAFFSFRIFSFANFAFRISLFIFQFGPSLV

SEQ ID NO: 148938 - protein, 472 aa, Heterodera glycines
AQLLEQIHWSDIDQQYRRNREQLKDLNFQKFCSESGFLRYFPSAPWLWEDRSSELDLFDCRNTEWYVDRSSELDLFDCRNTEWYVNAATASRNLVILLDTSGSMLGQRFEIARQTIEAILGTLSDNDFFNIINFSKQAILLEECDGFSKQAILLEECDGKLVQATLRNKKLLLSRLSNVSSEGKADYEMALHKAFMALMNISKYAGSDQQMGCQDMIMLITDGAPGFFRETFELFNPEKRVRFFSFVVGEEAKDFVRFFSFVVGEEAKDFEQVRWMACANRGFMAHISSMADVQEEQVRWMACANRGFMAHISSMADVQEKVQQYVRILSRTVSRQKAASEDSPFWSGATRERMVSRRRETSGGKGREKRVLSSNGLVTLRNNFAKSLQQSDDFIVSVSFPVVLPDGQFMGVSSVTVPLFELSQLAHPSRVGARSHFVLLDGSGYALIHPQLRPMDICAAFKKFFQLYLIKL

SEQ ID NO: 148939 - protein, 223 aa, Heterodera glycines
MDVYVALNSGAIIDCFHDQKNGLASLNGRSGLSASKEPAIRRAKRPPSGEQRARRQASKEPAIRRAKRPTSGEQSARRQASKAPAVRRAKRPPSGEQSARRRASKRPPSGEQSARRQASKAPAVGRASARRQASKAPAVRRAKRPPSGEQAPAVWRAKRPPSGEQSARHQASKAPAVWRAKRPPSGEQSARRQASKAPAVRRAKRPPSGEQSARRQANKRQCP

SEQ ID NO: 148940 - protein, 257 aa, Heterodera glycines
MDLPSSSGTVELFDRGLAFSVQERYGLQTAATLRQKDNQFLTTSHAFAPTEISADALFKSVVATATVQPQQKSPPSSSLSSASPQQQQQQQSSFLASAPPPPQHRPHQFIDCEGRLTTHLIIDEGEELEEQQHQNQQYSPISDNPFEGVSQSGTEIQIAGLMTSILKRIPSTSGSSTSSKSGHEIRKHVRELYAELGEKNEQQRERAKNAIETKNEGGRKRSTAETDKIKKKVIQHLKYKHSHECSLCNSIHAAYQK

SEQ ID NO: 148941 - protein, 49 aa, Heterodera glycines
LNFNSFNCIPTAPASNCAQFPSELLYQKHFKIITVPWRVGEAALECRIL

SEQ ID NO: 148942 - protein, 279 aa, Heterodera glycines
MCAKHQAWLKKNGGKNEKAANNVRVGRVFLVKSENQRKNGIIDVPIDVNGTKVDFIADLGTEGTVLCEDTVRQIGALKLSRCQERAQYHDGTTRPFVGKGKTTFSFGDRSCYGHFFVSKDGSKNLLGLDMMDRLGLSDSIRNGLKDKFRTEASKENGASQKKKKKFFRKDGRGKKKNFFAVGANVIASLGDEPWRAGRVISRKEGTYDVQFLDGTTGEFPAKGVQPYKPDEDENLNFLLDGFGLKRASSGGSIGKHGSDGRRDQTKDDLREASDCGHKA

SEQ ID NO: 148943 - protein, 251 aa, Heterodera glycines
  unsure (1)..(251): unsure at all Xaa locations
ERFNFALDCAAPQLADEAKVKLLMTKLSEVAFSQYSKSCLPKKVIDFDYSQTEERLKIAFSRPQSIWIDRYECLRASKSEDESFRPFINRHKRLLRDFQFEKLNEEQFSCLMLLTALKSPKDAELRKRILSKLAADGDLVEYDGVVEDLQMYQSTIAEAKVLEQQPMGSRNLMATKLKAXRNERTDLSSNASSISTGTRSSNRSQRVCWRCGLSHSSRNCRHEKTVCRKCKKSGHLERMCAKHQAWLKKNG

SEQ ID NO: 148944 - protein, 236 aa, Heterodera glycines
MGDAIQQLTAAIQQLLANQNGAPAANAHALPTLPTIDCFEPSDDRSISDWLERFNFALDCAAPQLADEAKVKLLMTKLSEVAFSQYSKSCLPKKVIDFDYSQTEERLKIAFSRPQSIWIDRYECLRASKSEDESFRPFINRHKRLLRDFQFEKLNEEQFSCLMLLTALKSPKDAELRKRILSKLAADGDLVEYDGVVEDLQMYQSTIAEAKVLEQQPMGSRNLMATKLKAKKKRTN

SEQ ID NO: 148945 - protein, 205 aa, Heterodera glycines
MADVEMQEQSVPLKNAEQQQPTQQQQMTTEGTETTATTTTVTTTVTAPGTGVAVPQQGEEAPPASKSKEKKGGGWFAKKKTQKSPHDGGDEESEKLVSSDKKAKNLAAAAAGDGGGGDEKEAAAAETNNVKDEAKKMKKDSSNGTKQQQQRAKCPFSLCRGARKVEEVGHAEQHTTASQWGEREPTPTTTFRFDLVQRDSAKLQE

SEQ ID NO: 148946 - protein, 123 aa, Heterodera glycines
MCEHPREGQRQMKRIKLCADVCYDVLAFFGPVMLGLGIALVSGKFNAVADHLLRRKLWTVGHIQIRRAKDGIDWMLDIVKDYQDAQKAVTFPVAVSPLPLGITDFKSIQIKWNILVHSYEKQI

SEQ ID NO: 148947 - protein, 60 aa, Heterodera glycines
MMNRTMFRPGVQELFGHPERSEINANDNDEDAELLSVSEASVASDESEEEFEDDSGGFVV

SEQ ID NO: 148948 - protein, 23 aa, Heterodera glycines
IGQQQTATVWTGATVDDGTDDAQ

SEQ ID NO: 148949 - protein, 72 aa, Heterodera glycines
TNVVTNFIAGGVGGSCAVITGHPFDTVKVRLQTMPKPAPGQPPLFAGAMDCVRQTMAREGFFVRFSGGALPP

SEQ ID NO: 148950 - protein, 35 aa, Heterodera glycines
MTKLMQGGAGFELCRSEFASQYGKTIKQQNTKTNA

SEQ ID NO: 148951 - protein, 90 aa, Heterodera glycines
MATSSTGNVKWYEYHMTAMSCRALTSCQKFKMNANGKRYTVRSKYIRDRAGPDPVPDFSGSGNPVRRFWEKSGLTGLPDYERPDPESGHF

SEQ ID NO: 148952 - protein, 25 aa, Heterodera glycines
MDGRKFDQFEQCQHSFEWRKLHLKF

SEQ ID NO: 148953 - protein, 206 aa, Heterodera glycines
MSQKSISGFISKITFEQSSSTQNFDEQISSAEEAISDLAVSVSSDEFWIAELKQTLKELEGDWFNRKNVDEKWTAIFKNPNFVLLKSLVSAILSIFPSNAVCESVFSVLKKIKTDERNSIGIPLLNSLISIKFNSKISCLNVHNYFLSLANLLKQTEISKIRRTGTGSIKDRYNSRSRTTLFESNQMPPWTRPRFPNSPDRTGLVF

SEQ ID NO: 148954 - protein, 120 aa, Heterodera glycines
MTKKLRAMEVSWALGAAFHLLNTYHDNMKRERHGRRHSREELEQRRRAVEEREAAADARIAELANSRNLLKSALPAWLLPRQPLTNRYGLFNLLTDHDDDAWNGFFDAYVRQYVGVRRRP

SEQ ID NO: 148955 - protein, 84 aa, Heterodera glycines
MFKKGAAKNMHEKWSKYANKLVKYAPNMHKITKYAPNMHKKHETEGCKFPVKTVKTRDFGVLSCPLPGPGPVALYIIEYSSGTI

SEQ ID NO: 148956 - protein, 341 aa, Heterodera glycines
MVPESEYLTLINLLKRGTTTSGPYESERAELDTDIQKNLADHKRGADVQMKRHSWLYKQRRQLKDLAENRPQKVVIENLAAIPPNIAPYMGIQAPSAKAKLETKVKKASDNEQQKTNSFYNRLTAAGDERKRRSRKRKLGKKMVMNTGDESDADNNSGDNADGSFYSSAKDDELEQTSYHKRKRAPSLLTQIDQTDPEHYEELKKIVEARLIKYGIDAKTGAILTNFNKPVAGSHYLNAIKYMTGQLNNKPKGHRFLIQRLNREKEILKFFPHLNQSQQSGEGIKRFRAKKKKFLALVRMQPPIKTPGLHRTAYAEKLHAKFPPKHQQQKFTFKPAIWAKL

SEQ ID NO: 148957 - protein, 179 aa, Heterodera glycines
MRALWRLARAFPGTLIRCICFYAAQALEIERLVAQQEIPDILVTTADATQGHESSLAVLVTTCSVFDSGADSQPFWADAARVDVAISRASHGMIIIGDLLLLNRTETWRRYLDQATTETTVVGPEYFDFEQFNNPDNYYDKDGQLISANGGAVRSEHFYSKYGKNVWYNNSVFLNLNLL

SEQ ID NO: 148958 - protein, 114 aa, Heterodera glycines
MDNLLLFPLQPQCRTRPLLAAIRKAIGAMANQTQCQQKQAELTILGGANSAPVRRLWCHHFHGRPPNARRAARTRRTPCDACALSAFAVGHPLALCRPLRVGSTVWPLGGPEIF

SEQ ID NO: 148959 - protein, 169 aa, Heterodera glycines
MQKPIIVNIIALANLGTGIKLNALMITECEFKYNPRKFNAAVIKCISPIKATALLWESGKMICLGTKSLIDCENAIKNFIEIIKGSGCPGASYTGHTVENIVSTFKFGREIELNEFRKNRRAFYEPEIFCGLNFKRGKSMTALIFWTVINYFIFYFLAIIRNTKYKSNW

SEQ ID NO: 148960 - protein, 125 aa, Heterodera glycines
MPPPLSQKNPITVQLKLTNSTDTCSDYSLEFTNTCFKLVDQVKFHVKVPKTSKLANHWGIVPLATDNGTADQQQLFTLPNNVHLYPGKSFASAGISVNGADRPEIVILDVQSVLCTEKHDDAATN

SEQ ID NO: 148961 - protein, 66 aa, Heterodera glycines
PKMVKKILLIFSNFLFFNFFTFQLIVSPIGSFPKGNKRLRERGVRCSNGRAGGGARGRARIRHKLR

SEQ ID NO: 148962 - protein, 143 aa, Heterodera glycines
MIGLILNEESCSFLRQSIAPTALLSCLKLHIIEGTELIPEFSRNDIGETTNENEINRWLVKHLTNTSTPKIYKCQTEDIAFNVSAFKTGKIHAPVDLNFIGVQNDEWSRICFLTDAFAFAADLKCLSRKTIFFIMYLFLFQHI

SEQ ID NO: 148963 - protein, 37 aa, Heterodera glycines
ALFVLYIFPTSFFILFFFFCYFFKLSPFLLLYKFILI

SEQ ID NO: 148964 - protein, 83 aa, Heterodera glycines
MSKQFLLLALLLLLLPLDTLQECVWNDEITLCVGLCSTGCGQLSQANCACAKRRKNKEKQKQQQKNKSVECDEDEKWIIILIK

SEQ ID NO: 148965 - protein, 200 aa, Heterodera glycines
MAVHGALLANFLSQGQVCSNASKVLVQRKVLEQFTHQIVHQTENMRIGDPLNESTHVGACISEQHMDKVRQFIRTAVDEDGAKLLTGGERVTTIQGLEHGYFLSPCVLTNITPKMTVYQQEIFGPVLLIIPFDDEQEALQMANDTEFGLAGGIFTKSVQDLARAHQFAARMNAGNVYINTYNDTHPNVPFGGFNQSGFSN

SEQ ID NO: 148966 - protein, 28 aa, Heterodera glycines
KMFKNSQLFFLGLKNALITNLNSDFENH

SEQ ID NO: 148967 - protein, 189 aa, Heterodera glycines
MEKIVYLKLFQIVLTLTIFWQLISLHQFCGFADPKTFLCHIRAGNTFLCHIRAGNCERYTLIGMDSETGEFGSMYNKLHNQLWMITNGRPIEEQQHQFMDELAAKLPPAGRHCIPITISPFEWIGKDINALNNDTLLYFSTQLFFSLVSLGVLGCIIHKINVKLKTSILQICRVQKCLSFRHTPLSFCW

SEQ ID NO: 148968 - protein, 77 aa, Heterodera glycines
MATLIVLHKHFGYLGYKANVKFLQQIKFCETQQIRWMLILGPEEIAKNSVKLRYIPAKDKGEEAHKEHLDLSNDIKD

SEQ ID NO: 148969 - protein, 27 aa, Heterodera glycines
MKQMFAKERKYKFIIKRENLKMDKKQF

SEQ ID NO: 148970 - protein, 92 aa, Heterodera glycines
MIWSIRLPDFWGFATWVPDIWGPDIWGPDIWGPDFWGPDIWGPDFWGSRHLGTRLLVTRHLGNPTFGDPKFGDRMSFGDPTFGDFIKTKKNI

SEQ ID NO: 148971 - protein, 138 aa, Heterodera glycines
MNKTTLKARFGSDIRKNWIHHSNDISLNDLVTKMQRYFDIKDANAIKLKYRDQESDWVTLADDDDLAYALASMELLYVDVIVEKYQFKQDEETVEKTAPPAEVVKAVAPPRDATPVDNGDVAQLQKQQRSSTTPVSSI

SEQ ID NO: 148972 - protein, 29 aa, Heterodera glycines
MDQIVTEFLSKLGMAKLYANCQRRNFNGK

SEQ ID NO: 148973 - protein, 443 aa, Heterodera glycines
RLNSLSLCTEFGFFWGFHTIHHSSEYYNFSTALRQAAIQAGLAAYDILQAFLAFLIPPSIFLVHRYFSEIFQFWMHTSLLGSLGPLGFVFNTPSHHRVHHGRNAYCIDRNFGGAYCIDRNFGGVLIIWDRMVLIIWDRMFRTFEAERKEEPPVYGLIRPERSFDQLWLQFHTLKELLCDKWFHTLKELLCDKWRLKDEKGQKVFPKWTDKVKALFFPPGWFPGTKIRHFFHWTSIRHFFHWTSLDDHSFGVPPVQLPVQKYDPSLSVWLKAYCLAHFLLLLCIFLHFEYDRAQLGYLDFTLKIAFFICTMQSFGAFFDKKWMQSFGAFFDKKWFAPFLEIFRSFGVFSYYFAPFLEIFRSFGVFSYYTTRTIIEHKKPQPNRIFIATLFVASAIVWVVVLLRHSFNLKCIKSIAIPFKVKKEAKAKVTAKDGKENRTIGKELR

SEQ ID NO: 148974 - protein, 545 aa, Heterodera glycines
MVAKTCNWPRWKFFDYVNDRKGQQGQLHHDAVELMQQVNAPMDLVGYDADTFVPHVVDYWNNTQRQHRFAVFIFGSLGQYKPLYKYIDNTYDTPLLLYFNEDHFDGVQKQGGLFGQPYCLECERPYDKMSRHNKSCKAHCVMCSRVGPQFPCQPTDGFVKECSKCYKRFRNYDCYQHHLHSNFCMRSKMCKDCGAVWDVADNKRNGRKGHVCGENYCGLCNNYHNTERGCYIQPIEPKQHTPYRIVAFDVETMQHTFIGESEQRNHLPNFIAAKVICPGCIENGDWQRGTKGCEVCGPNRTVAFCQRRFTETTVDKQVVADNPLEEFVDWLVFQLPLKYDTYVYSHFGGRFDMVLVFRELFRRGFNPSMLRKGNKLYEMKVGKQKKRNPNVVFRDSYNLMPCALAELVPSFGLDVEDKPFFPHMANQPDNYGKQIYPTPEDYLADGMMPDKRQKFNVWYEQHQHKPFLLDEALASYCTNDVEILKAALVAFRMEFFDVSRREEGIVAERAHEGIKRRNFGVHPKRRTSAHRHIQSLNSRPNNKIH

SEQ ID NO: 148975 - protein, 141 aa, Heterodera glycines
KQFGQRIIDFHAVQHQLADLAAVQHQLADLACDIEATRLLVYNAARLKESNLPYIKEAAISKLFSSNVATKVTSKCIELMGGVGFTKEFPIEKYYRDCKIGTIYEGTSNIQLNTIATIYEGTSNIQLNTIAKFIDSEYTQK

SEQ ID NO: 148976 - protein, 191 aa, Heterodera glycines
PATIKSNNGKAEMPMSFSSSSTSTLHSQPFKTLALPSDVELLAAKKQATKAHENSYLGAVLRGEKKMKRFVRSCGGQVWEDSSMAEWDPNDFRIFCGDLGNEVSDELLAKAFRKYPSFQKAKVVRDSRTNKSKGFGFVSFKHQDDFIRAMKEMDGKYVGNRPIKLRKSNWKERNLDIVKKKNKAKKKLGLL

SEQ ID NO: 148977 - protein, 144 aa, Heterodera glycines
MVQPVTAEDSIPEYMNVLGMVFSMMGLMMRLKWCSWVALICSCVSFANMRASDDTKQVVSSFMLSISAVPSGLEVLTDVAVISDKEAVPSSFVCLDFTVDTKERALKKKYLCARFTPRTDAIDAVTNLIVLARSRRPPKGYTLA

SEQ ID NO: 148978 - protein, 55 aa, Heterodera glycines
MADPKKAVCVLVGDADPSVKGMITFTQDKEGSPVSVQGEISGLEPGLHGFHVHGN

SEQ ID NO: 148979 - protein, 98 aa, Heterodera glycines
MQIILIEERLDSAHKRDKAAEFVMEKAEKEGEKAPIHSFKMSGHCDGEAVEKEEEEYGSKQVEYRSLAISRGCSPTFVTVLALCSSNLMGRAKTVAIR

SEQ ID NO: 148980 - protein, 131 aa, Heterodera glycines
MKILTSLSMLIFIISFGYFFAIVIRIISSLWKIANFAYITFLSSMFSAIAMAANAPVFSDYQNALRQHFPRLFKPQQRQMGGSNAFNNNNNNNNNNWATLSLAAVDRTTRVAPINVRGAAAETKRQGNGQN

SEQ ID NO: 148981 - protein, 60 aa, Heterodera glycines
NPHDFQKFRWWADPSPHTKFTAVNREKKVSTTLKNFLDFFSHKLKRVIIFNSINAFIKKC

SEQ ID NO: 148982 - protein, 218 aa, Heterodera glycines
AKNQVYITMISDLYLNDSSRNNNYAIFQRDGVPLAFVALIVIRFLIAIIGILFNASLLDLQGSCNFLIAFNAFCLVIFMPFMSISVFNHSLMPVQICFWWELVPMFFGNLFMVSTLAIAFDRLLSVLIPAWHTRHNKEFNYLGSLLTLCILYAGCIVYFCYTALPQLTADSPTVICLNPSDSYQGGIGTILFVVSLVVVTLCILCYAIIWVIGMALSQ

SEQ ID NO: 148983 - protein, 47 aa, Heterodera glycines
MTLISKCSLLLLFVAPFSHAFFSGFDDSIEFSISFWKTILFKCLFNE

SEQ ID NO: 148984 - protein, 185 aa, Heterodera glycines
MSSSSAKLDEFQNALPFGVFLNDFDGAALGIVAFEIHCAIGTNDVNTCKTMATEEKSRKLTTRGIQTSTTTRATPPKTKLKIVTPFKTETPRVPNLFTPRDSTVKHFGTNCVQIDFPAEIAQFSLNVSAALFGIACKQYLRKYKIGQLPKNYDEKMEIKDKMEACGKVPTETNCKKLKKWKLKLN

SEQ ID NO: 148985 - protein, 26 aa, Heterodera glycines
MIYPVEMDPEFFYSRLRLFWTLTSQR

SEQ ID NO: 148986 - protein, 39 aa, Heterodera glycines; identical to SEQ ID NO: 146413

SEQ ID NO: 148987 - protein, 154 aa, Heterodera glycines
MAAIRGYRFIAVMSSSYTIERFCNEANPEIHYRTTGPEIWHQTQGKVDICVFGIGTGGTFYAVEPAESAVLSGCRPEGAKHRIQGLGTGTVPAVLDTHMYKNGGGIVQVHSDDAIAMARRMAAEEGLLCDRLNSIRMRTKKRQQCATRKHLRKI

SEQ ID NO: 148988 - protein, 37 aa, Heterodera glycines
MICYNGAMPCVLSLKNVSLGFITNCLSILGPQPKKTN

SEQ ID NO: 148989 - protein, 152 aa, Heterodera glycines
MTVQQQQQPSSTAPHVPSSSASSSVATAPKRQFRPLAEYRKALEEFSAERQQQREVTFLRAFRIFTGRRGIPSLIMSDQGTNFMSGAIVIRDNWTDALVPEYMQQLMAPSGIPLDFQHSPRHLKRRDLGNTCRHHQIRTTKDSQQRTSHIVQ

SEQ ID NO: 148990 - protein, 96 aa, Heterodera glycines
VTTVTENGMRITGADEEEEAEKDAPIRVESNFIVSVDEMDEPLALKLERQNRTEKKEAIGENPNKTQRQIDEAHTESSEETEKQTKAKESEAQEKQ

SEQ ID NO: 148991 - protein, 113 aa, Heterodera glycines
MPIFYFLCFTFYTFMVVFEGSKVLHLEHIPFWLALLISIGVGFSAMLIYLFILRPKLIRWIKKTPMGLINWFIPRKDRKEDEDTLRLFSIVQVIKKHFVEYVILHLMMFDLIR

SEQ ID NO: 148992 - protein, 171 aa, Heterodera glycines
YRSMIFKIKINIIFFNFQKFHQFLWTVIAGFMCSFLLGFGMGANDVANAFGTLVGSKVLTLRKANIMATIMETAGAVLIMATIMETAGAVLVGYNVVDTVRKGIVEIELYRGAPQDLLVGQVAILGGCACWLLLATIFRLPISSTHAIIGSTLGFTLLMKGNAGIHWSMVI

SEQ ID NO: 148993 - protein, 15 aa, Heterodera glycines
MTNLALSHTTSPTDQ

SEQ ID NO: 148994 - protein, 31 aa, Heterodera glycines
MDLFLSSAEVEVVRFGGIFSKRLFIIKNYMQ

SEQ ID NO: 148995 - protein, 128 aa, Heterodera glycines
MTFKALRGISPCSNEKLKDEVRRQQKKEEEEEAKKVAKDNDGEGWSGIENRQTKRRMENIDTVVVPIIETEISEFVLCQFWHDSKALDKLSLIIGDEVEPAADHARISSGARSLAPPIGRRSRECAGF

SEQ ID NO: 148996 - protein, 404 aa, Heterodera glycines
MRDQILELERFPENATAQAMANKILHLKAIAQQLAKFTQAKFARGEAKLIDPLLLEHALKICHFCDNFLIGGESESGERVGKRLRHGIGLVKARVCQVQRLMDANLVEWNDIWQLLRNFSPTEGPMGGVDQLAKSLEQRIGTMIRQSNGSYYGKMPFTKAISQLAEVERDRSEDEAAKLVILFKIVLELIVGATQEMLRNIATDTLEANGATFYGTNFLIVFSNTTNETERQCQGLIGTSEVPNGQLMVRLFDGVRKEANEMFERRKTDICAQFKSIGKMLKTEMAQFRIELDKGLERHISKRHKLFNGKPKLRNTFELLKETQNVFMIVHNALDMVDLQYPKEMVKKKLEQLGRIMQQGIVANNTITSEDYEEHDEITNCLKTEEIEEQIEFEIYSMGFRTIF

SEQ ID NO: 148997 - protein, 92 aa, Heterodera glycines
MRLVQLLHLALLVQLLLAPVLLAVGQTDEKVKRIQKREGPPEANLVDKSAVPAEGNGMKIRRRRGTKLKAMAGGAAAGLGAALLYKAFKGKG

SEQ ID NO: 148998 - protein, 455 aa, Heterodera glycines
MADQQPISEDCLFLNVFAPHRSPSAEQNKTFPVLVVIHGGAYEIGSSARYTKYEVIGQRFVTDANSRGIVFVSIQYRLGVMGFATTGDEELPGNLGIWDQISALQFVKDNIAEFGGDPSRVTVFGYSAGSGSTALLSISPKSRGKEIEKRKAKLKKKGNPHRLDRELFPQDYPEMIATAPPKKMIMGFAELDFLLFSLISSKNNSISMLALTDEQIANYDQKAFEASVSEFVVKEKYFGNQTNEVKAEIVHFYVNEYLPAETVKDQKFFVLLYTTCQLTDQKPTFLISMPSRHSKNRAQQIWASDEIQKKGPAYHGFDHSLIFYDEFTKKSEEDRKMSEYLVTAIKNFVINGDPSTETIRWDQLTDFPSIERVEKVQHMRMEAKKTGMVDGMKAELRRARFWRELAKKYTNFDLVRGTFPEKSGQSAAFVPSAQFAQIFSIFAIVAIISLNNGIY

SEQ ID NO: 148999 - protein, 338 aa, Heterodera glycines
MKNLAKQFMYWPKIDLDIDRWVRNCEECALAAKAPPKVPLQPWPASTQVYERLHMDFAGPCADGNKYLVVVDSFSKWPEIIKMKSTEHLLIEHSHGIQQTFAPPFHPQSNGRAERFVDTLKRQMKKCARDDPHWVQNSLLAYRTTPNASLNGRTPAELFLGRPVRTVLSLIKPNSQKQKQGPVLNEQNSKMAKQFNKHHGARNRNFSIGDIVHFINYRGPSKMWLRGTIVSGKGVVWRIESPQLHAVVTRHANQIQKFDPIPYKENSDIDNQAQGEQQPETPNRSPRRVRFADEQNEPLEQIQPIEPRRSTRQRKAPQQLDMDVTKPKYDYVKQGKTN

SEQ ID NO: 149000 - protein, 39 aa, Heterodera glycines
PPIGLGLCGKMSPGGNIKGLRPSHRHGFVRETPVRNRAL

SEQ ID NO: 149001 - protein, 137 aa, Heterodera glycines
MDLPASVQRVVSRPDWHFLVQQMLPIFVPNIRHLELIGCGSIDMLFHISPTILSDLGIASVETSNLFPYEDWQNAIARKAVTEWLHIPRKDGRPKRLRCICFHHNPPIDIDVDEWINLFKEVWPQLQCHDNAYKGLD

SEQ ID NO: 149002 - protein, 64 aa, Heterodera glycines
MKRTLRKIWICNDVLMDILPFFDHAQLGLKLALISPHFDALVDTHFDGKSDLTIWRRITIWVII

SEQ ID NO: 149003 - protein, 25 aa, Heterodera glycines
RTLSTAVRQRSSKIYSMPQILWAGY

SEQ ID NO: 149004 - protein, 41 aa, Heterodera glycines
MNDYVEVLLFLMCWFCPICPLAKKLRERKEEEAENSGEMDE

SEQ ID NO: 149005 - protein, 27 aa, Heterodera glycines
MIINYMGEKEGKQCEGKEFRIKKESAR

SEQ ID NO: 149006 - protein, 161 aa, Heterodera glycines
MASTKTGFTKSGFWQLQIFLGSTPAFKEVDENGSAILPFLNANCAAHLLNLVVKEGLSADLDIEKLFVKCRKIVGHFKKSNKALGKLHEIQEFLEIPEHCLLQEVSTRWNSGLMMIERLYEQKKAINEYAYQNCDFGLTLTSDEWSILEELIAGILLKQNW

SEQ ID NO: 149007 - protein, 132 aa, Heterodera glycines
MDSTKPIVFLKVSLKGKPATVVGRVDTITSVLSEAFASKIGDIDSNLRGHVTLPTADVPVVGWVDDVSVALLNAEPYVFAQRFGVVADNHMIAFCERKVDGVFGADLLKRMGILNEEQIDAIPLASGDVPEE

SEQ ID NO: 149008 - protein, 17 aa, Heterodera glycines
MNSFNPNEKAVLHEVRI

SEQ ID NO: 149009 - protein, 296 aa, Heterodera glycines
SLITTHCSPLHVGVQSYRTKARYSNQELSKVETGGGEGVQVLRNEPFEGESLFNGQFSSGQYTHKIYHFDSKVPSKVPSLLRAIMPKGSMSVHEHAWNAYPYCKTELTNPDFMKDSFFIRIETIHLNDRGTTENALCLTTDMLSALCLTTDMLSKREVVRIDIANDKEFINAADIREDTKPSTFHSERTGRGPLLQSWQTNCEPVMCAYKLVTINFKWFGFQKLVETFVQKQYPRLFCKFHRELFCWMDRWYGLTLMEIRLIEEETQRELDEMRSTGNPAGMTAMRSTGNPAGMTA

SEQ ID NO: 149010 - protein, 24 aa, Heterodera glycines
LSPTLVIFGTLASHLSFFGTRGEN

SEQ ID NO: 149011 - protein, 92 aa, Heterodera glycines
MTFERGKTNFGCTRDNNFDYQLGTSYAATPRVRHRLTGTINSYMANHSWEDEIVRHHIFQFRRHSQIEGYAGKLKDLKILMIQLSMSRNEFY

SEQ ID NO: 149012 - protein, 79 aa, Heterodera glycines
IYAFSFQKFKFLAALGTIISTINSEQAMRLPLEFGTGSPAPSTLKLNKKIHLQHGRTKSFGTTFSNSAGTLKLRDMQEN

SEQ ID NO: 149013 - protein, 98 aa, Heterodera glycines
MMALIEFAFNSVAKHRQMFIYVSKVLDPHFDKVMPPVLAKGYLPFCCSQQQEVRNRITGNHTGNCDPEIGESVSPYDEALRKKSRLIFLYKILGFLIL

SEQ ID NO: 149014 - protein, 132 aa, Heterodera glycines
MSKYGMSMCVLGMHEEFRKDGIAVNALWPRTTIWTAATQMLTSGRGQRNSRKPEIIADAAYVILSKNSRDYTGNFAIDEEVLKEVGVKDFSQYANDPTAELFPDFFVPGVNYEKAIEAAFAAAMGEKKGKKV

SEQ ID NO: 149015 - protein, 112 aa, Heterodera glycines
MRKYKAEELSNANGNNDEGQSAQNGGEGIDYHSADKRQKIVIDFINQWAKLSIEAESSFFLVAYLRFLVVEVEKISQKGNLSGRDSVVALMANYDGWFGVWGHIFAYFDKNF

SEQ ID NO: 149016 - protein, 62 aa, Heterodera glycines
MLNTGKFLGKTFVITGASRGIGKEIALKLAKDGANIVICAKTTQGNPKLPGTIYSAAEEIEK

SEQ ID NO: 149017 - protein, 56 aa, Heterodera glycines
MGLRKVLTNEKQVLLKLEGYQQELNDIRVKADAVVKEKEVLEYQLTGQKRRGSKQR

SEQ ID NO: 149018 - protein, 171 aa, Heterodera glycines
PPEQQDAPPAPNIVLRQQSPPAQQHHRRDDRLNFDTPSPLLRQQRPLVQSPLVGQQPDTPVAPPSPNATLHQHPLGPPQQGHRTPAPKQQQRKHLVIYTPSEATTTAQIQTVLLLRNTSKTEAKRYDTERRSADWLSKLWFGRGEKRQKIDDDDPLRIVQLQILPLNSKGV

SEQ ID NO: 149019 - protein, 66 aa, Heterodera glycines
MVVQQECLVADPQAATAPTVFADAVAEKVYQSSACRHACGVVVPAVTADAKRCSAPEERLVVPVAL

SEQ ID NO: 149020 - protein, 196 aa, Heterodera glycines
MKETKANFVGQRTVEQRRQQLEGEVAALVKACGRLKRNAQKKDIAFKLKSLEMVKWPPAKAFDNPYIKQAYGRGTDHQFQKAATIAGRFRANFLGSSTARLASAAWYATRGVYYPIEDCPPIPADKDGYVPPEQPGLNADDQPVTLAKALQDPLFGPADREAIIGQQPTDEIASAFDAFAQKAGDFADQLRRRIEE

SEQ ID NO: 149021 - protein, 127 aa, Heterodera glycines
MPTRGASPANAAAINEAFGLHPFFVAFLMIQNLSDFFYNCLLANIPSLELLDEISKENALAKQHNEPQYELECFVSLGTGKAPTEPVGTTSLEIGIIGAIKNLAGILMDQASHSPGKKYGFPYNWNP

SEQ ID NO: 149022 - protein, 182 aa, Heterodera glycines
MTPGTSTPSTMLFIVPSPHKQTLHTKRGLNLTMLHLQMLLSANRDRQMPWPIHLCNFPSTSSADDGTGGADAGAVAEVHALCRMRLNTLDSTRCVTGELHTESYTEYIPKRKRLAPAEKNTVIRLRYDNIHTRNREMARIVEQRIPTTAAAAKVDQQQTTNGGGRSDQKMAVGMRFLSRIFG

SEQ ID NO: 149023 - protein, 87 aa, Heterodera glycines
MRLKTEQKKAQMQLMRSGGGDGTAMPKMEEEEDELEEELEEEEEEGRRTVEEEEEKEQRDEEEEKKGDEQRTATRKTKAFTIPFIST

SEQ ID NO: 149024 - protein, 49 aa, Heterodera glycines
MQVLYSFVLYYISRPDINEGGQLQGLAESVRCLLEVPIQMNYGIVFVLY

SEQ ID NO: 149025 - protein, 318 aa, Heterodera glycines
FDLSYGFSVMQIFGEEELLSVPFKYVVLFAVGCPLVAFLLCLFLSIFLHYEQVTNSLNVPNWLPSLSAAVSTFAPERYIWRLFIGLHGTPRFQFSPSFRNFLVTSSLWPFPFRPWYRWASKFACSLNLAEILSLILLSSVSSTEDHCEFCFLMTVLHALCFSGFTFFAHFYMFVSTVLHALCFSGFTFFAHFYMFVSIWLFDFSGRRRSSKIWLFDFSGRRRSSKLGELSFQYKVLCCVGSVLSLLFVLYFYYRHNRFCEPGVYTLFALSEYSLILFNILFHSTLYYDFHSRALTLNTAALSSVAGYDLLPLYSEKRT

SEQ ID NO: 149026 - protein, 133 aa, Heterodera glycines
MDLTRPTDQLANDRSNSSEAPQQQPFVVNVVASRPRSKTDPKNYDPKPLIVPPGAAADQRGPRRLSPVPCLCMARNSSPTGASPSQLVYQPRTVPSPSASLSPTDQKGWGTLKNSSDPSTINVPIKTSVCTAT

SEQ ID NO: 149027 - protein, 109 aa, Heterodera glycines
FIFRWFSHNSSLFLPKFPRFSSFSSFCCFTSIIIPRKLLGRWRRNARPMGEKKLGEDTAERAGRKRRRGRGSICVSFQRHRQISESALWHSLLNHYPFSHIAFLPPSTD

SEQ ID NO: 149028 - protein, 170 aa, Heterodera glycines
MAPLPLPHRPFSQPPRSPRATAQMATESQQQNREEEQQQQRQERHNTVPNSVSQQQQQTIRKLSASATSTIASANDFVCKFCGKRYAYASSLYVHTRLHTGERPFRYKCDGCGKGYAQKVGLNIHQEQCQNWLSRRSSVSTSAEKGEDDGMANEGQQTVPTRRASLQEAF

SEQ ID NO: 149029 - protein, 279 aa, Heterodera glycines
SCSALFSASSTNSCQNVSAQRDEDEFEGEEEMFEECYEEEEDDELVDVEGHDEETEMRGEMSVGGSDGGRANGHDDAGGDGAAKGSAVEKRHKCDVCGKAFPYLSILESHKRCHTGEKPFLCHFCDKRFAQKATLQVHERTHTGERPYKCKFCDKTFAQYGTKTVHEKSAHLGIRNYKCPHCDKDLSSPSALYTHKKTHGEKMFKCQHCPKTFTLKNYLKLHVKQVHEQNERKHSCRFCGKSFAYAGSLQVHLRTHTGERPYQCKFCPKAFASQGNQSH

SEQ ID NO: 149030 - protein, 136 aa, Heterodera glycines
MLTGMVKEHMARQHLRREQQEKLKNEAIVAAHELTEALVDHLNHRVSHAYNLQKRLDVECKKLETQSAALARHADAWVALVGDMNQALKEVGDVDNWARAIEADVTQCAATLERVYRTRGGAGHGPAVGAGVSSNQ

SEQ ID NO: 149031 - protein, 496 aa, Heterodera glycines
LFLSSVRRILPNSVQILTLQQKLDAVDREECENKTQMVPDVGSVIAHALAQPSESRHPPGREKEKGSFGSLGAFSATANNGSKFADFVEIVYAEENWQYTVKVYFPEQFERFRSLTFCDGEESVKVYFPEQFERFRSLTFCDGEESFINSISTSSPWFINSISTSSPWYPQGGKSGAVFSRTDYPQGGKSGAVFSRTDDERFVLKTLNRFELDAFKQSALKYIDYISMALMEGKLTALCKIFGAFSVNYKQTGQSVKSDLCKIFGAFSVNYKQTGQSVKSDLIVMEFLFYRKDIKQIWDLKGSLRNRLASTKNDNNGASSLASTKNDNNGASSVLLDENYIQNMWRNQIYITTHSKTALSQAIINDSHFLADQAIINDSHFLADQGIMDYSLLAGICRGEEDEVIVGIVDYMRTFTFDKKVESAIKRTFTFDKKVESAIKAIPLTNSSTVISPEQYCRRFYEAIDGYFAVAPDQWTSESYFAVAPDQWTSESVFTN

SEQ ID NO: 149032 - protein, 124 aa, Heterodera glycines
MAEQLLLGMEEGNSSSGIVLFSSSSPPPDEDDGIAAASPPLTNGPTVATAALAKEDEELLRKVPPPPPLATFRVTTSMRVLPCTMRRKWSNIGRSQPLHLKSELKQQLNYWLWLFQSQSVHRFT

SEQ ID NO: 149033 - protein, 41 aa, Heterodera glycines
MMVNGVFCFCLVIVLLQLVTFANRVFFVVFSLGIFRGLREL

SEQ ID NO: 149034 - protein, 118 aa, Heterodera glycines
MVVVLLKVQLRVMRRTTLAKKQSQLKIFETEHLNPRKRKKPDLQDTVNYVNKIKEHFCDNKNVYKQFLDILKKHKNDHKELLWQVGQLFHGHGDLIDEFIDYLSVMDGNDQIRQKTDD

SEQ ID NO: 149035 - protein, 100 aa, Heterodera glycines
MLITLCLAILFQFVKPMPPMENEAPAEEYDGSLPSSIAISKVYCWLPADKQPKKLVNIKAAPPPPPANYDIKRVASEAAESVYSWLPKEQQPKLMDTSAY

SEQ ID NO: 149036 - protein, 20 aa, Heterodera glycines
HEDVKLDFNDDIFGQHVSGE

SEQ ID NO: 149037 - protein, 188 aa, Heterodera glycines
MENAKPKDGKKVITKLKWLNEKVLSCGNPCGTYRVEIKYRKDKRARGAFVCCSAQIEEDETKNWIEADAPDEDILISAYINPSNFEQLTELFELTYETDGAKILPASDCPDGVNWNRERSPGVVFFCEHQDTGESVECCTKGHKCPLKANSAYGCQLIVVKTSGILNSVPKIGANRRSRKKLKIWPYF

SEQ ID NO: 149038 - protein, 140 aa, Heterodera glycines
FKYVEQLNRHQLSYRVLFPMELRLQCKDACAHSDHIYDLVAVVVHCGSTPNRGHYITLVKSHSYWLLFDDDIVDKLDESSIEDFFGLSKLDESSIEDFFGLSDSNAQKNSESAYILFYQQRKYSLNLSHPFQFVANGHFV

SEQ ID NO: 149039 - protein, 348 aa, Heterodera glycines
LLILAYLFHCKSLFYIIFITFLFELSLGQFISLCPLSAWKMSPLFKGIGVSMVFISCIISIYYNMITSWAFYYMINSLKFPLPCNQVLMLSSGIVDFQTVNWQLAICCLLISWLFVFLCSFKGIKTSGKVVYFIVIFPYIVLVALFIRFITLPGSVDGLFHYMRPDWAILTDLTAWGDAAIQVFYSLSTCTGGFIMLSSYNRFHNNIFSDLWIIGLVDFVTSVLISIIGLVDFVTSVLISSLVFSTIGFICHEMGIPFEQFHLQEGIQVVFVVFVFFVEALSKLPVAQIYSLLFFTMVAFVVFDTELFILFIVETIVSGTSIFLGLALSKLAFPCQLWNLYLCFQVSS

SEQ ID NO: 149040 - protein, 278 aa, Heterodera glycines
VSSIDQFPERLRNHRHVLTFTLFAFFLLNHRHVLTFTLFAFFLLGLPLCTAAGIYWIVLFERAGIYWIVLFERFSATWPLIIIGFFEVMTVCWVYGVDNFLDNVKWMVDNFLDNVKWMIGFYPPFYLLWKILWKFLCPILLLALLSLVWLQALLSLVWLQHNPLQYNSFLFPRWSLLLGWAISLSPVFIILFMFFYQFASISGPFSKRLRELLCRLRELLCPTDDWGALAVHRAELYPMQIPEAQKLMAPPSSCVSERNGSFIDHNGITINLLTLPFL

SEQ ID NO: 149041 - protein, 55 aa, Heterodera glycines
MSSEWAEVYKNWWTNGQNGQNEWMIHHFWHNAKANFCCWAIGADLRLTDELTEGR

SEQ ID NO: 149042 - protein, 29 aa, Heterodera glycines
MMKIIKRNNKIGIEEETKFGIIQEEINKI

SEQ ID NO: 149043 - protein, 15 aa, Heterodera glycines
MKINSHHFRYINQIV

SEQ ID NO: 149044 - protein, 519 aa, Heterodera glycines
MTPYRIVAYDLECTTNTVLDEKSLKKETIHKPDFISARFTCSICLGEIKNCEICGDGPRHLKGCSKDGVDPLNCFVKWIISFEKYETYAYAHFSGRYDSHFVLRELANLGYKQPELTIADLKIYELKFKRGEKFPKIHFRDSWLLMQNKLAHLPKTFGLDCESKMYFPHQFNKEENYGIILSTLPPFEDYFPDEMSEEEYEKFKKWYYANYHNGFILEEKLDEYCSNDTDILMNALLKLRKIFIEITKDEETPNGIDVMRLSTTIASSCMNIFRAKFLKNSETLPIIPESGFEPKDSQSNIAIKYFEWIMHRDGVKGRHAANGGEISLLGDKKLKIDCIIGAQKRIIEFQGCAFHGCQNCYKGYMIQANGFTAEQNYERTQNKMERLRSVGKKMGYTVEEVWECDVRKMLNRKSEFYDEQMSKFFNNLPEIGPIIPRNGFAGGRTALEYGAVIDRFYRGYHYENFDGNLFKNYVRKFLKLKVEATGWPQDVKTEEEKIEFVKTYRETYEIELDPKKYEF

SEQ ID NO: 149045 - protein, 40 aa, Heterodera glycines
ISLQGRYVLDEEEAIGLGKRMRKIKFIRKQNKMDQTESNT

SEQ ID NO: 149046 - protein, 115 aa, Heterodera glycines
MSKEYEDSEILEVVCAGPKQYALKLQKENGEIWYKTKIRGMTQNKNNKIDYEEFKDMVLNYEEEKKIQFKHPNKFGPTRESYVISRNITKDYRPIQKKGIILNDENLSVLPFGCW

SEQ ID NO: 149047 - protein, 80 aa, Heterodera glycines
MDNQNKPRGRPPKKVEKKETPQNLEKKEIHQKAKIKILRPKIQLKGRKIELDTENGTNSVPTKIKLPPIYIFVVVIVRDQ

SEQ ID NO: 149048 - protein, 64 aa, Heterodera glycines
VNIDHRPQTQKCLKTVRIDVKRFEMGWKNRIRGALALFQDEKCRKWSAKLSWDSSDRTIKSTQK

SEQ ID NO: 149049 - protein, 81 aa, Heterodera glycines
MVLADLGRRIRNAIGKLGQATVINEDELNAMLKEVCSALIESDVNVRFVFQNLNCIILLCPCKIMIRTFLPLPKKGKKFDR

SEQ ID NO: 149050 - protein, 194 aa, Heterodera glycines
MPCANFPISKLHNVFLAFNQARHFEEKEFALRCLDHIDQNAYSLLKSDAFLKIGTNYLCEILARDQLQAEEITIWNAALRWADEQCRQMGKECSAENRRAMLGPALFQIRFPLIQLEEFPRNIAVSGVLTSDELLGVLLHLALPSVACSQPPLYPLSFPAKQRNYNGKFSSLKKPSSDRRQAKKFGPEKGLLSR

SEQ ID NO: 149051 - protein, 251 aa, Heterodera glycines
MPNQPVPFPFSKGRFVNDVAELHRVQLAISQLEAEQRHDHLKHLQQQMSLGGSRRAGHLYEQLTECRANLVHRLNDGVKLIAIMQTHLISERLLDSANKFWTKFKASESQEQTKNSLVKNANVFALSKVRSAGGEQLDFARVRMLAIGLVEKVATAERYGCPRLQNPLIIMPIPFADCANAHFQSELHFGNTHQIAAGQLGQVRRVDAVLAHNGQNQQMEIVHFLHFWSPFTGPRTAMLRRSSFGSGRFLP

SEQ ID NO: 149052 - protein, 88 aa, Heterodera glycines
MAAFLNGNAHSSIECNGVVHDKNGIDQNGTKLADRLQHSVQIGTKKAPVSKGSINVNKYVLEVISDTDQLHTLEQYAIDYAHSIGQCA

SEQ ID NO: 149053 - protein, 140 aa, Heterodera glycines
MTEYEKMLDHSLSNLSFVLTAEDSHFFPQNWLCPFQRINFTLIKYKSLAKTEDEQNFTDQFVAFLANIPSLSHETIEFVRAQAGLKLGHHTSGSAAYKFVKKRIYESPFLMEFLVRMFYWDFKVLGFPLPNLFEMRYGND

SEQ ID NO: 149054 - protein, 119 aa, Heterodera glycines
MTGAAAMTGIVICLSLLHLIFVSTLISDEKIRSELYWVVLMPPVIVVCGFTGMVLPRAALFLYAIALVYYMICIFVLVCFMNTFFAALPYRRLLPTLLVRAKVRRRHLRHSRHGAEHIA

SEQ ID NO: 149055 - protein, 244 aa, Heterodera glycines
MSNANLYGLNGQLVQHHATTGGTERMSAHLATLMAPIPLAEFATHIDRQKLNSNQGFIQEFESIDTGQHFTWENSATEVNKHKNRCTILSVNINHQKCRLSISYANVVAYDHSRVVLPPEDDAEEELPGTDYINANYIDGAGIGRTGAFIVIDCMLERLRYENTVDIYGCVRSIRAQRSYMVQTDDQYIFIHDAVLDAAQSGSTEIPSSKLHQHVQTLSRPQHMQEYSGIDIEFNVSAEMQKPN

SEQ ID NO: 149056 - protein, 175 aa, Heterodera glycines
MVGLFGNNLNGRSNGSNSQQKSVLTAVIESLLKMEMDNAKEKNQNSAIGPPRNIRVQTISNSSVVVQWDFDDSDSDVGGAPDGFMVKYMQEPSAVREHQMDKWRTQPVMDPKARHLEVHRVPSSDYRPAGDTRGRRHVPVDGVYIAAQIPSNEMQRLYRDELTFTLGDGLVNSRN

SEQ ID NO: 149057 - protein, 180 aa, Heterodera glycines
MYYMRSTWQCDKIADGFKEYKRTECQKYRKYLDILYEYLLREYVGIPTVKPKFVFKERIEIEGPIIHAVHCLVKISQFYFKPNYSKHIEYKLKKLFIYYFEQKLLNEKSLNYEIKLENEPKVSINEMIFQLAIEAANNYKTNESAEGIIQQKLEQNLEEKFKKAEERAKKDYPREANEIK

SEQ ID NO: 149058 - protein, 24 aa, Heterodera glycines
MCRARQNPIPIKSPIPIMAKNPIR

SEQ ID NO: 149059 - protein, 228 aa, Heterodera glycines
MVAFTIIPHLLLFTVFMSIILVILSQCCGCTPSKKKQTATSTKKKTTTTTSEAMKGKKEEKPAKTSETDKAAQKKPTVTSTKASEEEAEEDHDDYIRSDERKEGREAGQNIRDGQGSAEEDHDDYIRSDERKEGREAGQNIRDGQGSAEEANCDVNKGVGGRGAEEDHDDYIRSDERKEGREAGQNIRDGQGSAEEDHDDYIRSDERKEGREAGQNIRDGQGSAEEAN

SEQ ID NO: 149060 - protein, 21 aa, Heterodera glycines
GPGSRSRVLKSSGPGPGPGRA

SEQ ID NO: 149061 - protein, 330 aa, Heterodera glycines
MDINLENAPIPATSHIVSEKIDFSTVPINFATSRNFACKIWRWAAIGLYERDGETALGPRSGPRFIETCWNRPNEWLNDSFIVAYLAYIASISQRKTVVVDSLASRTDVSRFSNVKNYTFGYDPNAVPEVVLMPLHFPNHWTLIVYDVAHGAYFLDSLHMSSLSDERMALIQSIIAEIVPGNASFAVEYVQQLTKQNDGNSCGYFVCLYAESWLMNNRTFVLPDLNINYEKKRILWHINELYGSDIVPFHPREGVSTSFAVVSHHNGDVAQTSSKVIMPMEVDDSPVLPSSEDTAVLAQAPVIGENQADTPTVLLRTQLSSKNQSRRLMM

SEQ ID NO: 149062 - protein, 405 aa, Heterodera glycines
MKHTTRMLLVPEELYRSLLARSSAPVADASSARGGLPQHTTPIEHTAKRMARAARSNVTRSTDGVSPSSGQQPKHLLNDDERLIHYQQEFKRFKKFLEDEQERPAPVRLTQLPTDEASKGLLREALSEVARTIQQQPQPKQPALHQQQQQSSQSDSSTMRQPPRRRQRPAKRTHRTTSASTDGAEASRFPSSSSAVSLLTRTDNGGKGGAETTEREDSSNDDRPQNVAAVDPARKGQREEADVQLHPSTSTAPAAAAVLRDTEQRKRQAIDYALRNAGTLGIGDGQQVYRLMQGAYRPIKNSDLDALLTFHFAEPKPEKAPPGYKTFIGNARQDPRMVRILFGNSGAESGKKKKMGGGGCCSTAATLLHAFKKNGKPTAAVAADYAKRSNSTTNNKTFLFKPMLW

SEQ ID NO: 149063 - protein, 450 aa, Heterodera glycines
MTKLSSDSNDEHGGGGGGDDGHALPTEDDGVGGAHLPPLLFIDEEEEEESAESRTGDDVGRDGDGQIYTEKVTQEGEEESDDGNADMDSVSNDTYRSSSNSSSSTMSSSLFLLHDCHMRHHYHHDNNNCNSPPRKQAATELLKLPLIDYLCGLNNGCSQACFKMTYLVQNSTSTFSLFKSCGAQAASSPRQQQQLRFTRDQFLALARNGACTEYAPRRFHAIVMRLRTGSTSTISTGAVTITTTTTATTTPTGTTTALIFQSGRVVLTGIGGGGGVAVQQIHALCRHEAHRVCRRVADALRRGGFPTLGRSLRVNGVQLRNLVSTLHMPYRLNIEVMAQHLLRRMTIHGKQRPNDKDNNNSNHNNLAGQIVRVARACLDLCTFPGLRCALRIGGQQKGGTEEGSMGEAEFVVTALFFISGTVIVTGVRDPLLLKRAVDTIQHLCAQYIRA

SEQ ID NO: 149064 - protein, 35 aa, Heterodera glycines
MAIILHETSINLRLQCRNFHDDWHGGGPTVVRAGA

SEQ ID NO: 149065 - protein, 81 aa, Heterodera glycines
MCERLRFERSCGIQCANLEPFGLPLHRELLWSDFRGRLSAAQRTKSHPFGIAAQIAMLMITLIIIPAQLIDRRHFCFRWWC

SEQ ID NO: 149066 - protein, 100 aa, Heterodera glycines
MFLSLCLLSSLSLSLVFSLFIAPLARPGPGSRPGFFLDPVPGPGHFSVTWIFPIPGFFCAFRYPTITAHSPRIAFPAVWEHPELKSTKEFKIISVYTLKA

SEQ ID NO: 149067 - protein, 137 aa, Heterodera glycines
MCDSFKEIDAREEQTTYGFGDTIYRPLIPRLGNHRVLTSFVGEISGAGQYFRYDDDSGRFCVVSINTHEANPWDIAVLKFYAETMGNIWDPLFTYLDEVITSLENGDMPAYIIESSPSNSANSLEDLPSVEAPQSDD

SEQ ID NO: 149068 - protein, 104 aa, Heterodera glycines
YFPNYLIKSRLSPLGWQNSIRHNLSLNDCFRKLPREPGNPGKGNYWYLDPNANYWYLDPNAESMFDNGSFLRRRKRFKRKPFKRKPTPPPQLMPAGVFPPPPAP

SEQ ID NO: 149069 - protein, 129 aa, Heterodera glycines
MSGVQDEHDLSTPSPPGHETVNELPPPPPPPLSLHQLMAPQDNDTPHPSPTSHLGMTAMPMAPVVVGDAQAPSNENEISQMDVTQCLGASPSTFVRPSVSGVQPQVQPTGVIKRLCLIKNLNTNFCLVV

SEQ ID NO: 149070 - protein, 48 aa, Heterodera glycines
SLKICRKIIPPSPLKALSPIMSPFLKRLKNNPPGALIRENTVIEIGFS

SEQ ID NO: 149071 - protein, 40 aa, Heterodera glycines
MIESQWNSDTLVQRLKSVQNCRRALQTIYSGESMLYIMNL

SEQ ID NO: 149072 - protein, 24 aa, Heterodera glycines
MANLDNFDNDAFYWPSKMPIPAGL

SEQ ID NO: 149073 - protein, 90 aa, Heterodera glycines
MGCARVSVLDSRLGKFPGFFASRSRVFSLGNREIFTLLRMTIVGSFRMIQDCWIWSTTLKSYIDSILFGCSWSVPVYQYRWTPKTYTFFV

SEQ ID NO: 149074 - protein, 210 aa, Heterodera glycines
MFFTGIDRLIGIAFSEFHDNLQKRLYLALLTILSGGLWFLLLWFRCTKMQLGDGDQMTTGSYFDFLKSAPIFDKLSFLITSITCIIYLLLGIAVRIKASGFPSADSFNRRTFRAIFCIITVNISGYFFALICYILLIPKISSPITAWFLHAITSIPLNIGAASNGPILYFTSTEYRQAFQTVFPYVFKRISNPNQVIPLQNVPPLGATQW

SEQ ID NO: 149075 - protein, 308 aa, Heterodera glycines
MALTNGVAEGEVELEVQKMDDGTGEGAEEEEATLVKKGIKLDEGEAEAEGGGEEAAANESVEKEAAAEDKTEDLQQQKEGEENEAPEKEEDSAAAEIPVDVYDEEAAEAPPAEEAEKAEEAETEQPEAEAAEAQDEEGAVEVPVENVGGGEAAEEEAPPAEEAAEAEPPAVDEEALPAESETEAPEETPAETEGDEPKTEDEQQKFELQHFRRRSVVSQKRQKWKKYQNKIAEKPSDATDAKVTEIAKMEAHDQLGQGRGWDGRGTESVSGGGRNCGRSAGGEIGGRAGREGGGRGEAGRGGGAQIGG

SEQ ID NO: 149076 - protein, 429 aa, Heterodera glycines
SPAASAPSGCSSVRSSGTAPASAATGASSTSDLGSSSPAGFSSSSAFSAGSASDFSSGTSSTVSAATADTFRSASVPSSPFSSSPPFTDHLDSSSSLSRIRASKLSCRCFSSSSFAASPSSSTSTAFLKFISFSTSFPITVSAICPSHRHSAPSAARNTRPSGTSSACSTSTSTCCTSSNSASTCSSNFCCSSSVFGSSPSVSAGVSSGASVSDSAGSASSSTAGGSASAASSAGGASSSAASPPPTFSTGTSTAPSSSCASAASASGCSVSASSAFSASSAGGASAASSSYTSTGISAAALSSSFSGASFSSPPSVAAERAKSSVLSSAAASFSTLSFAAASEINHCNSAPSSSLLSLILPFDHPPPPPLSSSPSTFSPSASASPSSSLMPFFTSVASSSSAPSPVPSSIFCTSNSTSPSATPLVSAI

SEQ ID NO: 149077 - protein, 126 aa, Heterodera glycines
MIKSFPLSVLFLVFGFNRLLLVTSGPCLSCVRMNEDWHDYCNAMAKCCDSLRIKPCGLDDSDVTDDSDSELSPTSCLPIYVFNAPPVDQYWSGICENQPTDKCDSYEVNLCFLDAKKRCLPRMPWP

SEQ ID NO: 149078 - protein, 75 aa, Heterodera glycines
MPIAEAGETRLCSQTTKLGEFLVEKGTGVAVDVYSFHRNKELWGEDADEFRPERNSQLQLLHYMIRQTKDDFSIL

SEQ ID NO: 149079 - protein, 56 aa, Heterodera glycines
MRFALLEEKMALVRLLRRYSLVKTEQTEVKLLNFNSQVVLNHGAVMVKLSQREENF

SEQ ID NO: 149080 - protein, 83 aa, Heterodera glycines
MFKILSFFLLFIAPFIAAYAPNCICPENEQPGQLSCNRCEPSCYNPRPRICTLMFCTCSCDCVAGLLRDEKTKNCVSKEKCTH

SEQ ID NO: 149081 - protein, 48 aa, Heterodera glycines
MYKKWSKYIIKNQPITGGVKKSRYRVSKASKTETENPRPRPKKDVNQN

SEQ ID NO: 149082 - protein, 47 aa, Heterodera glycines
KKFGTSYLGTQTHFAENKNTFLKNPWVLYPPTKFHSEIPRTPGDLPL

SEQ ID NO: 149083 - protein, 134 aa, Heterodera glycines
MEMPPILTQLMLILFVCSTFIEKTKCGKKEAAATPMEKVSQKSDETAKASKPVENKNEELKKEIENMKKQMDQKLKKILQENIPAFALQLNEIAAQIDNEEKPLEKEFIQKLIDKDAVEDQISANYNCFNRELE

SEQ ID NO: 149084 - protein, 176 aa, Heterodera glycines
MDLFDIFEHINTNEDVQFLRSSGNAGALAPQPLVPNTVYSLSDLCSAFSSAASLSAPPMGMASNSDAFGLRSTILPAAPLSAPPVGISTNSDDFGLRSTIVPAAPLSAPPMGISSNIDNTGATRERNHQYFFGHDFTTESFSSNSGTTRIRKPQPLNFSLKVFLGGIPANMTTSGI

SEQ ID NO: 149085 - protein, 72 aa, Heterodera glycines
MNPRLDGMCISASRSDASDFLPSYFFKHIFVKCDDSKFVVYKKAWNVSIVKRQLGFCPHFLVTFVSPSSFGC

SEQ ID NO: 149086 - protein, 191 aa, Heterodera glycines
MSSPSLPAHWPARTAKDIEIILLHEAAQATVCHALGWAVTGMRFTAQGGVVDWHRTTTLNKIETLEDLMKRICIHMSGKIAEEQLLKSNNTGSETDINRISEEMEKIVENGMLPGLPKWNITSGYHGPKLLAEYEKAKRALLQECKKRTERIVIEQKDVIEDLAKKFGASTELNEEQVQNFFAANSPRHSP

SEQ ID NO: 149087 - protein, 298 aa, Heterodera glycines
MEPKWIWKGTHLAFANELLCDRNGLLKENSTKEILTLNSERKKMEIDPTFVVDFSKAMVKDKDLEKLKALIEEFSDVFSKFRYDLGLFTAAEHHITTTTEEPITSAPRRMPYKYKEELKKHINQLLEAGVMVESDTPWVTPIVIVQKKDGGIRPCLDFRKLNEVTVPDKYPLPRLDSIMERVGNCQFYSSLDLASGYFQIKLSEETSRKCGIITEDKVYQMITMPFGLKNATAAFSRAMAIVLSGLEDTSLAYVDDVLIFTKSPNFSEHLTALGHQHRIRTQKTERIERKNGKWRFCV

SEQ ID NO: 149088 - protein, 30 aa, Heterodera glycines
NFEKFYGNLIQFLGVQKSLFAPKSEMRNAK

SEQ ID NO: 149089 - protein, 69 aa, Heterodera glycines
MRNFMGISRTGLSKKSWKPPCVLGEFGEQIQSELRDAESVLECPELMLDKIEEHMEDDIQLGDDAKRIS

SEQ ID NO: 149090 - protein, 55 aa, Heterodera glycines
QSDQQISEIDSKCAEFGIGIAKVPFDAPKGDHSQRNVPGTDSVISMPGLPGSHKQ

SEQ ID NO: 149091 - protein, 102 aa, Heterodera glycines
MFVIAASASSHASNNSEWQALSAQFGQQISEIDSKCAEFGIGIAKVPFDGPKAKKRRPSLSECSLRSDNPRGNSTQNGSVCAAYNERRSGEMAKQSKERRRK

SEQ ID NO: 149092 - protein, 20 aa, Heterodera glycines
MVILLVANEIKTTISFNFLT

SEQ ID NO: 149093 - protein, 80 aa, Heterodera glycines
MVPNSKFGTAHKDGICNWMMGVIRWPLNTHQSAKKQIFSFVDINIFFHFVFISKNNLVKDKFIYKFIFEFRITSPSSKRY

SEQ ID NO: 149094 - protein, 106 aa, Heterodera glycines
MSRKSEQIDGENHSEISKRRICKDIELAIRKRNPSLLCQFDRANSFRKIPEEILMEKLESEKRELEKALETEREALGDEKHKRQMGTKGAKEGGTREQKGRKLDNN

SEQ ID NO: 149095 - protein, 30 aa, Heterodera glycines
MWGNCTANAIGGGGGGKRGGGGVNGQIFIH

SEQ ID NO: 149096 - protein, 254 aa, Heterodera glycines
MSLAPSAATSSTVGTSLTPPAAAAQMLFSPFQLMQQISAASSVTAQHIASSMSSSSPPTAATSSTKTEQQTTNTMTMETCDNNYSSLMSNNGMQNHQPIHAAENPLHTLPLSALLQHCEQQKHLTDAINKLQQQQKQQTQNQQNGRTITAQCQSSPNPNSAFSAPNGQQKCCNETALQHDEEEQDEHHNDDENDDSTLTSASVNGSFSTESASCAVAAAASLCSNANTTQSLAEAAGRASAPPLDDEHVKRPMK

SEQ ID NO: 149097 - protein, 196 aa, Heterodera glycines
MLEFSLWLLSFNALAAQTAEMTTKTAKTTTTKRETTLVPLTKEFISLLDDERRYNKYATPTQHLGTATNVSMSMFIEGISSFSAQTMDYQLDVYFYQEWKDERLKHNGSGPLLIRDKAVFKDLVRLPHFAGCHLHDGSVEVPIGFPNMRTPYSELNLELSDGSVLRGTGNASPYHPDLCAYFADCHHIMVRKQSSL

SEQ ID NO: 149098 - protein, 467 aa, Heterodera glycines
FLFKLFLKTYNLSKSKLKQHKNCRYMATIKFKSAAAAFSFHGQYNDIEFNSIESEKCQLRFVDTIETVRINIGGLLADQMHSEPPICSVCLERMEENNVFTILCNHSFHAECIGQWADNHSFHAECIGQWADTTCPICRYTQTPELVPDQKCFDTTCPICRYTQTPELVPDQKCFDCGRTTDLWMCLICGNVGCGRYEAAHAHQHYEKTSHIFTLQVGSHYEKTSHIFTLQVGSKLVWDYPGDNYVHSLIESATDRKMIEYDGGGDQKDEEISGDQKDEEISAIQLEYTCLLTSQLENQRMHYEEKLRETEQRFSESGRLTQKKLCTVRTERDEARTELATTSTAKQQMEKKCQQMQQKTQNLQRELEEERQLNSLLSKDKELLGKQKEELERVRRQVGGSGETEIAGLEEQLHDLMAHFDTQAKVQRQVETGAVSKEELESSTLGLSKENGSGGKKQRRNKKRPTE

SEQ ID NO: 149099 - protein, 120 aa, Heterodera glycines
MPVPVASMTFRVPQTSRRPFQVPADATRFENFCMYWGGRARGLDYSEPFLYEPQRDNYSIMEDRRYHRLYWAQHMVELMEKALPFQMFNFLASLDSQPTVGTAWTTNYAECLLKELEGKQ

SEQ ID NO: 149100 - protein, 100 aa, Heterodera glycines
MASSKINFAERQMGSSKAANLANGKDKLAFEAIQLRDGFYEGKKSLEKERREEGAEEEEEKRRRREKRAGEKEEKKEEKKTGSSSSSAATAALSRRVPSK

SEQ ID NO: 149101 - protein, 107 aa, Heterodera glycines
MYFRADSCPMQAAADMQFCAAQGRDHRECCTRNGVGSTLAAPYEPRTSESEVKRDETKEKRRTIGNGRISPGGEEEINKWPIPPPLPPITLTIFVVRFIFDHYSLAY

SEQ ID NO: 149102 - protein, 441 aa, Heterodera glycines
MYEMKVRKQKKRNPNVVFRDSFNLMPCSLAALVPSYGLEVEDKPFFPHMANRPENYGREIHPTPDDYLASGCTWHGCKKCYPNDNMLLPSGKTAGEVRERDAKRLDFLRRQVNRVDVYWECEIHRMLERSREMRKSFADYVDDGPLVIRDAFMGGRTGPLKLLRKAGPGEKISYYDFTSLYPYIKYVWCSSFLNNKILNFSFVTRYPIGRPKVHVLNRQVEWRSAADNPYPLALLKVWVVPPRRVDVPVLPVKVGERLCFPLCITCAKEHPTGGVNSDYHCAHNDRQRGWVSTCTSIELNAALDEGYTVTRVFRVLEYEQSDDQLFRPYIAEFMAQKIQASGFDNNIRGNADKEEQFVRECAEQFGITIDPTKMVLNKGKRSLAKLCLNNLFISLWTTSAARLVLLKAMQKVVRSPGSELLYTGKANSAQKPKMKSDYFRH

SEQ ID NO: 149103 - protein, 115 aa, Heterodera glycines
MKRRAATLTDATAEQHPEPKPQEETLKNVEPKDESATKKRKVEDRELWKLEKGKFLLTTYLCPDDWNRLFNNQQKVKRVEGDRDAMSVTGTGACHVPNCESGTEKGQGWGCVMGA

SEQ ID NO: 149104 - protein, 19 aa, Heterodera glycines
MWWWICPTAVRKMESRDES

SEQ ID NO: 149105 - protein, 131 aa, Heterodera glycines
MKIIRQKRLDVLLMVVKNYCEMFMGQKLIYDHANSIGCAVHFETKRKTELRAKLVCIMSTEHGHKKMLHHHNVFKREWQFDVEIATDRKCRHFFRLDTETFEQYLQFESRSILHSAADLSFRSHLILLYLA

SEQ ID NO: 149106 - protein, 238 aa, Heterodera glycines
MSRVSLGAFLFSALIAKKVVMTSMPYHGRVNYHHQQQHHQNQPHHQMGGGGGGTGGGGGRFHQYHHGNRVSTGGSVGGGAGAGNVNNNFVRRSPSIIDRRCEECGSQEHTALFCPNTKKQRALLEIFAHEFQVAAGHPALVQQQQQPQQQHQQPLPQKPYPPYPQQPYSQQPHSHQPHPQRPRNVHHHYSGAVVYSSSHASRGGGGGGGGGASGGGGWGYFEAQSANPASFLTDFQLL

SEQ ID NO: 149107 - protein, 115 aa, Heterodera glycines
MKQNTFENSEGVKAYDERLWRRGEVEDRVPNGAVVQIGHQRLDKHLNANFFKVPLEREQEGHFEQCQSPFRNGGDAVEVVALKNTNQIMFKPVMPRRTGRTPCFRFHGLGVGRSG

SEQ ID NO: 149108 - protein, 106 aa, Heterodera glycines
EKQIKRNKDGRPRKRSQHTKGNKLWEFIRDALKDPRTCPSVVRWEDPTEGVFRIAESERLAFLWGQKKNNQKMTYEKLSRAMRTYYEKQILVPVPKSGLYPKVGEP

SEQ ID NO: 149109 - protein, 313 aa, Heterodera glycines
TLILCFRLGAGHLPILFAVCFATMLGCTYCTYVFSVWRGDVDPVFPYISASGDLRPESCIFSMLLNICSFFSMLLIILRYSLVVELNRSSDRLRAYSLVVELNRSSDRLRAVNRLAFYVGMLAGLGMFIVANVQETAVFQIHLLGALLCFGSGCVYMLLQSWCTLRMSPLYNDPQIAYIRFVIAIAASLCFVTAFSFGLMASITFHHYYPFSFGLMASITFHHYYPDLPTPRPWNRKHGLQGYNLHCVSLQGYNLHCVSAVAEWTLALLKMTFLLSFQRDFEKIRVQMLSSRWCPIDIISQIPLQKDYSGESI

SEQ ID NO: 149110 - protein, 180 aa, Heterodera glycines
MLATLTPFVLHLRDWNAQSMIPKPLRQRRSLGDARLGAGTGGIQALLRSQHERYWAQRKRALSTPPQQQQQNQQLFMRTDEQQIAGKAAATNSLNQQAQAQQQQQQFYAIYNQKQQNGGHKWQQITALASSIKATAATTTALATRPQLLMNGTKQHNEQQQQFDKRVKDVELIIFNWILF

SEQ ID NO: 149111 - protein, 117 aa, Heterodera glycines
MEANNNTDHHQQRRHTDQRSWGSQSVASSPRGIVYTLSKSDRAESARSSDFEDPGLGYSSLANPPEFIRAFQTEVTINEGELAEVDCLMVGNPRPKIRWFFNDRPVKSSPGFFELKF

SEQ ID NO: 149112 - protein, 33 aa, Heterodera glycines
MYWLDLMKQPQKQHSRQQLQQVQPVDLIRRRQT

SEQ ID NO: 149113 - protein, 53 aa, Heterodera glycines
VFDYNPIKGITIMPNFDQTPAKMNYKHKIILAMNGDLFLKFSSFILIRQNIRT

SEQ ID NO: 149114 - protein, 240 aa, Heterodera glycines
MACAVAAERATIHQELQRLTLITELIRVEELQETQVNITFRHQLNSVAEMMDMLQIWEEDTAINCRVDQNDETKPCALGFGTGKTFTAAGIMSAILREDPSARILAMAPPNIAVCKLVLEMEKALRIEGQPEPMIALFSGAGKINYAEELRRISQHLLAAAVDTEEFREHLEIPDTRKVDKYVAACARNPRLAQETTVARILKEHAERRIYFCTLSFAEQTAELFAGITHLLVDEAGQAP

SEQ ID NO: 149115 - protein, 59 aa, Heterodera glycines
MLFDLNINSINSGRLSQMPLITALSSEIIELVNNFKEAFLHAITSASYEIQFTVYAPFQ

SEQ ID NO: 149116 - protein, 412 aa, Heterodera glycines
MAPVKKKKKLSSANHRLISATEQQKPLGSFVTFGNRRSLRVAMKTKSRRWICNDIWMDILPLFRRRQLGLKMALLSPRFNALVDKHFDGKSELTIWRPIRIDKKGTKAKLFVEKRNGKSVRFSLPDHSLTNKSRFKHLRICHIDHSVITFLRANQQIFDKGINLDLHVPQFSYKAKNFQPIWNAFARGIWPIFAPNIRHLNFAKARHLENLLRYTSPTNLYDLNVKSIDSDDLLPAVVADAKGPNATAGQALSKWLQMPRSDGQPKQLSCSGYMYKTTELVDNFKESFLRATISSASYIIRIKLLESMPLFAPFELTNERTNEMLTLEKENSDENAKKEYGYKWHERWVMKRCQIGETIQWEDEKTDKLNNVDLSLCGTSCIGPLSPPKADKKNAKSPLKMSAGPSGQRKKK

SEQ ID NO: 149117 - protein, 46 aa, Heterodera glycines
LFAVGVAFWLLEKAAAARLGPIVNGEPPDCVPPCQPKQQKEEEEMP

SEQ ID NO: 149118 - protein, 87 aa, Heterodera glycines
MYPKRVVVNFHQGGSDYDDMPLHLSTRWDEGLFSGNVVFNTYSRRNWSEPEERVSSPFPADGEFDIRIRLLPGKFQVQKDLNLKIKI

SEQ ID NO: 149119 - protein, 20 aa, Heterodera glycines
MGDTEEYKEKRQFAEQIVSL

SEQ ID NO: 149120 - protein, 144 aa, Heterodera glycines
MENAKEKTVPKAFESGIQTINDDFDANLAGELKRAGARLFRMSDLSSDGDSFVPEGTKRGGARPFYGGGYIDGAWKRGGTRRTNRTNPLLTAGGRYFLRQFDDVPFGGGWMAKRGGGRSFFEWATFIRFAYCLGELPKMKCQQY

SEQ ID NO: 149121 - protein, 31 aa, Heterodera glycines
MSQFAIFLLPPLFVWSALVDSWADCLHDCSK

SEQ ID NO: 149122 - protein, 126 aa, Heterodera glycines
MSARIYTTFCGVEEADKEDGGTVGRRRRRRHQPQKEQRWTIVGGGAETVGEKCGHNATAADHLPNQVVLQCRDQMMDNSLGQTDETKSSADDNNTKNSDIAGGPSLEKVLKPLNKSPAKEDTKRSS

SEQ ID NO: 149123 - protein, 95 aa, Heterodera glycines
KNDKNYYEKKKQEFIERIDEIYRRLRKGKQKQFAKELDIDQKTFIKWKKEFGIEIDKNGIRYSNEEKISKMNIYYKMKKGTPSPSDREIAGLLEI

SEQ ID NO: 149124 - protein, 212 aa, Heterodera glycines
MLRTAYRGMVLFEGELALKMALLNKHYLLLAVLCGKIINYFEQQLTDDKNEDKMAKLGKYWKLFKRNLESFKANKELDSMKGLLIKLRQLLDYLRDQFGEQKLSSKWQMIVQRMEMIFFEEFYEESDEFRKHFQRNKNTAMPMLTKVFAFAEEKWGIISPHFWALEKLTNEMDEMSMTQNEQKASLLIKCPSKIIPLEMLQELDLKETDEGK

SEQ ID NO: 149125 - protein, 220 aa, Heterodera glycines
MLTTKIRATSPKKVVTKLFPIVGWLPKYNLRSNLHSDLVTGVTIGIMVVPQAMAYTTLAGVPPAVGLYTCFFAALFYLFLGTSFHVSIGTFAVASMMVGNTLAKLHLNGADNKSNLTTNGTENTTALSGADLNPLVLTMAVFRLSFLTVYISDPLVSGFTTAAAFHVLVAQVPKLIGVASKPYGGPGMVIFVIFSIGFSVLFKIEEKHSVKIIKHVPNGQ

SEQ ID NO: 149126 - protein, 234 aa, Heterodera glycines
ESPFVRHYSMSSFGSHNSEASTSTNFLLGTFSSHQNSSKYRAYASAVDKALKSFESTTEWADLIAALGKLGKVFASNSKSFNDIPNPLTVAKRLSQCLHPALPSGTNICHNFSVFNILSTGVHLKALETYRQVFNILGHSGHNQNLARSLFLYAIGLFPLIDHCGIKVKSELLSIFEQYLLPLGTHLRPALPGFITAVLLALEEGTEFYGRAFQLLDQLLDKVGTAAFYTCFWQ

SEQ ID NO: 149127 - protein, 161 aa, Heterodera glycines
SALALLLSLSAHGAGAEHSAFYDLLGVPTDADLRSIRRAFKRLALEKHPDKNQNDPEAHDNFVRINRAYEVLKDEELRKRYDQFGEKGLEEGNNAAGGWESWEFYNDKFGAAGGWESWEFYNDKFGIYDDDQEIVTLSREVFESGEVDSNKKHFASLPSLF

SEQ ID NO: 149128 - protein, 28 aa, Heterodera glycines
LETGNFKFADPVAQDWNSKFFTGHAGSG

SEQ ID NO: 149129 - protein, 949 aa, Heterodera glycines
MDIYIIMQKILKILMSFKKVSVKIVEPTAFERLGEPRLEKVGKLVGSFSGHKLKLLGSFKCDVLFRGVTMRLELSVADTEAPIIMGLDWIIPFDATQQPIATTCRSLSTVCNQQMIRSNWKQIKASFPKVFQPGLGHCVKTKATLHLKQNVKPVFCRARPVPHGVQAAVDEELDRLLDSGVLKPIDFSRWAAPVLAVRKKSGNVRICIDFSTRLNDALELNRHPLPRTEDIFHALRGAKVFSQLDLRDAYLQVELDESSKQLVGMNTHRGLFQYQRLPFGIKLAPSIFQKAMDQLTSGIPGVFAYLDDIIIASADHSQHVAALIELFSRIQDYGFRVQLDKCHFLKAELKFLGHVVSSDGLKPDPARSDAIRNMPSPHDIGTLRSFLGALNYYGRVKEMRDLRAPLSALEEGHSLVLGSSAEGPIIVAADASQSGIGATISHVFPNGVERVIDHASRTLTPAERNYAQIEREALSLIFAVQKFHRMIYGRNFTLLTDHKPLLAIFGNKNGIPIYTASRLQRWALILSNYDFTIKYVKSANFGQADVLSRLISEHRTDEEVIVAHTSDDVDSTEEVEYALLVNLEQLPVDAKEVSELTTSDDLLQEVAFVRSGWPNKCPANELMPFYSRRDTLTLVGGSILTGNRVIVPAPLRRVLKTLHFAHPGIVRMKALARNHVFWPGLDSDIEAMVKHCAECQFAVKMPPKAPLRPWPIPGEVFGRVHIDFAGPCAGGNIYLILVDALSKWPEVMQMRTTTAKGTIEALNLVFHRYGAPKEIVSDNGPPFTSHEFKDFCRLKGIKHKFSPPYQPHCNDQAERMVDTFKRQAKKRKIQKSTMDFGFLFAYRSSPSPSFSPAELFLERTLRTPLSMLEPRQHTPNENNNQRGHRSFNSGDSVRSFNSGDSVFLNYGRSGKPSWLEGKIVSGSGLIWKIEIPILGITVTRHVNQMRSFS

SEQ ID NO: 149130 - protein, 405 aa, Heterodera glycines
MAGGAELHLPSGTRPKKRTRPNGESGGAFQVGSEMPFPHFPCRPIQNVIGYIWGSERPDEWVMLGNHFDAWVFGAIDPNSGTAVLAEVAKGLAQTVRTTGWRPKRTIVFCAWDAEEPGLIGSTEFVEEFADVLRERAVVYLNVDNISSNVTLNIHAVPSLYQAAVDASKSVQNPNGQGSVFGPWIENYPSRTSWLPDFPHMGIPGGGSDQKSFLDFLGIPVMMITYIDPKRGQYPLYHTRYELPFVNEHIFDNNQLAVHKAVGEYWAELARLFADSPLLPISATTLAHRLLADYLEGIKKPILDLSSQFPSTCGPAKTQLDNLIQNGHQFMAQAEEFERHAQGQSAGANLAQLAWANDRLRKLEQCFVNPAMGLAREEPLKRHVLFATGNDNSYAATTLANVYNK

SEQ ID NO: 149131 - protein, 113 aa, Heterodera glycines
KRPSTHLKVHLRVHTGEKPFECEFCEWRFAEKGNLIKHRRTHSGEKPYECTECGRTFAQKGALHIHRRTHTGEKPYKCTECGRAFAQISNLHVHLTEKKSAERNDQMEFGIFH

SEQ ID NO: 149132 - protein, 37 aa, Heterodera glycines; identical to SEQ ID NO: 127185

SEQ ID NO: 149133 - protein, 24 aa, Heterodera glycines
HQFDLSNLFSALIILFISPANKLI

SEQ ID NO: 149134 - protein, 24 aa, Heterodera glycines
HQFDLSNLFSALIILFISPANKLI

SEQ ID NO: 149135 - protein, 203 aa, Heterodera glycines
RWPPPRYLRFSPAKTAPTLPTSITSGGGSFLAFAKLLAEWKWIVILLIVLQLVLGVLAADMSTASCNWDVKMLIPFLSILTGLVVIFGFIWAIVHVLVNSKFDVVLAKMEAMKSDQRAELRGEMKGIRGEMNGIRENMNGLRGELNGLRGEFNGFRGEINGKFEIMKIELRGDMKGLSGEMNAMKSELNGRINVLQAEMNGKR

SEQ ID NO: 149136 - protein, 74 aa, Heterodera glycines
  unsure (1)..(74): unsure at all Xaa locations
RTQNXALHKTTDGTEAKGARAARVRSAPVQHGVDLAHDVHLAPVVPPGQVLLQLNERDAKITTDFGIQIKNAIN

SEQ ID NO: 149137 - protein, 141 aa, Heterodera glycines
MDHLPIDIHSNKLLDINYFHCKQIVDILRDTEKETKNIFGMYSSQRMKDWKDDEIDFGDDEIDFCLDGNGVVECEIELINDKTGDGVKPKVGGGAVAADDGIARGEEALPLLEHLEVRTEFLDELDQVKNSRREFEQDLSN

SEQ ID NO: 149138 - protein, 311 aa, Heterodera glycines
MVLQLSMIGTDREAATSAGSITTRLLGKYQHVEHVIIVGVAGGQAHLTDPEMVSHIRLGDVVISQEEMDEHSTDGRIGAYVYAHNIESDPKAKEIRFEVHNLSPKVNALAAAVRNANKPRFLDAWHANSQSLIGRLNDKHRDQQLDFSRPPATSDVILQLTNNGNILVFPHPNESRTNPLYHLGPVGSMVTFYKRPDEDEDSNKKQKPPTPPLKPTNRFSFGKGNQNGPSVDNTNGIGSNGPMLSPGNVGDESNDSEEKAKESAADTSLNSESATDGSRDVRLVNERLREKCGGNTGKLNANKLHNSFQNR

SEQ ID NO: 149139 - protein, 33 aa, Heterodera glycines
MLIKKGSNTKLIRSLLHGDLISPFWLGTRAKMG

SEQ ID NO: 149140 - protein, 17 aa, Heterodera glycines
HKHLFDLFYHIHNLIKI

SEQ ID NO: 149141 - protein, 47 aa, Heterodera glycines
VCVLSKKKNREDTTKQIQKNGYKFGLFLSLPSLSSNALTPSAARGES

SEQ ID NO: 149142 - protein, 36 aa, Heterodera glycines
MAEKVQPEAEEPVVIVVGGIAHGKVQNKAMCGTKTE

SEQ ID NO: 149143 - protein, 79 aa, Heterodera glycines
MTYVSAQAHNVLSDIDKKLHENNAFTNLLGKIETKTGLKRLHVFGGFYQPKFISNNQNFVNLAMVKNWCPDEKNVKNLA

SEQ ID NO: 149144 - protein, 58 aa, Heterodera glycines
MQTTCGYAFQIADIGNASSSNPSPNSEPLAQIVRWNWDQNGTQQIIEGRLSAPPALCF

SEQ ID NO: 149145 - protein, 27 aa, Heterodera glycines
NSALVLIWQKIKPFFLRTHWCSIHLTK

SEQ ID NO: 149146 - protein, 67 aa, Heterodera glycines
MAESEEKSRRQCANNNSHNNNDGSSTAANAEAGCAADQHQRQQQFDDFMCLDFGGDQTKTAPERQQR

SEQ ID NO: 149147 - protein, 145 aa, Heterodera glycines
KRLFHPWPSLIKNWQLLAVTHPAYMAFMTYEEVKQRLQQFSGKPGSYLFRLSCTRLGQWAIGYVAPDGKIYQTIPQNKSLIQSLVDGSREGFYLYPNGRNKNMDLSYVSQFPQSGKVQVGFMLFSYLSKNNYFICRKCKNSPKIK

SEQ ID NO: 149148 - protein, 220 aa, Heterodera glycines
MDLFKSEEIKKAQKDDENNNRRIFQYEYFANYTDEKAAAAIRRMKQGGKIIWPSEKSPNILMIAWKVTNDIHQVIKVEEKEKRRVFEIGKKLLMNGEVFEDVDEIVTRCIEPMANFAVDILRYRYFMESGYAQEVVDGYLRDQKRAAPQRIPYVITALRERPGRFMLSYLAGSTPRNESMSVTPDGIKFRGHTFASTEDCVNWFKNEFARRQQEILHQQR

SEQ ID NO: 149149 - protein, 28 aa, Heterodera glycines
MHPKLFLVTFAVLLALLSLANAIGFPPE

SEQ ID NO: 149150 - protein, 167 aa, Heterodera glycines
MTRFTNCLITLAFLLITIVSTIDGFGFPSGGSGCGCGCSGGGGGGGGHGGCCGGSGGGGHGRRKRDTDAVQPHYMADETPCPQAAWKAILEESISPEDAIVSVGAIQTALYRRYTNEQKFLVTCSAADVAKNGTALATNKVHFSSSGNGYCNMVKERIWCQAVALHS

SEQ ID NO: 149151 - protein, 157 aa, Heterodera glycines
MSQLLNCLIALTILSVLVAMTDAIGMPMQQCCCPMQQQSCCGGGGGGGGGCCGRKKREATALEAVQPHFKSDETPCPQTEWRQVIDESIRTDDAIGSVSAIQTALFRRYADQKFLVTCSAADEAKTGTNKVHFSSSGDGYCNLVKERIWCQAVALSA

SEQ ID NO: 149152 - protein, 73 aa, Heterodera glycines
MFNNEILWSENQAEAGAIREHGQMFVGGFEVTPGTRIGGFEMVPGPLVRGQLMAFINDLNDRFRNATDYVELA

SEQ ID NO: 149153 - protein, 88 aa, Heterodera glycines
LLQLPKKSVRRQLLHFFSLHFTNKIIHRSIFRIYSLNISTKFTHPQNAPQLAPHSCNKFVRNLLIQPAVRSRENYFLEKMLLSFHKKM

SEQ ID NO: 149154 - protein, 89 aa, Heterodera glycines
MAQHQESLIRQNFAAETEAGINKQINIELYASYVYLSMVPLNLLNRSEISFVKSFYFDREDVALHNIAKWFKKQSDEERGHGTTFMKYQ

SEQ ID NO: 149155 - protein, 484 aa, Heterodera glycines
MKGRPSKGEWEHIYGRGKEHEMEQKSIGIMSCHSNYGGSAPNNFINSAIKEKDFCEFEKHFERFSKWDRLKNSIAYALRAFKKENQKKVSQKYGKNFGYQNKKNGKEITKEIIKLIRPLEAKEILKAEKLIFKLIQTNLSPTKSIIRNLDLFKDDDDLWRTKGRILKSGLNYDTINPIFIPNNSYIATLLIRDIHMKTMHGGRELVNSKLRENFWIPKSRRKIYEILKRKNKEKCGICAKFANNKYTYPKNPPLPVFRVKGKGAFEHVGIDYFGPLSVKTLDGNKKCWGAIFTCLIVRAIHLELVSDISAEKFLLAFRRFIKRRRVPKLIISDNGTNFVLANKALKQIVLEENIQNKLWSEIYRDPTVQNFSSNLGIDWQFNSPYASWRGGAYERMIGLVKTHLIRSLGKQLLSFEELMTYLIEVERIVNERPLSYITQDEVIEPLRPIDILNPTDGEPFSLKLDPTFDRKDVNEYFEKKTKRE

SEQ ID NO: 149156 - protein, 123 aa, Heterodera glycines
MPIPTAHGCHACPFQLLTGATHAHSPSPRVPTVHGCHACHSPSLGFQLFTGATHAHSPSPRVPTVHGCTHAHSNCSRVPRMPIPTEHGCHACPFQLLTGATHAHKPSPRVPTAHVRKNFENFS

SEQ ID NO: 149157 - protein, 17 aa, Heterodera glycines
IFPPSLLEFFQSKRESH

SEQ ID NO: 149158 - protein, 53 aa, Heterodera glycines
MKFVVQISFFGFVGEMNDFDCDAKIKVCPHSQAINVFSDLSQSTQRWRIFPDI

SEQ ID NO: 149159 - protein, 29 aa, Heterodera glycines
MSMAKIVAKSITAMGTIWDLEHIKRLKNK

SEQ ID NO: 149160 - protein, 47 aa, Heterodera glycines
MNSKICQIIKNTKMYVYRRHSVQIAEVREKILGKCGHHVKREKEQFN

SEQ ID NO: 149161 - protein, 33 aa, Heterodera glycines
MIGRAVRNRPFIFEGICKFILYPRKMAISFFEK

SEQ ID NO: 149162 - protein, 26 aa, Heterodera glycines
MTVRKKVTDGGGRCANEWWWAGLNGK

SEQ ID NO: 149163 - protein, 34 aa, Heterodera glycines
MDRKGQRVILRQMLDQQKIINVNSLVAMINVPAV

SEQ ID NO: 149164 - protein, 249 aa, Heterodera glycines
MYSVFSELVRDAFYNDSRFLTVRDKAFQEMVNNTEVFRLELDPNRTKKTGEFPQSPNATDPLRNRPTTVDPKKASTSRPRVLKSRSRSASVYERSRRVSQTGTRAHVIDFDEPNTSAGANPVRGGGGGRFPIDDAMWLSMFRRLNNLTRTVEAIKICLQSILAAQQLNSWDINHCNEGIYVYDFLDVGVGLAPAHMRMHELVGHFEASIALWSDGSIHSKLPCVPDVLDGFAQFGPGDVVGCGMDANNR

SEQ ID NO: 149165 - protein, 161 aa, Heterodera glycines
MRKVPANEKLNALNLALNKEIINYFNYKKSVEKNKNNIFLLKEFSDSYLKLWEFVKELYFDLSRICAFAREYKKKYVDGLPILKGLWFMKTEAKSAFDFTLAKTIGQGNYHVWEEEFGKMYWDHIMLINAQKMPNFNELKRVPDPCEEAKIKVKTRGTIVG

SEQ ID NO: 149166 - protein, 154 aa, Heterodera glycines
MCKIPFIKLSLLLIILIEIVNVANGMNYKYEKLNEPLLEKEDDSDQPQFEVIEDGTTEEEDMEKAIKILKRFFWRVIMAMNCKNNTIKKPEEIGFQKSYKELVEICEYWKMLSIAAEAYVKSWERCRKGQKQEKEVEVGTSSTRAQETLKTEEN

SEQ ID NO: 149167 - protein, 124 aa, Heterodera glycines
MCESSTKFMEIFGKESNCSPIDAIEQFQEMNSLELMPNKPLQIVLEESVGILIVVANDKVHAMMKKMDKNSDELKQLLVPDPCDEAKLKLKKKEMMNKADQPINVNIIDKNEVVYVFVADVKCL

SEQ ID NO: 149168 - protein, 155 aa, Heterodera glycines
METKQKNIHLLNLTRLAFKGDPYFDGFENSILKKQFSNPPAQNGLNALSDLPDELGVFSDLSDQFKQLSLTLGCFTCFIDEELTCCSNLSCAFKKYQKQQKKLKNENLKDEEKLKILKKVKREGDKLWKNAQQLGLGNFGTPKNTLSFFILLDKL

SEQ ID NO: 149169 - protein, 304 aa, Heterodera glycines
MAKKKSLLKLQGKRGAEQLRKRREERKAQTAKARQAYLAKRTAPQPNTDAETPQPSEEEPSTSEAPARDNDGRPPSTPTPMAPLEMDVPSVEMVDTDVQIPSTPADEDQQIQPMPSTSTARCDHMATPSTSKCAGAFGLDDVHMFDELRRRHVWTEEELQRQRRSNAFLRKQLKAQRDRSTSLERSASSCRQRKALSDVTNNQHEDNRLSAANDLLITLDAGISFKAREALKRSFAGQGHDVWAPTRAVKRLKAELCEAVNFHWTGNGETRALVSVDVRAMIEGRLQDLVNSGEREKNNRILKC

SEQ ID NO: 149170 - protein, 309 aa, Heterodera glycines
LMETPEATTTTTNIHWQRQRRRTVATARAGGHFARELRDAALTERQRAANLQQKSALKQPFGCQLPSSLHNYAYHQGGQAVDELIRDMEFKMRSANDTCTKCHQQIGGDPPGVTALGNPYHVTCFCCDVCQKQLAGCSFYAVDGKNLCQVDYMNSLEKCDKCKMPITQKILRALSRAFHPECFACPICQKSLDGIPFTVDKENQAYCLECYHEVDKENQAYCLECYHERFSPRCAACLKVIAPNGNETEVARVIAMDKSYHLDDKSYHLDCYKCEDCGLKLNSKIEGQGCYPLESHLFCKNCNLKRLKS

SEQ ID NO: 149171 - protein, 139 aa, Heterodera glycines
MFNNKKYVHNLNYFKIFISSSSVVIYRIACGEGLYQHLLAYEVPLVKHLLAHRWQSQADTDCRQQIAEHPIHTIQHQSANAIKPRGTARVPRHAILMDDNGYPTDKTQQSHPPKKAGTSSTLTSSRLTNEAKAGKASTL

SEQ ID NO: 149172 - protein, 66 aa, Heterodera glycines
MQQRLCAQRPNGGQLPEWPIPASRAWPMCAVECRRDTVHHAKRNHDDDEEEQQQQHYCSLVNDNKQ

SEQ ID NO: 149173 - protein, 396 aa, Heterodera glycines
AMLKHSAIAKFITRSAKSQLIVLNADKYNVFLSAGTLAGTLWLVDHFVPWCPPCLRLLAELRKLPAEIDGRPLRLGTVNCEAEATICRSAGIRSYPHSVLFTPDGARHPIVGSHSADQLLEFVAEALNPSVLALNSTLFMERVVHRPKGHLFFVDFFAPWCGPCQQLAPEFRRLARQFSVVLAPEFRRLARQFSVVAPQADIGSVDCEAFPDICDGEYVHSYPTIRLYRHRHDLQPNQFSDYPNQFSDYPPNWWRNAQSMAHWLSEMMPTLVQRLAGDFHSTVLGSDQPFLVDFYAPWCGHCVQFAPTFPWCGHCVQFAPTFDKLAKLLEGKVRLGKVDCDRFGHICQMAGIQAFPSVMLYPGKTLFRPDFFLYGCGFIHSSFFYQNKQRKKKINK

SEQ ID NO: 149174 - protein, 84 aa, Heterodera glycines
MTLWYTVGDLKMPGIYRRNQRETADQSRERWNGNHPPTAGPTSASFRKANGPWIGHFATNLADNHFKIDFNIGAKLSRISERCQ

SEQ ID NO: 149175 - protein, 990 aa, Heterodera glycines
MRLELSVADTEAPSIMGLDWIIPFERATQQPIATTLEQQSLIVNSVQPTNDPVKLEGQIKASFPKVFQPGLGHCVKTKATLHLKQNVKPVFCRARPVPHGVQAAVDEELDRLLDSLVLKPIDFSRWAAPVLAVRKKSGNVRICIDFYTGLNDALELNRHPLPRTEDIFHALRGAKVFSQLDLRDAYLQVELDESSKQLVGINTHRGLFQYQRLPFGIKSAPSIFQKAMDQLTSGIPGVFAYLDDIIIASADHSQHVAALIELFSRIQDYGFRVQLDKCHFLKAELKFLGHVVSSDGLKPDPARSDAIRNMPSPHDIGTLRSFLGALNYYGRFVKEMRDLRAPLDLLLKKDTPWFWGPDQQKAFDQAKQVLQSDLLLTQYDPSLPIIVAADASQCGIVATISHVFPNGVERVIEHASRTLTPAERNYAQIEREALSLIFAVQKFHRMIYGRNFTLLTDHKPLLAIFGNKNGIPIYTASRLQRWALILSNYDFTIKYVKSANFGQADVLSRLISEHRTDEEVIVAHTSDNDVDSTEEVEYALLVNLEQLPVDAKEVSELTTSDDLLQQVAQFVRSGWPNKCPANELMPFYSRRDTLTLVGGSILTGNRVIVPAPLRQRVLKTLHFAHPGIVRMKALARNHVFWPGLDSDIEAMVKHCAECQFAAKMPPKAPLRPWPIPGEVFGRVHIDFAGPCADGNIYLILVDALSKWPEVMHMRTTTAKGTIEALNLVFHRYGAPKEIVSDNGPPFTSHEFKDFCRLKGIKHKFSPPYQPHCNGQAERMVDTFKRQAKKNAKSKNQQWISEFLFAYRSSPSPILNGFSPAELFLGRTLRTPLSMLEPRQHTPNENNNQRGQYQSRMSQQYNQHHGTKSRSFNSGDSVLVLNYGRSGKPSWLEGKIVSGSGLIWKIEIPILGITVTRHVNQMRSFSPYISSKIVSDQIQAAPQQPIPPMAPIQIDQTPVRDQTPVRDRTPEPVKSPRPQRQRKKPICYSPG

SEQ ID NO: 149176 - protein, 29 aa, Heterodera glycines
MGKALLLVFIMLRIANRGHLRLSKDTKIV

SEQ ID NO: 149177 - protein, 452 aa, Heterodera glycines
MTIPQIDANGTELVVKERHDALPAIKIEIEKGEKGKERANPTKNNDTSKGAECIGRRRQMELVDFGGECLSLWLSELDPLLKGSKLMCCPTDEAAVAPSNFSNKANFLLISRASALFVASRVSLPYESVVARFRPNFVVDFGPNSKPFEEENIEQLAIGSVEFSLSFGIYLEQKQNDENEGDERKQTKTNPMARKKAKAMAREMRVGCANLHKHLAGLSLENESQQQTQMPSREQFQRLISAFNSMAQKLNYEEIVQGSEVEAIFAQIDAYLVTVHTEQRQKVTELEAYKDKDEKRLDEAMRREKSKEWGELNEVLDQQKDNEAIIHFVSHEMLKNIRTKLEEIALFHFLTNAVVQKKYKEYFKCFSKREEFKKKKANAEKANEKETFGFGDACATSMLACSLCNVCESSHVDAGHDGKRIIKTRVKRDGIPGPTPSGYRSLLTLINAIFSQ

SEQ ID NO: 149178 - protein, 106 aa, Heterodera glycines
MPMLWLPSLPCNFQLHFARFIYDGLLLQSFKRVAQKKNRINFKTNREIRRSDGGAATAETGQTAFAGEWAERAPAGTGTSAERPKGPVTNEESDERRSIWCRIELN

SEQ ID NO: 149179 - protein, 132 aa, Heterodera glycines
MKFFLTFLLLAISFLAIKTAADGSDDRNGDKSLPNPLAVEGKASKRSERRIIAISAIMATVMAVTVAEVGAVMSRRDGAVGTTADLEEEAWAVAWAWAAAWAWAWEWEWAWAWVEGWEEEDGDERAFLFIRN

SEQ ID NO: 149180 - protein, 133 aa, Heterodera glycines
MSSNSSDHQNEEEEAKGTKSKSGDSYYLPKAASSCLCPAAEFGRLTAQRAYNDSSFGNPKILPDGRIEYELAVVSDLDHDSKMEDRKETWRSFFRRGRLLFRPDIPSVQVQWAKDKQDNTLYSQLSSGGRAME

SEQ ID NO: 149181 - protein, 25 aa, Heterodera glycines
MVRHSQEMVFLAEKSVKRHLFRNGR

SEQ ID NO: 149182 - protein, 180 aa, Heterodera glycines
MDVRVVVPVWLVLSFVIHFGCPSYSDTFLCYSDVPVISPAALKLEAWLKLRKFTVYRVTSGFLFADLFGQQRVPFVELNGKQLTGTTDRIIEELEKSEVAKEKAHLIMDEENLKRHGYNEKAELREFRRKERLIRRTFDEIVTKWVQRRYPACNHTPGTFSNLKKSRLTDVVILAFLDPL

SEQ ID NO: 149183 - protein, 71 aa, Heterodera glycines
MPLVRNLVGAIRKIREDLQNKFLPLLAKIKYGRTLTIFALYNTKIRVFCVNFQIQIKFLVAFSESIIRIIK

SEQ ID NO: 149184 - protein, 83 aa, Heterodera glycines
MALLHPFSPNTFKTTEPIVPIFFVCLNFFLSKHGSPHSTSSMNYLAKVTFAIRLYYRSGLLETEIRVRKTPKFFESRPETETY

SEQ ID NO: 149185 - protein, 113 aa, Heterodera glycines
MSDAQISAPSVFIISFRSLKMFTETNDPGYVGAHVCEKSPQAHTQGSQRFSAALLCLQYSDCTISPVRESESECKREKRKNLIQKRNEAFSFLLFVLETRKGFCATQDFDFSY

SEQ ID NO: 149186 - protein, 94 aa, Heterodera glycines
MDFLCNKRGILYACDIAAIEKPKGCRLTHGFYWKILIQGTGYFPAIFHGFYCDERDIKTIIIDDAEFDDELGHCRKHRKSEQPPLPKVWFAFVK

SEQ ID NO: 149187 - protein, 252 aa, Heterodera glycines
MFDFGEKFGKFYFPDQTNFNPNTPYDPAILAEFTAWRRQFLAQNVVPRPVVPDLPDLPVIKEEPEEEEEESEFGLPPQDDLPDEAAENGIGPHHGHANLAPLEAQNWEALQPQAQQPMAMAFVQPFLPPMGMPPPLGMPLHIRMPPHMEMPPPMGLPPPVPFAPIFANPPPPIVYPPAPIPQPIAIPPARPLYGAFSAPQRPPPLINMPFAPWNYVAPIVKTVDVSFVRLPPPPEPPNLRRWHDHHDEPPPP

SEQ ID NO: 149188 - protein, 98 aa, Heterodera glycines
MNRRWVCNDVWMDILPSFDHAQLGLNLALLSPRFNALVDKHFDGKSELTLWRTIIICKHAVAAVPNFSVFTDNANSVEFPLPDRPLPNKLRFKSLHIK

SEQ ID NO: 149189 - protein, 107 aa, Heterodera glycines
QQKGRLTLKIEKFFCFSRGGESGTERYSDAVNIRGFSFKILANTYTMSADKSKKCLGFFIECNKNATLQIVVQKKYRNSTGGNKQFKDANFSAEKNQLGFRDFVPIE

SEQ ID NO: 149190 - protein, 74 aa, Heterodera glycines
MPFLETIFILGPPIIHFLIKRNLFINICMASNLVDRLKLMLSTANGADIQFLVGQGEEKEASWPTKEFDKITKI

SEQ ID NO: 149191 - protein, 106 aa, Heterodera glycines
MMTASNVFESMFRFDDKKPKTETPSAKTDSSVEIPDISANAFKVMLSFIYAEDLSELNGENAMAVLYAANKYNVSSLVKACLEFPINELSNVFFAHDQARLLNENV

SEQ ID NO: 149192 - protein, 15 aa, Heterodera glycines
MRFGQCNPSSDERNP

SEQ ID NO: 149193 - protein, 112 aa, Heterodera glycines
MLSFIYAEDLSELNGQNAMAVLYAANKYNVSLLVKALLDVPINELPNVFLAFVEARLLNEHAIRWADEKCRQNAVECSAENRRSALGPALFRIRFPLITKRDFSLNIGSFLC

SEQ ID NO: 149194 - protein, 81 aa, Heterodera glycines
MMDYEMDNQNEEISKLNSQKDEVKKYQKDEVKKYLIKKKSSKYVYKIMKYVKSPNFCKQEKECFSYYLEYGEARKNMYCIT

SEQ ID NO: 149195 - protein, 75 aa, Heterodera glycines
MALLRNDLALLRNDHSGTFTKSPKVALLRNDLALLRNDLALLRNDLALLRNDLALLRNDLALLRNAHSGTFYETT

SEQ ID NO: 149196 - protein, 135 aa, Heterodera glycines
MKSFILLVLILFLIIIFDQDESMKKKLQEKSFDEIFGEKWQEKEEQQRNEEKIREIIRKFYKIKEKIKQKGRKYSTKEWSKIISKIAKKLGTNRSKIYQWISSLSYAGDAGRNWGQIEVKFTSGYPPFPMLGMLG

SEQ ID NO: 149197 - protein, 93 aa, Heterodera glycines
RKRGIEYRKKRGIEYRNDSFIILWKLLLVRGINSNILKSGSNNNNNNGKRRNFWHYVRALNTDVAFNKKFRLMNAKSKFMIQTLPSNPESLLR

SEQ ID NO: 149198 - protein, 192 aa, Heterodera glycines
MFIDIHSLDTDDDDYETDFTTVTITPTTLLEFKEYMRRLASASSSSPTTTSISRSSLSAILGQSTTTVKPTIQLLYSDSLDSTYGGGSSSTWIGEFIISLCSSVAGSEEGGCGGSHVWTKDQVTNSNEARNNKNNNNNNNGNEQHPNREDAFHLSDNERVLQRMFSRGSDPQNDRITTASPTLSRISDHQHG

SEQ ID NO: 149199 - protein, 193 aa, Heterodera glycines
MRDLSARMKRVTAISDSLTETFAKNCETVKRLNGAKGSVQRLEFLIKVPQILQNCLRDGEHVKAVETYVTFKPKINKFGYINSLKGIEKDADQTMQDLKLKAVTLLKNLGEPESELEKILLENWESEIDSELDQLAANSSFRNIGRFKDIFEFVDIGCCHFLTNLSLIAYTFLQIFVKPGDRKYRIKFKNLKS

SEQ ID NO: 149200 - protein, 146 aa, Heterodera glycines
NGVSKNRNYAQKASQTILTLPIPSTIAFIHPIMSAKIIRVPKIACDLSLAKNGVSKNRNYAQKAPQTILALPIPSTIAFIHPIMNAKIIRVPKIACDLSLAKNGVSKNRNYAQKASQTILAHPIPSTIAFIHPIMSAKIIRVPKIA

SEQ ID NO: 149201 - protein, 133 aa, Heterodera glycines
MKKKKGKGKEKEKGKGKGKRKGKRKGNRKGIGKTKREKGKGKRKGKTKREKERKQERNRENEEGKGKREEKRENEKGKGKREGKGKTKREHFLMVHATYRLRSHAIFGTLIILAFIMGCIKAIVEGIGSAKIV

SEQ ID NO: 149202 - protein, 240 aa, Heterodera glycines
MCFSCFSHQVEDALFSEFVKGQTTNLEKFIKLTKGLNNFEKVKEDLMQQYEAHLGFSYFTKNNLQCDKIVGESREMLREECQKHRKYLQILHEYFFRLYVEGKKAEFAKKLPAVKPIFKEGHFNKSLIYALQMLNENSKYFWEKSGKKLEIYLENEEELNYAINEEKIWINENVEMEKQILNSQKGQKSTSEIEIEAFRREFEQKQMEKMSEKSATGPGPGSGQLSTTEYQGPGFDRDRD

SEQ ID NO: 149203 - protein, 99 aa, Heterodera glycines
LINDFLKDRKAFEEDFYGFLLKLVKSPILNQIVAFMRNNFKVLAKRIELVFPFFSFFPLQDAKRKGTARVGNVRARKCGGIARLATVGLFERASDGNWG

SEQ ID NO: 149204 - protein, 71 aa, Heterodera glycines
MPTEGIGGKASEKGQLSIESFESSMPKLHILFDRHIHLTNIPKEIMCFFDFRFAVDFACHQCSFDHSFPSH

SEQ ID NO: 149205 - protein, 886 aa, Heterodera glycines
LEAKKIQILTLTETWTMENQDIPFCPWIKENFNYIFASRKSKNLLRGGGVVFFLEKKLNLLNFLILNLIVNLVLQLQNTKSIRLILIYRPPRTTFKQTKNLFNFLQTFFCVNSIILGDLNFSKKDLVWKEGKPFSLSNFGEIFCDFFNRFSYVNATNGPSRGNSWLDLVLPANDKIVTQCSIEGGIFSSDHLAQFFILTVPELIPKSKNINIRRFTPSNVSLFNVVIASRLRALSFKLFSVNKYVSFNNALLETLDECIPIKRLPKMIWSINILGIYWHPLKKKQNYINKVKLTQQKKHFMIALLHIKIQTNKFHSQIEKTAISKGKQSIFKYLNKYKDNPFEIPNLVFENKCYYDSAEKCELFANLFANSFSISWADPKAMPKVECFISDIDFNIIETQTLLRKLPNKNGTSPDNISYKILKNCHSSLATVITDLFRLSLDSGSLPDIWKESIVFPLFKKGDKFNPENYRPISLTCSLCRVMERILSKNIYKLKNNKISESQFGFVRNRSTTNQLITVVEDWYEAIINGKNVDCIYIDFQKAFDSVPHNLLLKLKKIGIQGKLLNWIKSFLSNRTFRVKIGDTLSSVKKVGSGVPQGSVLGPLLFLIYINDLPDVIPSGANIKLYADDVKISRADTEIMHKTLHNLFEWANKWQIKVSIQKTFVLYLGSKNPKETYKFDGNTINAVDTIRDLGVNIDNKLQFSDHVNQITRNVYLRMRSLFRIIKSKSSKIWITLYKTYIRPLLEYAPEVWNPSLQKNIKKIEKCQKYFTKRVFKCNLPPIPYQKRLEYLQLPTLENRRKLFDLFMAHKIVYGRRNYFQFLTHQHALTSPFRFNTKYKLGKKFIKLSKFCHKFNQFKFSLSLSLCEKTLSDRFCTQIKLKIILSF

SEQ ID NO: 149206 - protein, 108 aa, Heterodera glycines
MLSSQSFPYLKMQLIDQKCAAGLEADDTRGTVSRYYTDDLELDLAEYGELLNSTRHFPRFCSAFLAQQKKDENVFKSLGTEFAAAYGKALSIFEEEVEKKKQMLKMSN

SEQ ID NO: 149207 - protein, 120 aa, Heterodera glycines
MGHLLDETFALNAAATVVDKTTESGQGTRRGGQQRVDGKIEELESLALLMNESPQNRARIVRHKEPHNGTPRHNTNNSANHCGQNLWRKPSTFASSERLSAGDATELNNLLIACNYWTDG

SEQ ID NO: 149208 - protein, 70 aa, Heterodera glycines
MLLNDGTFKVLHANIRKIGNKIYNKCVALKMTKKDLTVSDWQKHVKEWKIQRSFDTFNETKRAHIVKLIA

SEQ ID NO: 149209 - protein, 81 aa, Heterodera glycines
SSLIHFEVGELSRKLSSQKNELPKSGERLSKKWCQCGRSEIEKMKPMALINFEDKKPIELLYQKKRLGKGSYSEVGKMLKE

SEQ ID NO: 149210 - protein, 381 aa, Heterodera glycines
MDKFKAHLEEKRKLFREELAKAEDKSKESVERKIDETERLLWMASLKEWKPSERLWKVPCDTGKAKTKPNRMWTTRIKAEKGEAKKAEGEKNAKSNKMLANLMKSIGLTLSPSIQNANDSIEMKFEGTFENLQDSFYNRSSKQPFDQSNQIVSLLLEIGYRNLLEHLISIIERYESDAEMLKKVVVIVSGRLDSEWKKINELAAKYEEEEAEEEEEEEEEEEEEEEKEEAESETEEEKEESKNESNEEMEEQEAKKEGEEVKKEPEEEKEEGQFVFNEKEEEEEEEEEKKVENETGKKVSQKEGKVEEEEEEEEEEDEEEEEEAEEEEEEEEEEEEEEEEEAVEKCCWYTKTIEQIKAVYLYELIYKHFIAEVENNATNNS

SEQ ID NO: 149211 - protein, 170 aa, Heterodera glycines
HFVALSEHSLIICLLIIFFGGFALGLIASIFFRCMLGKHGHSPVGTSKSARKGARDRAALHSLSSISVPVSALCSAQAENPRRNWQFAIAGLLIASNLFVGITFACIVPFFPIEAEAKGLSTSQVGLVIGIFQLCSFFVSPVFGKYLVVLRVHRAFIGGLLFTSLCTIAL

SEQ ID NO: 149212 - protein, 78 aa, Heterodera glycines
LMVTTIAFAMLGIVSGAAYVPVFKWCVDAAKSVPWWMECAIYNAISVNALIKQRGIGRHFACHLRVYLRIHTVGTCSQ

SEQ ID NO: 149213 - protein, 131 aa, Heterodera glycines
MPALTEVYNCALSLRNKGAACKDINWLIATYKIKATEEDDIIDVVDCPGNVFMGCQTFSCLDEQNNDIFVLNGCAETKSCSSKLEKICKKYDGFASCVICKGPLPVCNKEKIELKEPFPPFNDGHAHRWFV

SEQ ID NO: 149214 - protein, 19 aa, Heterodera glycines
FSLGDHLTFWQASLSPHNH

SEQ ID NO: 149215 - protein, 56 aa, Heterodera glycines
EKPLLDFDKEFSDQFPFGPFLDDYAGLWLLGLDILPKFGPKTTNISMEKPKNCQLE

SEQ ID NO: 149216 - protein, 534 aa, Heterodera glycines
MPFQQKCHSNNAILNAILDPPPRSPHHRQLSLQLSNQLNTSLSRARANRRIRLLILKLSGQIDRLFKLMSVDDCLAHPCLNGATCVDGFGKFQCLCPAHFEGKHCEKRVDECALFANTEGKHCEKRVDECALFANTEVGCQNGAICRNNPAGFTCNCTAGWRGRLCNRKDNKCDHSADLCGEHGHCVNNEQSEVREKEKRVLGYRCFCESGFVLGGDPSNPTCVDNDECSTNSPCHPGVNCINLPGSFKCGVNCINLPGSFKCDSCPSGLIGNGINCYDFDECASNGINCYDFDECASETNDCSKEPRVDCVNTHGAYKCGPCPPDFVGDGFTCQKVSLCAFVGDGFTCQKVSLCADGPNKVCHPEAKCVEEPEFRCECPPGTVGDGLGPDGCEANNRTLCHGDSCLNGGTCQAISVSAISVSVFRCNCPEGYQGARCEHASGARCEHASPCLSRQFCSGHGRCRTSPLGCDCFRGFYGPRCQFEEDGGGRHLPFCANNNFLILSHSNISPQAFLFSFLSYTLFSCSLFSPISF

SEQ ID NO: 149217 - protein, 178 aa, Heterodera glycines
PTAATVGTVRYAARGGGGTPFRQPSPFAAPAGAAGGELSPATAGRFVGIDQQQQQQQIDALRARLDQLQYELLGQVQYATSAAAGAEPWPPAFFTVDYNNHPKSLLARRHMAWQPMRRGIIENDKLNFVKTVKEQQHGSVSPRHISWQPMKRQQQTEYGITGMYGRGGGDGGGAQKEQ

SEQ ID NO: 149218 - protein, 252 aa, Heterodera glycines
MACAVAAERATIHQELQRFTLITELIRVEELQETQVNITFRHQLNSVAEMMDMLQIWEEDTAISCRVDQNDETKPCALGFVRRIEKRALDNGFEVRVEVFLAFQDAKGQKAWEQFEFLREGALEAVELRPMVSTRALRERAELLTKNGCSIIAKDHASPANVIMAILLGRRVPRDVALQSVEEKMKKGAVGLLKAGQCDSAERMLDGVPRVVFQQAGPGTGKTFTAAAIMAAILREDPSARILAMAPSKIAV

SEQ ID NO: 149219 - protein, 353 aa, Heterodera glycines
MSSEKACGHNTENEMEGEAEEVPAQAPEVVVLDESIEENACGQNTDNENGVVEVMPLVNPSDPLGLATVEPVKEMEVDEQNGDQGGDNFGNGGFSGDESSSRHTFLSKKAKRLDQTNASKCSSSSQACLEDGALIDEFQAVGLRAKDKLTKTRVQGPYPGKKEDEKAPKWYLVAQIAANGVIAARVQLTEQWPALIWVDNDIVQKTRPLEVGDSVKVVSVEWAQTATGWAGAGDWLIMVNKRLNHQAVAKEVSACYQGPFSSALGLVLYVERHAKKNGNKTMKFATIAAPELPTIMRIQRRHMSEAMANELHSQSLVQMQLVTINRPQGVLISQHYVLPMGFPFKKWRRDFGL

SEQ ID NO: 149220 - protein, 107 aa, Heterodera glycines
MTPSTDETHFGGMDRPFVQAHLDQFNCALGTEDELDETVNKINALCKTHSIGALDFLDGLIAFMKNGKRATVSMQILDNYEHQVLLRMNDSEKRRKATKRTAPLDYR

SEQ ID NO: 149221 - protein, 147 aa, Heterodera glycines
MAHSADQFVQLLSLVAASHANALILFGPFVPQGMELMTDSPEAIFSDLLAEIDKNIPANVRVLIVPNSQCDQLNALPSFPTPPLIGPQNDTVPNVVDDCVVLNPGRFDRGKGTGTFSVLDLDLSSAIGATSVSPFCEVSLFSTQQQQ

SEQ ID NO: 149222 - protein, 56 aa, Heterodera glycines
MDEQEMNQLLLNHAFGFQQQMQNGRRQGEDVRGVGQQTEFIWPYQVFSTVIDFESS

SEQ ID NO: 149223 - protein, 585 aa, Heterodera glycines
NSGTEAKRKQKEWRQEHGRRVGSTPKRLKQTEAVPTADGEGTSTQAAESGPSTSALDLCPHSSPRPLSTTPVRRHARVRPKTTENATQMELTTADKATHMDFTTTDNATNMDLTMMDKATDVDLAYEDAATQTEQLDKQLKEQEQTISFLRLQVRNRDAMIADLRPLTSTRCKKNAATLERTSRRNLAEKIVDVIDRDRSRSVSRCSLQTLHREVRHKFGHYTPMKKEQLRQQQTIHEEDALLLLSQLGTQKAYERMKALASDRFLGGDLSFLWAIIGHCGSAVTTYPSPICECRRDQLLDAEKCKMRTTEETVNQAEQFGRLVQNGEKPTVAARALTMGIVDEPLLQSIEFERIILAPFHVFQGIGNALIKELETSTESAEIANEFFRNIGTRREAFRKKDMTGNSIRKILIHADQLERRYSADWPKIICQTLGHLAKIQTFTKAQPLSPRDLDELETSIDQFRTFLNDQPRMRTLLALKPKVHLLLNHFVPFARQHQFLALLDEQGDEALHSVWRRLEQLWKTMPDEEQIRQLLDHHFVSNWLLNTGKIDEMKRDREEQQEEIGDRRETDEDSNGEEEQFDFE

SEQ ID NO: 149224 - protein, 24 aa, Heterodera glycines
LTHRPLRRKIQLNCTWSPKLTRRV

SEQ ID NO: 149225 - protein, 50 aa, Heterodera glycines
MAFLETFARFPYYEFIWKVELSDEDAKVFAKYKNVNPVKWMDQKSLLINH

SEQ ID NO: 149226 - protein, 55 aa, Heterodera glycines
MYHRNKGYYSTYCTFCGGLIKAHVLSLKHERHNSVHHKIIHFKKRWQISLLCLMD

SEQ ID NO: 149227 - protein, 122 aa, Heterodera glycines
MTSVLSCFIEMFFKFLFETQLHELPHNSLIFGMSQLKKPIDNFLFINQNWHFTKRGDLARVIMTNSDQINPLPMKNHTVADQHVQCQAFSSQPVHWKSAQNHKCYTNQKICHPKGVAHFRQR

SEQ ID NO: 149228 - protein, 227 aa, Heterodera glycines
MDFFVPNVVLDFLATIALNCQQYGNVCIRLHYVVMAANRAHAVLFPFNYAQNITKKKVFVQCVIIHLISIISIPFYQYVFFNTSYLFVTCLFYLAIVIRLAWIKAQKRRWNNAATDAATAQNPLDKESARITVVCIAVQIHGICFVLLGNLTITPWYTMLTICTNYDPILQQLYYPITLFVGRLYGHACAIRANDSENVCAVSEAWNLNNDSSNCTGQRMRHNANAN

SEQ ID NO: 149229 - protein, 31 aa, Heterodera glycines
MKNFSDMTLGRCKPISLEAEIETKKKLEGAT

SEQ ID NO: 149230 - protein, 104 aa, Heterodera glycines
MRILVTGYGPFGAFTVNPSAIVVDQLAQLCRDGTLGTDDADAIGIELVTRVVEVDYAGALGCANWARDELNVDFAIHIGVYPGSGFVFLERRAFRDGYVSKDVK

SEQ ID NO: 149231 - protein, 497 aa, Heterodera glycines
MGRRSTREFALPSFVGQSSEWIPGCKGRRLVSVPKMQTIPDQRNLRDREVQAAIIRKIVHFLEDRVNPAPPFSFGKPDFLRFPSKIAFQDVFQYLFQCIEPTYQVRKLETDALNFLNQLGYPYVLKQSTMQTITLPTSWGLLLGSLDWFIDIIEIENEMYQNLDKIRDDPQWNLLISCFKKFMSKGHGQPYDREETFKEAFEEYRAQKMAEKGIDCNAYDELVARRVAQEQKIHKLEAAIAEAQCVSEQLEKEAVDCENDIASMDRYIEEIQMVASAKERTLNEITLANKELVREELVLLRENLNKTEARIYERQPIIFKQSAKIRSDYNAFMSRLRVICEPLFSEDQLQQHLAELEQCSVDQAIVEFQRCRNDNKLTRLLNQLKGMMECQIRAVQQAEESMRVTNSKLVDEINELEFSKEQAIFGLQKSFGRTIQRIVDGGAGESHETLRPLSADRGEKGRTDQKKRFAELANEMLTKNKEDLKQLETKKKAETED

SEQ ID NO: 149232 - protein, 66 aa, Heterodera glycines
MKIKWGMENEKWRRRSNHLSFISADCWLCVYDLLPASQLGLGIAMISHRFNFYVDEHFKTRKFIIQ

SEQ ID NO: 149233 - protein, 149 aa, Heterodera glycines
MSDNRNEAEQKMAKAIFISADCWLCVYDLLPASQLGLGIAMISHRFDFYVDEHFKTRRWNLGSMKIKMKFEADGTKEMDVVNANLESFGITQKPLPKRVVGFKAISLKRDFDTFLFCKTIPSFFTGTSTTMSSLFSAVFVQFWPPVPFI

SEQ ID NO: 149234 - protein, 180 aa, Heterodera glycines
MIATNIRGIQLSKQSFRSLRKFVPSILDDCPSLRVAANSNGFFTDFPCDDSAAASNGQAVAKWLFTPRPDNVPKVFKCWLNYGSWHLEPEIEDFKAEFYTASSPVNFIAVIRIDFSYHRPLPFVLTNELTREQLMLKKMNDINRVLLIRCPIVRDESKWAKWEKEAIGWNFMDQWNRIDI

SEQ ID NO: 149235 - protein, 81 aa, Heterodera glycines
MKLYYIGCIYMYDVTRNKIRRMEKINSSIYWGWTKGIFRLIDGPKAHNEKVPLEMGELLNSLNDAQIEQELECVCSFFTSD

SEQ ID NO: 149236 - protein, 291 aa, Heterodera glycines
MSFINFLFGFFAVIFLNFTTQNDGNGTVLAVTPNKNPQHLNRAPLSSNSSQMPNKMINRFSSLKLVDDLDSKEIELFAEYFKKENIVANEEGSGEAKTQKMSSKKHKGQTVKEKRDTETIEESIEECETEKEKTVRGRKGKEAAKENDRLKEKIKEKTVREKGKSVEESEGRKEKKKGKKFKEMGEKIVEMNREKKNGNEEENETVRETDGKACPVQAFAEQVVREMEKGSEVMKSETVRVRNEIGESSGGTEEEKNRGRRFINRDAKNMDIKSIAKYGHKIWTKNRGIWT

SEQ ID NO: 149237 - protein, 85 aa, Heterodera glycines
MACTTESNGISYSMFKTAYCLYVFQMTNAQEDSPGFELIKEGCTAVNIRFAEAVPNEGVTLIAYAEADGLILIDRNRSITSDLTV

SEQ ID NO: 149238 - protein, 151 aa, Heterodera glycines; identical to SEQ ID NO: 132093

SEQ ID NO: 149239 - protein, 419 aa, Heterodera glycines
MIDTKTDGVGNDSVKDFSNMDLEDEVMRQKLGNQQDIRDYLTEIEGELKRAEELTIDDCIGQADRIAELAREIDECDGALEFVDDMVVPHTMIKTIIEREVNSCEFLEQLHELQHKLQFIKTQQFKDAKSVGDVHDVVENLKYKAMEKIREWLLLKISLFRKPLTNYQITQNALLKNRFFYEFLLANDRQVAREVKDEYVDTTSKMFFSYFKAYVSRLFKFQTRSRATVFSLGHRQNLLLDDLLAPLIVPHVAQENNETFQFESLFRSVQYALVDHCSHEFLFICDFFMVNGQSAIDLFTSVMGRSISLLLKTLEEKIAANFDAISLFLCICFCAKFREMMTDRAVVVINGYWDALVGFLWARLDAVMTAHSDSVRAIDVRKVPVDSRPHYVCRRYAELICSLLVCSELAYKVTDPRLQ

SEQ ID NO: 149240 - protein, 142 aa, Heterodera glycines
MQTLQKILSRQQAEIEGLLTRLATQLKSKKERLVFQINNYDVVLTVLNERVLADSKERGSFWELQQTKMGTYVEEILSPHFAPLIQFVNECEPLVEQNHTQLLARYTGKWKKGEGKALTFCQGKSSKLCGHSAPSGEDRSTQ

SEQ ID NO: 149241 - protein, 51 aa, Heterodera glycines
KFSILMSLSVTRNHYFGDFVTKIVKNHYFGVLSLFFHYFDIFGQNSLTKMQ

SEQ ID NO: 149242 - protein, 202 aa, Heterodera glycines
AAQQQTTTTADAAPNTDATGAATVTTDAATTATTPPTTTTADGATVTNANEPGATTATNTEAPAATTPATTTNADGATVTNANEPGATTTTTAATTNTEATAATTTTAIADGAVATNTDATGAATATTDAATNTEAPAAATAPTTTTTTADGAAATNTNATGAATTPTTNAATNTEAPAATTPATTADTLSKFIFISTFIIY

SEQ ID NO: 149243 - protein, 37 aa, Heterodera glycines
RGYTFPFLLFALCCAITTQFQFVNSFFFPHRRDDLFK

SEQ ID NO: 149244 - protein, 225 aa, Heterodera glycines
MMQNNAELGKIFYLNTLTAIGSSNPLPQIFDGETASAFYEWQIKFLDYVDVFGSNWSEADKINRLKLHLGAHTRTIFEKLLPTEKDTLSNALKSIKSKLDSPHFRELAYRKLATCYQKDAENHAKNDCASETQQLREMIEDLALEVREMKGLSADHWNASDWQRRTLDRHQDAMKIGEAQAGDNSRGRHSHAANEEEALQSATIVDERDTWHVNAKKDGEMTGVD

SEQ ID NO: 149245 - protein, 106 aa, Heterodera glycines
  unsure (1)..(106): unsure at all Xaa locations
VSPRGXFIPPKRFSSLSRRLLSLPLXLTSVPLLLCPPRPMKSLQIAEPSGATSSAAVRGGRAGVGSGQFGRADGEHWEGTHKLPKEGPHGMIKPRDSIPPLMDTLG

SEQ ID NO: 149246 - protein, 589 aa, Heterodera glycines
MDNDPIHNNHKSSTHNDNNRDYNDYTHNKLANQINHTANRTHNHDNANAMVNGPPNDNRIKLIRWPKSTITTEKGRDVFWCSNHGSTLWELKGPENSPFCRPPPALTAQWTPLTITLYTKIHRPEPIATAWHCSIKTTTENYYTNIVGDKFVEINKEFPLVSKRLCQRMAHQQECPLAKTEMHHDDNNRIWATNDQLQVDFPGPITGLFKGKQTSSATNCFAQPATLFVKWHSLQLLSPIHRADHCNYASEYCQLQDNSSLIWTSACPNDNCFMCDFQEAEEIHGEFTKLNGQTTAFWISEDRQKALTFTETHAVQACDGRQIVLSEQNFGIPKEQYDIIMSNHTRERRNVQPEQLASQLSAAQLATTMALSQLYLKECQRNVRVSNPTLQARKLLKRDNLQARWISETTIEVFPCVPISLSNISYRTTKDCYKFIPVTIHLPNATRDAFLDPEMRILSLISKIASCSPFRYHHLQVQQNPNLWVRIDSRNGNVQRLAQTVIHELYETILNKTDNDLDLHPLIFHQWQLDNDTDFASLPHIDEFEDSEEFKNKLEEQTTQRAEALGALPGGIEGWTVRWLQERLQEAIQ

SEQ ID NO: 149247 - protein, 231 aa, Heterodera glycines
MASEQIREEMSGSRAIPLSIDHKPTCPEVEINAITAEHEFILLACDGIWDVIGNQEAVNFCRERLYRGVLPEKDYSFDDYLAKLRANGTGFEFEHEEEEEGEGVDRYSDAHPQSDSDEPIEEEVFSTPPSHSPPVLSSDSVSREGMTEQQEDGPVPKLEKQRNGTGQKGERHSILVFYWQIELLPLVGVEDITEDVHVPPSPAGAVEYTQPVDSSPGAQTTSNDSTQQRNM

SEQ ID NO: 149248 - protein, 188 aa, Heterodera glycines
KFFAEFDVLESFFDKVELSATESSQKAFDANSLLKVRNRRLTCADWSRVTFNVPAELVREGITHEEFAATKQHLQIFGDFDCPQISTRVELFEGEIRRFGQLRVKNVSNDAASDPLFTIVHLELWLNTDEPKTADYGHANETGTEGIKTKRGKARHSKNPSVIMCADGCGRSGTLALIEVKKTSNTHM

SEQ ID NO: 149249 - protein, 104 aa, Heterodera glycines
MEGSLGLGVMSGLFLSGQLRHFFGYPLVFLLLVLLHLLILAIVFLFFRELASDEMERRRTTDSRRRRQSLLPPADEAQAEDRDAAAAAVAAEGENGEGRQSANN

SEQ ID NO: 149250 - protein, 112 aa, Heterodera glycines
KMTLHLLLVLPVLAMAFAFGNCQSQTIISGSGCVYHNGWVTESGRSRPLTTNERSQLDNYQRQSQSAAAAFSAAFRPPFPFGGPINPQLNLPQMPCFCSAASCAGGVSWVDN

SEQ ID NO: 149251 - protein, 119 aa, Heterodera glycines
TMTVNITNRALKFERLYSSEASLWVNWGGFRPMTTPLCGYNGTMCGQNVTVYILVGATLMLLMLVAALLGIGYAIREKMREKQRLTRECLIPFAELRNPKELRSSEELKADTEKSMRSM

SEQ ID NO: 149252 - protein, 114 aa, Heterodera glycines
MKFVLPFTFFCCLAFPCICYGIHCKVGMYDTSGNAAIVASECAADQQFCSAIGCAIGTEQITVFWACEEQNDTQVLVNRASSFNNNTCLAHIGHKGANMSNEQFDFRELEKLIN

SEQ ID NO: 149253 - protein, 21 aa, Heterodera glycines
MLAFSRMVRPVGIGKSVKKGD

SEQ ID NO: 149254 - protein, 63 aa, Heterodera glycines
MANEQVKLPEKEKPGPIPTISPEALEKTFDNFDQSRSINRSIIDFISIVRLVRPIDKSMRRSD

SEQ ID NO: 149255 - protein, 24 aa, Heterodera glycines
MDVPWAAALAGIVTGKCASDTVSF

SEQ ID NO: 149256 - protein, 39 aa, Heterodera glycines
MRVFNSKALFYGFVPTISVYNDNSCLKLKLILKSQFCCE

SEQ ID NO: 149257 - protein, 64 aa, Heterodera glycines
MSICVDLRLSSADLPGLPSLGTRTKGQEWNRGTELRSAFLLNCTRGVWSTIKWLMMNRKVMMLK

SEQ ID NO: 149258 - protein, 169 aa, Heterodera glycines
MRMNCDDYAHQDSQWRCFVRSATFRIVSQKDGAKDSIGIFCDRAFYNKSTIRGFENFFSFTKLMDPKSGFHNREEDKVTLVIDVIVKNKKTEKFVSDPNKSNWTLSMEIEKLSEFAREVIKSERKSETVRIKGFSWQILAEISEGMESTDNVKCLGIFHSRQFLTNIYN

SEQ ID NO: 149259 - protein, 48 aa, Heterodera glycines
MSKPRNVHKDISNTNEDAVNLGVELCEPNAVIIFYNVEQQTLNEVEVQ

SEQ ID NO: 149260 - protein, 1137 aa, Heterodera glycines
MSFDHPLRHGHLPIVLVRKPDASYRICVDYRKLNQLTKRSTYYLPRIKSILDEVSGKKYFSVADCSSGFFHIKLAKGHEERSAFICHMGLFEWLRCPFGLAGAPTTFQRAMEEVRQMCSATFLVYLDDCIIGSMTEDEHFRDINTFLRTMTEVGFRLKPEKCRFALGEIRYLGHLISANGVRIDPKDLEPIHKLRKPKNITELRSLIGMLSYFRKFVYGFAEILQPIYELTKNESTTEWGPPHEKALEELKTKLMTAPVLAPPKFGQPFVVETDASIKAIAGCLLQENREGEVHPICYFSRVLTKHEKRYSVVELEALAICASLKNFRPYLEGAGKSTVITDNSALTSLFRRKDLEGRLSRYQLAIMAFDVEIIHRPGKRNQFCDHLSRYLDDNDTQINWLKIEPKISQSEMREAQKQETDTQKRRETLKKDQNSEEPNEFTGKWRITEDLLCAMDRGEWKIYVPSSLRQRVMKEYHSDPFQGGHLGEKRTKDKIRRNLYWEGMEKDIQKFVRTCDACQKRKIIGNQMSSEPICPIVPASQPCERLHLDLMGPLKTAKGGFQYILMIIDSFSKYMTALPLWEQSATTVTTAFVDKFLCQFGIPKIVVTDCGTQFLSSTFESLAKTWGFKHQTTVPYHQSANGQVERFNRTLADMLVTTTGGKDWAAALPMLCFAYNTSINSQINHSPFFVLHGFDPRLPSEMLLEKDGEEYNDMAIYVQELTKRMEEAKSRIRESLKKCANRMIQQQKGTKEVRWTEGMLVLRRRNDKKNKLEPNYEGPFRVIKIEKPNLQIRELDPDGQPFTVHMDQCKPYFTNEEAEQDTESLENEKPKHKNGNKKLGDSKLEESDEEMHDGETIVACISEGNPLGQPKDKEEMETPHQIEIRLDGTNFFAYLSTSNFPATSTISENLIKNDWEIFEDDDKYVIMWIFDENFKLRISNGWDEMFFGTGVRKFLKNSGNLTMEDGKAFYHEQFINEQNQIFAQPIIPDVWITLRDHTPARQTNPFNPFFETIEPQNIQSFSSFNRTFHSISHHTHTINSTNLQQKMSRFDSLLTHSNHSTSKNSSPTPPAILISSDSDSEGESDQQQQQKHNNKFQPRPYAPILTPFSVDQVQVIHPDQVEMYKKDYRLAEEDRQI

SEQ ID NO: 149261 - protein, 112 aa, Heterodera glycines
VLENQQKEQSKATQKIQNDQKKIVETISALEQNQSRGSWMSFGFAVKQQNKLDGTIRSRKGTYAIDSDGKIWINGKETGINVEYSYGAGDTVGIGVNSVIRQITFTKNGKQL

SEQ ID NO: 149262 - protein, 53 aa, Heterodera glycines
MSISTNSINCGDDFTATENGEVNGAAINLENDGQFDGNNELIADQQQQLKVGE

SEQ ID NO: 149263 - protein, 60 aa, Heterodera glycines
MGDNGDWGLIFNPFLDWGIIGDWGINGDWGIIRANTVIALAYTLTLMLMSSKLLEATHAT

SEQ ID NO: 149264 - protein, 52 aa, Heterodera glycines
MNASVWKIGILSVADKRIISMITCNNLSFGLLSDPTFKAQCKYELKDESDYR

SEQ ID NO: 149265 - protein, 357 aa, Heterodera glycines
MGQINLCDDVWLDTLAWINRGEVGMKFALVNARFNTLVDRHFEQRKWCFGEFHICERMTEESGAEIMTSIDGSDFSTLPLPTTPLPDSVVGFQSISIWYINEEVINFLCTIRRLLAEDIALEFSTYFTEYRSWKVMARHIWPLLRDGISTLFLKKCDLAMLRKHVSPTVLFDCAGLHRIHTQMLPECPSADGAVDGENADVDPTCRELYTWVHTQREEGHGPVSLKLNKWKEGKWNDFVNNLFKSFTTAAFPVNYIVISKLPFRFKECGAQMENHQTQERLSMSSRVYKVKNGGGALKTKVAVVRFPMDFGDEQLEAWRRIAKIMDDVPANLVHIGFNDNEIGELPSAAASELRTKS

SEQ ID NO: 149266 - protein, 80 aa, Heterodera glycines
MSGQHQHSLHRQHRQQTDTRAAFACGFGAGRHSRTARAMSSARRRRIVHRKLMTSSLMYLQKGGKCFKVNLESKWPPNGD

SEQ ID NO: 149267 - protein, 238 aa, Heterodera glycines
MANLDNYGNDTFYLAFKDVHPSWSLIGFAGIYGIIALIGIIFNFSVIFITIKKNHDKLKKQLYLALLTILCVFYGFCYSASVYQNSKLGDQMTTGSFDFLKNGSLLNTVGFLLVSMTFIIYVCVGIVIRIKASGLPSADSINRRTFRALFFIITVNVGGYWFSAISHLLLIPTISSPITAWFGHAIAAFSGIIGAVSNGPILYFTSTEYRQAFQTEFPFVFRRISNQNQVVPLQNTQL

SEQ ID NO: 149268 - protein, 81 aa, Heterodera glycines
SNAIDEIGIDDGLNELEIGESFLLRVPFPLRLPFCHIILTFYAADSQQMMGFCKLGPTGSISRGTIQWRQMIKKLDFLKIG

SEQ ID NO: 149269 - protein, 43 aa, Heterodera glycines
MSSHLLFSFLVFCSLLISAIFACGGGPALPADPFDPLGPWHQR

SEQ ID NO: 149270 - protein, 67 aa, Heterodera glycines
MPDGLKFVFFKSRSDQCNSGRADHFFCLQLGSNANIQRRLWAGLFEERKWRSGGQNSPRLVQRRTER

SEQ ID NO: 149271 - protein, 424 aa, Heterodera glycines
MAANLLHGEGNITDADVLLVDESTQAQWAVVVHLVARMPKLKALLLTGDRHQLGVHLQELPDIFHSGYGLESVILQAEASIGMNYTFLTKMYRSHPFLAKLISYASYELHNEQLIPARSAEERSLITGSDFLLPVQECPVGLINAFSSFRVDPKSDSLTDDHQTEVASFLVQALLEHFGNDFSSRIIVLCMYTYQTSEIERKLKHCGVRALTVDAYQAQECDVIIIVTTRSKYSEMGSGRTDNMHFFEDDQRATVALSRARHAVFIIGDLVSISAGQVWKRFIEMAITRTSVVRAEYVLALLGRTLVRSSTCLFDSAKRESVEDEGFLESWALKHGLRLDRTNAFGQQQSQQPRAPSFQFQNRHFPALQTTGPSDQAGPSGNGGQQRGAPTLAPQYGRGQGRRGPDNQWMHYGGNPKRQKGGRR

SEQ ID NO: 149272 - protein, 470 aa, Heterodera glycines
MFPFSGGDPPNRSAAASNNALTDPEGLSNDLPELSVVDKLMFAGKILSTPARLSDVDKLHTDLVRTEDGVNRMTRHLNRKINQTNRDLTELKDDTQTLITQVNTLANSYGTVQVLQNQNQSPLVNNPPVLNWATPSPLRNPNNSFGNANTSVVEAIHSEEEDEEFELNPSGFHHVNMLFAESSPSFTIFSGNSPLEFDRWARKFMDLLDCNGRKWDDSEKVARLKACLDGEPRRIFDNLMPAHKATSSEAIQKIKENLDTPQNKELIYQALSMCKQREGESVDEFSARLIPLIEATTADLTTNASEEVLCRAFLEKLNPNLKFLTRTLSGPVRRDFQILRMNAREAEMMHREIPKSIPAPLFPISEQQNPRFNNTEPPNHPEANFRTWAPTGSNREPISPRQRNRNNWDNNAQASRGSFNRSNNHPQNDRRWNNRTFRNERRWNNQTPQNDRRWNARPVCNYCGKKRPIR

SEQ ID NO: 149273 - protein, 36 aa, Heterodera glycines
MDFIAQNANGFDQKNEYLEIVCFANSFESPNGQYAE

SEQ ID NO: 149274 - protein, 64 aa, Heterodera glycines
MVFIFFLFIFLAQVCIFWAMFLNMPARGAGIRRRRPRRPDGVNEDNAPRPLQVFSVVREGVEAK

SEQ ID NO: 149275 - protein, 55 aa, Heterodera glycines
QLFKGSPSLLLFFSISSLNGVITTFVNCFAFNLPIIKIIIGTQIQSYSDYSDFFS

SEQ ID NO: 149276 - protein, 52 aa, Heterodera glycines
SSSRALQAYCCFFSISSLNGVITTFVNCFAFNLPIIKIIIGTQIQSYSDFFS

SEQ ID NO: 149277 - protein, 38 aa, Heterodera glycines
ALEELHRMQVPPLLNTLSHLTRRQTEWYMFERQVDYRT

SEQ ID NO: 149278 - protein, 68 aa, Heterodera glycines
MPDERVLHLECFKSGDYGMMELYGPDRAKEMLIDLRDYAEAYGMPCQHVKMLLYKMDKGLIKWKGTKP

SEQ ID NO: 149279 - protein, 206 aa, Heterodera glycines
PPPHPPPPSKRGHRRPPSPPGRAPSPPGSPPPRPQRPPRPTRASRRDGRLEQWEKRRNDIQRRQPVVRDLLAEAAAAPLPESDTDDDYMLESGLALPAPSQYYGDLPVLPYNAQREIEQMDTAQQRIAIRRKLKKDEAYDDDLEHKKYRVHYPPSPPRLPLPPRAKAKIEPPPSRPTAKREPKQQKPTKFELKPSKFDSYLRPKVA

SEQ ID NO: 149280 - protein, 95 aa, Heterodera glycines
MADAMQDGARWKKAKTAINVLGNLLLAESLDNTSANDTSLKNDTVDIKKEEEANMEEEKVQEEPKEKEENKEDLGDIDKTLDEFFNSIKASTSNM

SEQ ID NO: 149281 - protein, 233 aa, Heterodera glycines
RLIPYVSTVRRMSRVRFPRAKTVAAGFMTDVQVDLADFQALSRHNRGHRYLLVAVDVLSKRLFVVPLKNKRADEMLEAFRQLIDQMQWPHRIFSDKGTEFKNRLLKEFFDEQEIEKHESVHSSVKASVAERAIRNVKQRLYRYFAQKETLNWVDAVQKIVDGINSAPTRVHGMRPIDVDFSNAQKVWKRLYGHPALQKRTPRFRKDEFVRMSREKGQFEKGYLNYGDEILEID

SEQ ID NO: 149282 - protein, 78 aa, Heterodera glycines
MNAQMLAGLKEEFAAYKCKMFLFGGGVAQWAIALENTAGGAQFAARPTANATPTVGERKATNDGGTRGTNASGRDTAD

SEQ ID NO: 149283 - protein, 136 aa, Heterodera glycines
MDINPPKMNGPKDETDNESESRKDGTKEKDGDGPMAKDQPGEVPVQQQHGTGGGGTALAKSEEYAVQMRQLSVKVSSDSNSAPGKGDAMIAMELADYKNALIAARKELADNATKMGEKEAIVEVDKMTNGDGNWWN

SEQ ID NO: 149284 - protein, 132 aa, Heterodera glycines
FISLPKFLSSWLTSGQPRFRSMWERYCRGVNAIVFMVDAADKSVDAADKSKLEPAKSELMQLLSKPQLEAIPVLVLGNKKDLPDALDEGQLIDAMNLESIQNREICCYSISCKEKSNIDTLQWLIQHSKTAR

SEQ ID NO: 149285 - protein, 16 aa, Heterodera glycines
MAKTNTPKGDQPTTTQ

SEQ ID NO: 149286 - protein, 287 aa, Heterodera glycines
MTAVHSFLSSNSPLNVVLGGNRGLENDAVWRHSEILDEREMRRRLFAVSANNNNLLRCMKEENKRREMERPIRSNNFLQNFELRNPNTTAFAQVYPPVHESAPPPNFDRNEGQMQYTQPRVDNNQDPIFVRQIAVHSKLTARHITANPQHHLTMLENEASQGQIWQNDRILAHAIKSLDNFSYSMTLNSLPELKGNSGSDQVRSFFQRFDIATEEWPEAKRLNALRSKSSGRVERALNVAVANNPFQYEFIKRALIHQLESTDARHMSAFDELMNGVFRRNNEAIDD

SEQ ID NO: 149287 - protein, 102 aa, Heterodera glycines
MVNRTRISEGGRMEDRCQVREANAIEQNSIQDPTLSHPPISGCFPGQSLHVHSQFRAGSVANRDRGEGPVDLLQSLQLIRLALIRLNFVHVVKNRINIQIMF

SEQ ID NO: 149288 - protein, 55 aa, Heterodera glycines
MTKQRQSHSVRVPMHFAQMFLLFMISTFHAQLVAVDNLNPRLEKLSIKEPEFIPT

SEQ ID NO: 149289 - protein, 33 aa, Heterodera glycines
MLKHLGKMVANSASGGLSNDTKIVGFGWQRKKL

SEQ ID NO: 149290 - protein, 394 aa, Heterodera glycines
MPQTETFAILIVGLMQQMRQSLNFLRNLILGWQPWHPGLIPLTNQFRPPSPPRFHNRNWQQTPNQTPSCYYCKKPGHVISECRILAYKNQNRNSQNWTSQPPMFTHSNPNSIPISRPPPYNSGRGNQPHQRGTWRNQQSFHHDQRGAWRNQQPFHHDNRNWNRYPNPNQPYGRGRQINSLNTYDSLPPDSFQNLSMSDNGPHPSFNTLTFSDQVQQPVTASPSQIKEQLVCSGSADKQPNLTDALKSEPKPVSPTPIVTNWEPHPRSSNFSIAPFLTRFNFILCIITLSLSASLVSSSHSQSSLKVLPMVCQTHVEGTIWSLPIWLPCPKLKHTPSDTPIKQPIRLFQPNPFEQKSKAWVCRKVKKSLIEYTNPWNDLIIKQLPSENLPVLLDE

SEQ ID NO: 149291 - protein, 43 aa, Heterodera glycines
MQFGRIDNESFTMDVDPFTGHPDETRSRGQQQSSHICSCGAVQ

SEQ ID NO: 149292 - protein, 94 aa, Heterodera glycines
MEIKEKSKNTSTSAVLPLTAEERMKRRQIMRTEVLENVEPFLKMKKKSLEDAQEDERENFRRFKMFETSALQQKAKSEKNGILDAGCYEFMVQD

SEQ ID NO: 149293 - protein, 216 aa, Heterodera glycines
MQQNILATRLVQQEREREAVNNFYQQQQQRAVQQNHLVRPLIMVPRLSSQLDLANVLLLHNPESVDDAATLVLNGGSSVTSALAHAANPHHIVANAMATATAPEPQPGPRCAVSPSIIKKNLSTHWLREQERDRCTVCLCDFDTDDELRALNCTHLFHTECIDRWLQYNKKCPVCRVDMDKGGAGSSAMAAEAAVMLNAYAAAAAAASTTSNATSC

SEQ ID NO: 149294 - protein, 120 aa, Heterodera glycines
MGKNDQTGETEYGLKQIEVNIGQAGGFVNSANITKLHRRTMALAGFDTSKEKMPDNPCDTMLINALIMAWKKFDDKDAIILIVAGKLYRDYEQYQLNYLMENVSKNEIKIVQMSLTEAAE

SEQ ID NO: 149295 - protein, 30 aa, Heterodera glycines
MIHRKFLPYALTALVQKLRVEKPLGTVKMA

SEQ ID NO: 149296 - protein, 187 aa, Heterodera glycines
AWASFFLPTIFVSPPLHIQLDRVGANEFWLARFNAALSLPVTERNKILRERLGHLGEGSSIRPPFFCDHGRNIFLGEDVFLNYNCCVLDVCRVEIGDKSMVGPAVQIYAADHPRDRAVRDQGWEYGRPVSIGRGVWVGGGAVILPGVTVGDGAIIGAYAVVTRDVPEGATVVGNPARQITKKEEQTE

SEQ ID NO: 149297 - protein, 374 aa, Heterodera glycines
MTTSSSSSSFYIVLPSNTQVEGNRTNSFRVRLPRKLQFGSQWSVGLAVLLYPHSWPSLGTTEEQFVRVEWQTGEQVRIPVPASNVRNPTQLLNSLHHALGEGSEELASRLRQIQLSYHQLTGEAETSAKKEVERLGSLGLQQQPRNQTKRIDEEKQQQQQKSDEMLNQQQNEQQEEWKRTEFNAHYRRTLDTLVAERMEEAERNLLNKHLPLGLELWVQSYRKARLSCRFSLDVEQQRFRLQIDPVRIKQVELSEQLAYILGFHTRHLSSPMSVARYQPDMKGGVSSFYVYAPGLIEPVIIGDVCVPVLRMVCIRSAQPDDMVEEAYTAVQYHQLITKEIAEIFIEIRTPTGALMPFQYGTCTLTLHFRKTPYF

SEQ ID NO: 149298 - protein, 300 aa, Heterodera glycines
MHVDFDPLAVDWSHFAEPPPRMDTMLMSGGGSSMGGGGGGGAAPSYPVFTGLPYQRGAGGIGSMFRSFLRFLVPIGRQAGAAIGRQGLETGSRVLSQMLEGRNVKEAMTEEGRAGLKNLLDKAADNLSRQRSVAAAAATNHGGAGRSGRGGGGGLFDFKRYRKIVEVQNTELYDSGTLYPYKAYLTNELSFPNSAKGHFMASAGYHPSLKHDNPTDAGFLARCARFEGGRKARFLSRLDFDLGNQELYLLNNMDVLFTIYRAKNTFLLQNLAPAPAAGVAARQQYALYLHDIKLYMKVVE

SEQ ID NO: 149299 - protein, 246 aa, Heterodera glycines
MSNLSWMILYEPREGGRMVPHPLFDPATQHANESDDSVADAVISGGGSGVAYTVTEAALLNNTTSTLIGTTSAAAVTSTTAMTAAGARVDGAVQIWSTLFLFANYAIVLPMFLLCWMMVVHWLRRSGLMPPPHQSPSTPQHPHRYGGLHTIFEDTVEQKAGHEKDVRQQKEQRSHTSSAATVNTEAMVREAHRVTSQLAAAIPEPMRSAVTSSVAIPILVSAAQSGGGRKEATQHNSEEEEEKERN

SEQ ID NO: 149300 - protein, 126 aa, Heterodera glycines
MAKKHNKDGNKQNSGSNDDESKGSDSSSESRYDDAMSDTKSHFSRMDKNNPRVCRLLKKNRTASEKEEEERNVREYDQLMGYAYDDLISSLNKEWVRSKVVTTQSTLRNTTTTRMGFSVSQHVSRT

SEQ ID NO: 149301 - protein, 75 aa, Heterodera glycines
MKVHVMIDQILIILVFIGTICDNKPSYCLIINRRILSEKNSFLLVCILNHFFISLMNLFNVKLLMVKKLNVNLCD

SEQ ID NO: 149302 - protein, 62 aa, Heterodera glycines
MKDYCRERARPDPGKNSPDRTGLALSKDRILDPVSHNPVNPVNPGFSRRTGLPDPENPIPDP

SEQ ID NO: 149303 - protein, 102 aa, Heterodera glycines
MDLNGPTISGPPDDHPHASDGQALAKWLHTPRADGRPKLLNVEAMTGQFHEQIERLKEAFLFASSPVSFAIRLSMHLPGAYVPFAVDNGQTQERLTFCCIDK

SEQ ID NO: 149304 - protein, 19 aa, Heterodera glycines
MAQQIWPLAASNVCQLSVD

SEQ ID NO: 149305 - protein, 219 aa, Heterodera glycines
SDFDKARAYQLDNMQLPFAHKWPHGLGQVAPRSPRIYEFSQIFFNFQIWHSIVFIWVSSVVETLISLPFSYYHTFFIEQKHGFNNETVPFFFKTVPFFFKDRAMKLGVSLALSSPVVALLVWIIRNGGPNFPIYAWLALSLIIFVMMFVYPEFIAPLFDKYSPLPDSELKRKIEALADRVGFPLAKLYVVENSKRSSSKRSSHSNAYMYGFWNNKRIVL

SEQ ID NO: 149306 - protein, 78 aa, Heterodera glycines
NTSSANDNAQSNQQKEQVQKWKVGDQCMALYEVDGQWHSAKIEQISPEENTCTVSYIGSDRKAILKLESIVYVFFYKS

SEQ ID NO: 149307 - protein, 155 aa, Heterodera glycines
VVKDAAKEAGKRPKCLDGTNETTTAPATTTATNWLLFGIVAAVVVVVIVAVFVIIWLCRRRKRGSQVLDDTEFGKMYDRSTSKTLNTSSANDNAQSNQQKEQVQKWKVGDQCMALYEVDGQWHSAKIEQISPEENTCTVSYIGSDRKAILKLESI

SEQ ID NO: 149308 - protein, 16 aa, Heterodera glycines
MVNAEVNLSIENINYK

SEQ ID NO: 149309 - protein, 162 aa, Heterodera glycines
MNLCYLIFLIIFIAFKIESGKIRPNFDEIFGEEWNKNEREEKAIKIEQNETNEKSQAAVDQMGEEMATYPNDQQKREIIRKFETIKEKLRERGKYQRKDRHKIDVKIGRILGAKYYKIKKWKKELNLNKKKMKKSFMRRKSANSLDDLMNLKVYIKANRKNL

SEQ ID NO: 149310 - protein, 172 aa, Heterodera glycines
MLNQRLYSLCRIDSSPKDLKEAERIARLLVCLIVDNDIDDLTTLGKAAQRLVQLRLSVPLLELLKYLRNIKGKDIRTIPNISAFFAKTFEALFDKIDAPATDRKELASLVFFLISCPVEGDGHFARSVSLLASSGANFASSLVAISDNSTGVPFEVNLANESGKMTDLCGGN

SEQ ID NO: 149311 - protein, 60 aa, Heterodera glycines
MAPFGKEAFFAQNSTATANNEKEKSGENCADGPKVATTIEREEAETPKSDDEKETKYLTK

SEQ ID NO: 149312 - protein, 190 aa, Heterodera glycines
MELLLLTNTAVLREIVQCNFYFVGIPSVDESDAIKSAKILSEKIDQFAEKSTEHLVMKRIRLNLAFITMSLEKYFQNYSTFFEALKEKTTKEIDELFRDFGKMAQKFNADGTANILNLESVKPKLLYYFFFSCFYRNLMLRTNLVIVSRARTGLGPDEIGINPRVGRYNGQQTIAELAVLNGKGNGRSNE

SEQ ID NO: 149313 - protein, 269 aa, Heterodera glycines
GSGQRGNEQSDEERGADFIGYSPIIPGQRIVDVKMAVDFRRQITKYAFTYKMVMELFEFEYVSKNELENADECAVCLNEFEEEEKFVMIHKNERQQTKPQITLLPLLQAEDEQQYQTECENAFACLIEMAEGNDQNENSFKRSQAKIALDEMTKFVDNMNREAIILFGMEREEISYGERMIGMENGQIVLISRQIPIKESLEIIVRNAPLQALMEMKKESAIKLLNEINCADLKFRNLALQTMQTIEIMTENETEAEEEIMAKRLRLIY

SEQ ID NO: 149314 - protein, 366 aa, Heterodera glycines
SNFQIFPRRRLSAPPLANGTSAESEVQSNNGTKRTECSANEHFDVCPETGRECEPSCDWTAFPDSIPSCAPRGEQCGLPRCVCAEGFVRLSNQHDECKPFSFCQAPEVDAATCCAANEVEKCGRACEPSCHMYSEEPCGEACEAPGCTCDDNFVRLSARGGPCVAWTDCPSECRFPTLSPRYSSTLTTEEETTELELFTATENAAEPPEVGQCDSNETVNECGRVCVNECGRVCETDCVSIFEREECHGCAAPACSCRQGETRENNGKCVYWGDCPTENGKCVYWGDCPTERALSSPTKGTANGAKSVETSAEETPLDLCGGEWAWPIGCAECAYRLRWDYDEKMNSVVFLLDTRNSVVFLLDTRP

SEQ ID NO: 149315 - protein, 43 aa, Heterodera glycines
MSVRKCPSANVRPQMSVRKCNREPLGLSNDIKNEKFGCFRAKL

SEQ ID NO: 149316 - protein, 105 aa, Heterodera glycines
MNHSMPTRVNFTMRRAIGEQSEINANLSLYQVLAINEKVQSVDLNLWIIQKWKDEFLGWDPHKYGGINATILPYHRIWLPDTYLYNSMVMNRDESERYINVIVST

SEQ ID NO: 149317 - protein, 231 aa, Heterodera glycines
MAKGQIGIDQSSDEKKMVPKRNLTAGNLLQKRRISSGGGGNSKKWKKPWTAKGIDEEMAEPNLGESAGEWAMLERSIEEEDEESEAATEWRSANPNSGLNEERAANARQNWRRIAQKADRRTDWLMKCFPRDSDRDALERAQPTNSAGGRIPERESEEIPFADLSPGRLSLASPARHFSPSSPHGISSSVLSPRLLPSLPNASSSLTAAASATDRPRHPPNASSSSVPKAP

SEQ ID NO: 149318 - protein, 360 aa, Heterodera glycines
MNSNKSEKANTVLVEAAKKETERAWRDVEALAEEVGDFAKSSRETLNRAIKSREKAPNANGVRELYLKMSDSIWEIFTILDQINLESEKAESTWRDFERCKTFDQATKLEEQSQNSLIEARRLHFESRRVQSQMLNYENRLQTIVWEHMAFSAAEIENLYFSFLEMLDKIQKLPNFILHEYRNQALAMQKLEIGLREINIFKCQEAENLSDLSFSKIDEFRKRVQNYRFDTRMLYNKIRTFAQKHSGQLSKIINSQLSNTSKRNSSATGDYFCFNHLSFNISTYGIGFASREYASNEFIGWSHDSIGWDSMGDIQGIDEVCVEPGRFAAFPTVSMIGEGSSAGVNMGPIFMFNLKKLFMP

SEQ ID NO: 149319 - protein, 316 aa, Heterodera glycines
MKSWVLWIFVSWYKARKQGMVPGFWKGSKSAIYSYDRAWCESLGKKKEQDRQEEEAEEQGEEEEEEEHRPEQERQEQERPEEERPEQERQEQERPEEERPEQERQEQERPEEERPEQERQEQERPEEERPEQERPEGERPEQERQEQERPEEERPEQERPEGERPEGERPEQERPEGERPEEEDRPEGELPEGERPEGERQEKQRQEDGEEEDGDDDDDDDDDNEDGAVQCKVILRRGGEGDDDDSAGGNSGGNGAKDGGGGDGEKKGNDGKKQEERGGGGEKANEQYKNGSTETAGKASEPYEEAKVQTILSDKK

SEQ ID NO: 149320 - protein, 87 aa, Heterodera glycines
MHQLLTIPMPFIEHFLHRLGTFVERSPVGNLDESVKTADWDFIKTIQLVVSMENDGQKLVAQKRQKAIGPDVSIDCFKLLYSLAIPN

SEQ ID NO: 149321 - protein, 83 aa, Heterodera glycines
MSKVPTLTLIKILNFRIRAEKEDGKANFRAQQMSIQRGNFDGGGTETDGGKGSPKGAPTFAAQTFVPMSKIGLKVEFFQALSD

SEQ ID NO: 149322 - protein, 59 aa, Heterodera glycines
MPQNVMAVDTLYDAASDSSAALQKAAQCQKSGTVVVVASTKPVEESEEANANEMDMATT

SEQ ID NO: 149323 - protein, 95 aa, Heterodera glycines
MLTAFMKGHQETQLSEYSKQKCEAHLGILYYMKNNWQCDKIDQKFVESERTECQNIASLETETLEQHYRLIEPVKSFRMISRLFDSVNNFKSYID

SEQ ID NO: 149324 - protein, 398 aa, Heterodera glycines
NLLPNCQHGFRKAHSVTTQLFEVVVDEFSFALENRKSIDVIYFDLAKAFDTVPHNRLISKLKSIGINNSLLKWIQNYLENRKFFVKSGSDFSDEYPCLSGVPQGSILGPLLFLIYIYDLPKFCETDVKIKLFADDLKAYHVLSNISFSPLQNFINKFNQYCKFNGLKIASNKCLTLHLGHKNQKINYFIDDFQIPKNRKRTSQRDLGIYFTNDLKWAQHIDIISKKALRSAFAILKSIKTRDTKILVNLFNIYCRPILEFGSPIFNPYLKKDIEKSENVQKLFRVIFRRNNYTVANYAELLNIYDQKSLESRRLKIDLKLFHETIFGKINLQNNESFSFSKNPVKNEFIIRTAYCSTKLVLYSNLSSRLLPKETRLLNPNEFAKLLERSDLNLLISLP

SEQ ID NO: 149325 - protein, 147 aa, Heterodera glycines
MGRTKCVESSLVLRGSGKGGRGTKDARGVQQTQQTKTGFDGRSEAPMRKTATAFRQPVTLVHTTSRRSHKAPERKQTNNTAKEESIEKAEKGRQVPSMSEDAAAATFCSSLHTFELNGSEIVGQQATRKQIEENPFDTLKFVQPFVQ

SEQ ID NO: 149326 - protein, 60 aa, Heterodera glycines
MEERIKTELRVEAEISDEEEEEGAEDALEDEDDSEEEEEGVDTDDEAALAYLNSSKALNV

SEQ ID NO: 149327 - protein, 267 aa, Heterodera glycines
MAVCEYSHPMQAVQAVSMLNNQRLFDRTISVRMDRYPKEVERREGGLPFGLRAVGMGLGANGAPLTDVASVISSISPSQTQPGMNGTAGAPITPFQSPPNVAQFGPVAAQPVAAGPPSGFQQGLPDHGISGHFQSPQPTYQPQATSGFFNPPQPSPQNRPSGGMAFGGGGATPQYAPTKQMGVVGGGTASAAVYGHPPQQQTQKLPVDYTWQIVSDRVQQFGDLESVEMITPGVAKVRFVKLRDAEHAKAALQGTTVEGRAIGIEYL

SEQ ID NO: 149328 - protein, 193 aa, Heterodera glycines
MAQYVEMFHRQAPIESQFQRRILNNLNAEIARGAISNIKEAVEWIRFSYFYIRLRKNPLMYGVEWRELRREPTLVSFLNDFCHSAARRLDLNRMIRYDPHFYITFETVELINAESGPVRFTELMTDEMIISLIAASSEFAQIKNRDSEMTDLDELASFGAALKIRGGLATTAGKVNCLLQVCATNAISEAFVN

SEQ ID NO: 149329 - protein, 153 aa, Heterodera glycines
MKALASEMTTNFANRLAKLGLKVRELTGDSQLSRREISETQMLVLTPEKWDVITRKADDEELSQLVRLMIIDEVHLLHDERGPVIESIVARTLRQVELYHQNLRIVGLSATLPNYEDVAQFLRVDPTRGLFHFDARFRPRPLAQRWRPAPQKN

SEQ ID NO: 149330 - protein, 187 aa, Heterodera glycines
MPSLNKLTFYESEMVLVNVFCAQLLDCPVKSLRDRLNHPEDRVNAMNGLMGKKVRTTYKDRNGMHKTYFVGGITERGAAFVPAYGNLRAPYNVNVAAYFYARHRIKLHFPYVPCVIERFSGRAEDRFYPMELLGIVDDENKGRLFGRMFMEIGEEADDDDNDEDVSTSFDSTLRFDMGRDECSQLWR

SEQ ID NO: 149331 - protein, 374 aa, Heterodera glycines
MYEMKVKKQKNRNPNIVFHDSFNLMPCALAQLVPSYGLDVEDKPFFPHLANRPENYGKHIYPTPDDYLANGMMPEKRRQFDHWYEQHREEPFQLDEALASYCTNDVEILMAALVAFRREFFDVSKRNEYVDGIDHRENHDGIDVLRECMTVAGACMKHFRLNHLPAEHLAIVPEKGYDNTQNQSKLALRFLFWYAEENNVQVQTAYSPDGEKKIANYTVNGWIEAEGRVIEINGCVWHGCRKCSPSDNMMLPNGKTAGEQRERDAKRFTTRYPVGHPKVHVLNEDVNWTSPADNNFPLALIKCWVIPPRKCTIPVLPVKVGERLCFPLCMKCAKDYPTGGVDDEYHCRHNDQQRGWVSTSTSIELNAALEEGYR

SEQ ID NO: 149332 - protein, 108 aa, Heterodera glycines
CGIGGSGTPIDGIDMCCKLHCCKLHDQCYDLAVDRGLCYDTYVEYADPYSWTCQQGEPNCSQKQFGCKAALCECDKNVVNCWSKFKVPSKREKCTKTKVNRTYETVSY

SEQ ID NO: 149333 - protein, 41 aa, Heterodera glycines
MPAVVMREKVIFGISSADESRNSKEEIQLINNWGRRLGDDQ

SEQ ID NO: 149334 - protein, 108 aa, Heterodera glycines
MSSRHHWRAAAFHPFTAQLERCHCCNGWLPLNAVVPASDQLHCMSLASDLPVSPFSSATDQPFFIHPTKGAYGTSILFNNHSDQMAPIPDHSTMLDPSEATSFINQPL

SEQ ID NO: 149335 - protein, 15 aa, Heterodera glycines
MNTFGKGFRNQMRIS

SEQ ID NO: 149336 - protein, 26 aa, Heterodera glycines
MTAMPYYEEMAKVCRKRCHLCDKAIP

SEQ ID NO: 149337 - protein, 197 aa, Heterodera glycines
MLRVKLWQIIALSLALFLAGIQKRWAVQAQDDQQDEEETDPGGEDTDGNENGDDQQGEEGDGATEDDGGGDEDDQATDDEGTEAEGDEDEGADEETETEGEEENDQVEEDEGGDETEDGNNAEDEEEGEEERKDEEEGEDEGEEEEEEEEGKGQRKRKRKEEGEEEDEEEEGEEEEGEGQRKRQRGNESTLELLRCQ

SEQ ID NO: 149338 - protein, 1219 aa, Heterodera glycines
MNRVSETRWESLAPIRKEYGWYGVNCFNNVQTVIEEGKAGILDGKRLITSWGDSLKVDKSLGEDGSWIRLPGAVELLMWKIPSDEFWHSHFVIGPVITEIWPKKAVIVDELQYTFPISRNQERKFPVFGVPDDALKTDNNVFVHVIGKVNSTKRARQRRETVSLKPGQRKPNVPRIEPTRRPNLRRGQIAEIAMTTRPTITTTNIPPTIRPVSTTHIPSIIPTIATHTPPTTRPITTTHIPPTIRPIATTNIPPTIRPITTTNIPPTIRPIATTNIPPTIRPITTTNIPPTIRPIATTNIPPTIRPITTTHIPPTTRPIATTHIPPTIRPITTTNIPTTIRPTSTIHSPIIIKPTTTIPTTTIQTPTKLISTTATPNTVSPHTTKSADDTAPTTASYHSILDELRGLAEEADEEGILISPTIKVTPTPFVLPNEPNEESPTTVVTKREIPDDDESEKLWKEENLDHENSRLNYLGWKTHRTNIQNAREKWMSDCHERNNALSIAKALARQMPEDAARSLYKRDDITAFWTRSSQLDQKWSIALCKQLKAEDVLWDQKIGKKCFRELPVLVARRTLFVKPGTRDLSYNGTETHCDEQGNNPWAADFNNNDTELQQANSKHRFVSKQQTNFQNPLIFFTRGSIFESEQARLEQNLKELTRRITRPELNFPDIGTVDINQTEIHGSTVTDIFSIGEILVEKMQKEGESFRKKAEETIEKGKAWMEDPIGIIKYIKWILITIAIILIVIGCTVLLWKIKIYSTLFLAPIHLLQSLLNTIMNCFNSGRRLAEQVRYPIVMEVELQDRAKPSAPPEEPLLDQKAYVLNYLPNICQIEQTRRKKKRCYVNFFMNGVKTKALFDTGADITYIGHSTAQRCFMMVRKGDYPQARAANSTPIRFIGSALANIKLGDFEGKFPILVSEDDSCPCTAIIGTDLMDFISEQGEEEIGLNFKRGLVRVGNTQLPMIAAVSIEKQPIEVQLIETQTLPPLSDSLVWGKINRSLGPDEVFITVEREHDYFPLRVGKCLTSPGSTRIVPLRLLNFGNSVIKVYEGSRLAWLETIADGTEINALKEDEKENPEMIMTDEEWMKFKLESDKISPEADWTDQTLEFPKKEEAVAPILERIRLNDTILSRDGIEKLKNIIRQNENAFVKPGEVGLFKGQTIHRIDLIDGARPVQQRPYRYPVALQPEIERQVKELLRQNVIRPSTSAWSSPQSCTAVNPR

SEQ ID NO: 149339 - protein, 393 aa, Heterodera glycines
MDKDKDNKDKIEPKGRSDHPNRPCHSAEEEGLNEGQTERDKRLWLIHQKRQLRNMDLDALRRRIVTLEQEMRENGGTRSGLPMPTTFDGTTDLQDYLKSFNLIATAHNWTPARCVQVLPLFLRGSARAIYESIEPDIKDNWRSLIDAMADKLKQMSPSLTARQKLAQRKQQTGESLEEFAQAIRNLVLRAYPDNSLEMDFGNLVLGALENDVKHANEARLRQFRSEIARDFFRANMAPRLKERVMYMEEPQTLEEAVAQARRVEQVQGNLADDMWKNTQDAKAEVALAEVNADEINENGKIKAILGEETTPKDKINLIFGEAIPNFGQFAEGISRQGDSQDTPGDSTHTEEDLIRAALTSHRLATTSKEQTTMAIFNRTSTKIKIGHEGRGPT

SEQ ID NO: 149340 - protein, 103 aa, Heterodera glycines
IESLELWRVSCAGRNCSRRCFGFEEWENPVFCADSIPFCTSGVAWPIWMIASSFGLNFVLIVLVLVHLAVVRVRRVFPFASFGVCDQCQRRVSVLSSRIVSSM

SEQ ID NO: 149341 - protein, 760 aa, Heterodera glycines
MDQCKPYFTNEEAEQDTEALENEKPKHKNENKKLGDSKLEESDEVMHDGETIVACISEGNPLDQPKDKEEMETPHQIEIRLDGTNFFAYLSTSNFPETSTISENLIKNDWEIFEDDDKYVIMWIFDENFKLRISNGWDEMFFGTGVREFLKNSGNLTMEDGKAFYHEQFIDEQNQIFAQPIIPDVWITLRDHTPARQTNPFNPFFETIEPQNIQSFSSFNRIFHSISHHTHTINSTNLQQKMSRFDSLLTHSNHSTSKNSSPTPPAILISSDSDSEGESDEQQQQQQKRDNKSEPRPYAPILTPFSVDQVQVIHPDQVEMYKKDYRLAEIDRQIQLMMDAKAKIQAEEEEEEQIKERRARSEKAKQERKKEEKEQMKAKSEAKRKEAEEKAKAKAKAEKEEWKRALRRPAATPEEKARKEAENEARKEAEEAARKELEEEARKEAEEKARKEAEEKAAKEADEKAQKEAEEKAKKDEEEKKKSEKQQQNVEKRAEEKGEKTMIARGIKKRRLTEEEKEKKQNMEKMEEVHREIREIVKQAEEDAKKREIREKIEKLTAKLNREEDGKRGEKDIAALEREREAFENPPAPPKDRMPFYSSTVARFECQSDLDSAPKPREEKSDRERSSLGTSGKRLFRNTLKSAVQAVHEKPCIPPEGLGLRRRESATEEAPRGRRPTPTPGQRQLERSPIRKNNSYLKRALALEKPEETIYKIRKLLLEAADRLSELADLLYPYEGGQKTKKDEKETVEENLGMGCSSSF

SEQ ID NO: 149342 - protein, 103 aa, Heterodera glycines
MSSSSKPRNSMGRMKHLLSSAEDADVHFLLLHAHKLILKHASEVFEAMFRFDAQKVKTENASAEGVVEVPDVEAAAFRVMLAFIYADDLSELNGENAMAVLYA

SEQ ID NO: 149343 - protein, 43 aa, Heterodera glycines
MEMQQNESLVIVNSDGEEEEEFTDVTNRASEGLSNDIKILGFG

SEQ ID NO: 149344 - protein, 174 aa, Heterodera glycines
MLIFSPDSSDESEDDEHHNHHHDNHHLLRTKTNLSNYNFLQSCEDNFFRSFDATKIADNFCHDSDSSLSLSSAATEEEDSEEYNSQQSDSEEDSSKTTSSSIDGSTTTFKLKSILSTSAKRSPTAEKHAYERRVSFADRWGMQLTSFRTIPNRFADRFYDELELDFNEGGSINY

SEQ ID NO: 149345 - protein, 141 aa, Heterodera glycines
EKDIKATEVALVTLMANIHKQICIQFDKNAFPVEEIAKITVEKVNDMLEKCHQIVNIRREKAENTQAQAQNTSKKSKMSGISKIFGGNSKIKKKLANLTDELKSLEQKEQQLFREIKSAAETTQFDWRHLELPCTKVTTKI

SEQ ID NO: 149346 - protein, 42 aa, Heterodera glycines
MSFKKDIYKLPTCFSIPNKLFDQIKTLSITITLKKNASTRKY

SEQ ID NO: 149347 - protein, 102 aa, Heterodera glycines
MKIGILLLPCLLMIKNTVDQTVSVKIKQSKGFDQIFGEGWEKNVEVNGMGQFDQNLEVKEESASECDQMEQMSEDSGQISDHFSSEIEQIKRKFTNGRENFD

SEQ ID NO: 149348 - protein, 153 aa, Heterodera glycines
MPKIIAKNLGINIRSIYNWKKEIKSGTFIKFQKIDDEKREIVEKYLKIKKEFMQNGKHSQKEWEEFNAKIKQMFGVILQTIEKWAKKLGNKQNAKKEQKILTIAEKREMMKQYHQMKKQNPKLTERQIVANLEISPSSFYKYKSELMGEAKKF

SEQ ID NO: 149349 - protein, 218 aa, Heterodera glycines
MLLLYFRISSDYAFLKDAHREVLNSERKSIIQSLIRRLDDLYNNGFQQPVTMFCQRAVEVNTGAVGSFATSPRFSQLHRRMIANAGLDASETVTPVDQSDKMYAETLYYSWQQFGNDQAVILFVHGSLYSHLMLESRQIVNTLEEITSRKIKNRFITLKEAFSRLKIDPVDKSLIFDDKYVVAVLVDRIGREISDAELALCVEFERSTAIVKMGIYIF

SEQ ID NO: 149350 - protein, 45 aa, Heterodera glycines
MHIKFGKGLNGGGDSFFRRDFSKNFWELMGGGGSGGADRRRREKF

SEQ ID NO: 149351 - protein, 50 aa, Heterodera glycines
RNYKAESHVWYSITCRDGADSDFRFMGLEFRFSKDWGLGTPSLLTCIGQN

SEQ ID NO: 149352 - protein, 142 aa, Heterodera glycines
MRLEDVMLMPILELCQSNRHEMWTVIVLGHKGLLLLLGLFLAYETRQLKPRYLSDLRSTILSVCNVGVLCLLTGPIIAFFLRNQQNPFFGFVSVTVLTCLFASLGLVIVPKLLFIYHWPPIYQGGATAKHAAPIVGGVSAEP

SEQ ID NO: 149353 - protein, 29 aa, Heterodera glycines
SIVKSIQGSKFGYKNQLTQNPLINAKKNP

SEQ ID NO: 149354 - protein, 254 aa, Heterodera glycines
VACEQIGIRVLDTRHEATAVFAADAAARLRQDIGVAAVTAGPGITNTVTALKNAQMAESPVLLLGGASPSLLKGRGALQDIDQQTLVRSLCKFSARVTCVRNIVPTIRNAIATAKSGTPGPVFVELPIDPTIRNAIATAKSGTPGPVFVELPIDVLYPYKSVEREAGLSNAPKKGLVKLLDAYVRTHIANTFSDAWQPEQPLLPLPVRVPRPTTAQIEQLANLVSSARAGMRRMIIPFFPSDFEFREFLEAYMK

SEQ ID NO: 149355 - protein, 95 aa, Heterodera glycines
GYEAYQCRGRCAHPLPAKLNTTNHAIVQSLIHSIDPHSVSAPSCVPVQVIPAQNMLEVLPFSLQMSAISILYKDINNVIVVKTYADMRVDSCGCH

SEQ ID NO: 149356 - protein, 122 aa, Heterodera glycines
TEIRIPSTAMSSFSFPWATFLFFSLISCLISLTEANPKFLLSCKVIDGICQNDELCLEEMGIRFPDCYLERKIDFLQPQKSALKSTPFTEGANGPQRFLKRTPAMKLMKVLMMKDRIPVGRR

SEQ ID NO: 149357 - protein, 92 aa, Heterodera glycines
MHAFEIDERTFQDLKLDDEAEDDAATGGAQNVQSSSATTTTTGKVVVFDAELFQDEAGMVDDDDDDLLQSNSSTDDDGGDQHDDDQGGDGQK

SEQ ID NO: 149358 - protein, 199 aa, Heterodera glycines
MYRLVHFIWFLLLDVDPKSVLCVFFKQGLCTKGNKCKFSHDLSIQQKTMKKNLYVDSRDLGDKKDETNENWDEKTLQDVAEKKHGEKDRKRPNQTDILCKYFLEAVENSKYGWFWECPNGDTCIYRHALPPGYILKKDKKKMEEQNRLTRITLEEFIETEKKTGVARSPDICGPTFAVQTFAAMSKIGFKVVFFQALIA

SEQ ID NO: 149359 - protein, 225 aa, Heterodera glycines
WIVQDGGILMLIAYLLQQHKVWKGCKLRIYVIAQEGEQNEEMKHRLQRHIYMLRIDATKNLSALSNGGLSNGGFTPDERFRSGTNSPNGNTLAVPNTVCRPPRDSVIETSFIQKTFQEENNDTVSSNEISIKDIDDTKVQKMNAAVRLNQVNFLIIFFHISTNFAQVILEYSSESQLVLLSLPKPPKSIQALVENYLSYVEALTEGLPRVLLIGGSGKEVITADS

SEQ ID NO: 149360 - protein, 125 aa, Heterodera glycines
FFPDGPEKVDVAFSSGRLTVLVKSRMLFGYEFDQKTAQFTRDHRYPRELHSRILFYPEGAFPIVNGSVILFKDDVFATYNVESNTPHLHFCTMFAWHEQSAHKALANLLAPPGPPMPHLFFPYQP

SEQ ID NO: 149361 - protein, 187 aa, Heterodera glycines
MHVAFSFVFRCRQEHHPKCNIFGRNCVGCVYLYTSQKCDVVEVRCSCYYCCDPQYAATCPDGCKNCIKDGEGGCSQKSADHFKTLQYLAMRIRFNDLIIILIRIPISRNELSLSSLEPMEKVNAHFEMIDADKNAGISPEEAIAFLVKTKNGTSADDLAKNMAWFSQMDSNGNNRIEPGEFDRSLTE

SEQ ID NO: 149362 - protein, 131 aa, Heterodera glycines
RNHLWGKTKAAFKYAYDHYLNDFDWFLNDFDWFLKTDDDTFVIVENLRFLLMAHSPEEPIYYGCKFKPFVEQGYMSGGGYMSGGAGYVLSRMALKKFVEEGLPDEKKCRENTSLKSTYFFSKYNPKNGPKI

SEQ ID NO: 149363 - protein, 302 aa, Heterodera glycines
MIRDGLAHRSTKVPFSNFSKQYSLSFYWSSLTLTTSGQQPYPTAAMHNFLEIFDTIIGVLVFAVIVGSVGNAVSTMNLTRSELQQLNDGIKFYMNYRNVKDAMQKRVLDCIHYIRRHAQMHDEREMFVLKRGVLEIIDENERVEHLESGATFGEMSILKPIGPLGKLLARRSHSLRSLGYSEVYLLSQEDALEVFADYPEQRQMLIHHATQLLMERGEVCGAELVEPGPLDPLELCGTENSAELLQLLGNTLCGLDATLDALYDKFMVNSSELKQQLTVLEGTYQRNRQKLRKKWHKKLCQK

SEQ ID NO: 149364 - protein, 90 aa, Heterodera glycines
MRYGRNRTTNEILWHFHFVYLAQQAIECAKAEKTKEKQKKNAKTEKAEKLPIKFEERKLMLKMKKTKVWDYWRRQRRQRILMVLERGLFP

SEQ ID NO: 149365 - protein, 53 aa, Heterodera glycines
MAMNGATFTGRRALLPLGRPSNPNSPFGAGRPLPVVGPYGQFPVARRQMPFRL

SEQ ID NO: 149366 - protein, 54 aa, Heterodera glycines
MRFIHCFVSMLIIWAGAQLTFGTDYSPYSPSGAYSEKAGDYEYAYGSPHRLVDE

SEQ ID NO: 149367 - protein, 174 aa, Heterodera glycines
MRLLLFPNFGLFLCLLAAVTVFGIEVKRTTEQTNSTNPNSVDKIKTEEAPPSTVTNSKNETSTKEAEKTEHKEETLKKEEEEEGKEKEEQKEEEEEEEGEEEAGEEEEGEEFGEEEGEVTEDEEEEEGEVREDEEGEVTEDEEQEEGEGKEEEDQKRGESEEAKKEEKGREEEL

SEQ ID NO: 149368 - protein, 195 aa, Heterodera glycines
MKLFPLLLLIILFLIDKIGSEKKKLQQKSFGEIFGEKWQEKEEEKRNELKKREIIGKFYKIKEKIKQKGRKYSAKEWGKINSKIAKKLGTNRNYIQKWIKEFGLQKKKSYKSKTDEEKLIIVQKFVEISNKYKQKRKYSPKEWKQNYAEICKKIGVNYGTIENWKKQFGINCKRITEEQKIEHLLGNKKKKSKNE

SEQ ID NO: 149369 - protein, 102 aa, Heterodera glycines
MRGVHANSRLLDEKRRKDLLLQRMLPISVAQQLLEEREVVPESFGSVTIYFSDIVGFTSICSESTPHQVIAMLNKLYTLFDGNKFYNANFNVKCFSFQMLIE

SEQ ID NO: 149370 - protein, 56 aa, Heterodera glycines
MFDKETEEYKWEMLNARSREERKKAKECVRGSVLLKMAQDRAFSDERTTEQLAKSM

SEQ ID NO: 149371 - protein, 178 aa, Heterodera glycines
MKSSPKAIGGGGISLHPSTFSAAGTSTGGPFDVAENVHGIDHVTHKPFNFLRTNSEREAEEKRQQQRQQREAIVRHNEFIMMGGNGFDDEDESDVDSDMDSPRNVQQQSYNDGGHRRLGKSESKKRLAEKKQQLAEAKAELKMQLRVLGVIGHEYDIHFGQFRTPDPISNKKSKIQIF

SEQ ID NO: 149372 - protein, 149 aa, Heterodera glycines
MKAINLESFAAIGFATKEVPLDGSIGQILNSYGYRSDGSFGCNGINRPCKMPFGQVPMSLFDVSMQSADVAMAYKSSEFSTGDVVGCGLFLDTQLIFLTKNGQRMDDSSFFISSPANSLNSLFPCVSLWAGDKTEANFGPNFKFNLATL

SEQ ID NO: 149373 - protein, 143 aa, Heterodera glycines
VTAIIFCVAMSEYDQVLHEDETTNRMHESLKLFDSICNNKWFTDTSIILFLNKKDLFEEKIKKSPLTVCFPEYNGRSDYHEARSDYHEASAYIQAQFEAKNRSTKKEIYCHMTCATDTTNIQFVFDAVTDVIIANNLRGCGLY

SEQ ID NO: 149374 - protein, 68 aa, Heterodera glycines
MEHFPSKFVLCLLIAFIAVPCSVLALSAGSRVSMLACHNNYRSQLAKGTADNKSGKMPAGSNLIQQKY

SEQ ID NO: 149375 - protein, 29 aa, Heterodera glycines
METHETENSHLQYMKYRKMVWFLVFPLLQ

SEQ ID NO: 149376 - protein, 179 aa, Heterodera glycines
MVLDLVRYENKLSHYNNVLVNIVIQLKQKLEFLKNSCKENSINIYGDHEYILDLIELNLSKVKVKYMESDITNAAQLWTLDKRPTVIQSLWVIRHGHRQDNIDKKLCTEDELARDDIPLSPLGIQQSQELGKRTVSALESVKQVEEDDCKWVIKKTIGQILADNKNDQISLIMQISRFI

SEQ ID NO: 149377 - protein, 23 aa, Heterodera glycines
MKNILSKWGIEPRRKIMKDQEES

SEQ ID NO: 149378 - protein, 20 aa, Heterodera glycines
PGPESRSRRAWVFPGPGFFS

SEQ ID NO: 149379 - protein, 181 aa, Heterodera glycines
MHAPCRPCPGGAPGEPGPSGPPGVPGQPGLPGRSSGEALPGYPGPPGEPGAPGQDGPPGPPGPPGFSPPEIPDGASGYEPGPPGDAGLPGPPGQPGLPGPQGLDGQAGARGQRGMDGPPGEPGKIGLPGSQGAQGQGQAVKCPKQCGPSGAVYEQPTAAMEYYRRRMRKMMKSRMMTKKRV

SEQ ID NO: 149380 - protein, 91 aa, Heterodera glycines
MGRALDQIAFSYFVVFFIFVQFTIAFWPSNNGFSTENQGLQICLPHFAAFCTCFTAVPFCNAADDEKLYCQFENGNVQRDWPMPSQFSFKH

SEQ ID NO: 149381 - protein, 95 aa, Heterodera glycines
MFSSVAEEFLGMKAAELLAKEKEPESLAKHLDDLIAVKIIAKVNIKANSQTYTGFDWIVNLFKKCPGKNDSDVPKEKDDDDGDVDEIATKKTKKN

SEQ ID NO: 149382 - protein, 692 aa, Heterodera glycines
MIIRSPPLTRQRALNLRTFAQNQNAAVEEQQQQQQVEGVHAENEPLVNAPISPGLNRNLSLSAEENEHHFSEMAAAAANDDEIRRRLLHVSIQSNLPPRANGGGNNGAEQQQIRNENVGHEDFVEGLREVLRPNFGSFLVREEGDGRQMMHPTEIPRQMHQQPPREERGWQQQNSVLYRPVARQQQNFPVYENQMMPPQSQKFDAYTDSWPDEKRIKGLESKAYGRAERALEAAKAVIPIKYELLRGEMMRQLEETDSKNLNAFDELMLEVRRKPNESIDDLAGRISGLVKRAYHGLSFQLSDEFSIKYLIRSIGDPTLSLNLELIRTPRMSLDHFVSLAARAESTQRATQRFNPNFNREYQRQHEFQPIFRDRQPGFQPNNGPIRQNNPSFEQKLWKCYNCNEVGHISRNCPRPKQFEANAQNKAQTQPVNVSNKTFENSNRNFGSTKPNSSNFLRQNCIVEQQESVTTDLCLGKIEIAPEVDDFLEILVVGRENEAVPPIGKVMVVKTSTFGVETDSMLDGGAQISLISANFLYQLVKEKNLDFDSLEPSQTNVRVLYVNGKMVPCLFKVNLPIHSRGLKSEVKIAVHVTKASIGFDMLIGTNGLGKLGFKLYDEANDSMVEFENSVLNSKNLLTVIYGTTIEPRSTKILEMGVNENYEASELLISSDNSNDLHVEPTVAIANEGKMIVP

SEQ ID NO: 149383 - protein, 29 aa, Heterodera glycines
MAFSLSFKVIGAPAQFLLGAGPTSAATRF

SEQ ID NO: 149384 - protein, 23 aa, Heterodera glycines
MAIGFKQKVNEQRMYFIRKLFIV

SEQ ID NO: 149385 - protein, 46 aa, Heterodera glycines
MSISTNSTNGDFTPTDGEVNCESISLDNDGQSDGKVFVEEEGKVRN

SEQ ID NO: 149386 - protein, 61 aa, Heterodera glycines
MAIEQTQAYYGWGGYGYGYPYGFYGKRQAGFGPSANVGTFGRNEGENANGGGGGPFSLNNF

SEQ ID NO: 149387 - protein, 99 aa, Heterodera glycines
MWEKLEFALVKFREKIDELNEQLTRKQEELKHQISDWEDRAVDYERVIVKFRQKTAELNERVQNLHDELATMHARDEEKSRNAGAEMSLLANVNRTFSE

SEQ ID NO: 149388 - protein, 66 aa, Heterodera glycines
MSNQQTATASKDEGIGSTDKKQLDTAHCQQQLQQALEQITQLGVRKWRDCEERFKKKVSKVLLELR

SEQ ID NO: 149389 - protein, 64 aa, Heterodera glycines
MTSFTVAPIKPFIAKKIDKNFWDGKAGQVKSIGRKNEEEGKEDGEEKKEEKVTGEYAQFHRKMN

SEQ ID NO: 149390 - protein, 38 aa, Heterodera glycines
SFFSSPSSFPSSSFFRPMLFTWPALPSQKFLSIFLAMK

SEQ ID NO: 149391 - protein, 132 aa, Heterodera glycines
MRPGEYLSAFFGFLELMLQHVLEQEKLTNRRSWAVCIFDMQNVSILQWVNPLGPMTRCFEARVALAMAYYAEMLSKVVIVNPPHLLNVLFKIMSFLLPKSISNRFHVATNFAEIQNGFPQTLSRLDMVDTNN

SEQ ID NO: 149392 - protein, 150 aa, Heterodera glycines
MERNNLIRNFFTFFSIILGCVSSFVNEPRRGSGWERLETFKKELAKSDFSIDHPFKFDGQSYFWDGFSKPNFIGKRPEKITWECATNEKCCGIDCCPKNSSADNIGIIIMIIILFMYISFLCAILCTCTKSDVQQTKWSYCCDVGMSEKD

SEQ ID NO: 149393 - protein, 302 aa, Heterodera glycines
LNFNSKNEGNPLLRAICLMSWIVQAFSSGHYTTAVPFLFILSGSALKEIFEDIKRRRMDSEVNNYEVELLDSFGIFEDIKRRRMDSEVNNYEVELLDSFGSVRRWPNLRVGQIIRVSEGQFFPADIVLLSSSEALGMAYIETAQLDGETNLKIRQAVPLTAQLTDIAQLSALRAHAVPLTAQLTDIAQLSALRAHIECEPPNRRVHEFSGTMCAGDDEKPAAIDQFLPAAIDQFLLRGAKLKNCRWVFGVVVYTGHDSRLLMNSTSAPLKTSRIDVMTNQRSVILFLMLVLVTIISYIFNEI

SEQ ID NO: 149394 - protein, 335 aa, Heterodera glycines
MITLPNDQIGHSQSGGGKEKEQEKREEDEDKEEREKGAESGERNEVVETEQNHPMQHQQKKQQKEQEKERTSPRGKQSQEEVEENGAKSGEEMQNRETEGPEEQAVQQGQGEEGQHVPNQQGHEAVQQGHQQQQEQQHQAVHLGHKQHQAGQQEQAVLQQGHQQHQAVQQRQQQIRHGQQGLQGQLQLGLKNEKQGQHQAVLVQQQVVQEMQNQAVQRQQRVGQNHQHQTVPVQQVEQGQLPLTNFLQGQQQPQQSMQEQQHKIVQGRQDVQGQQIVQTQEQQPQAINGRQFAQPTQVQVQSSQHQNQVQGHQQGPLQKPRHVKQHVGQNQKHQI

SEQ ID NO: 149395 - protein, 206 aa, Heterodera glycines
MEASRREFGDDCDDLVRSSLPPEYAPPQLPSKDDDDGEEGEGEAPPIPERPKKTLSIYTKPIEHEETSKIVPDYLLKNGNFGGRANGRRRRLTDSEVLARLRTIVSIGNPDRKYRKVEKIGSGQQPKKELIINEILVMRENKCPLSFPFSFIPISLRHRNIVNYLDSYLVGEDLWVVMEYLAGGSLTDVVTECQMEEAFAIYALFR

SEQ ID NO: 149396 - protein, 82 aa, Heterodera glycines
MTPRSETQKPKKFHESKIENRESRTSLLPNEKEKEFKENRRHLGLSNDTRMMLLGKSYGALNLSNYYMVVSFLWHINLNRAK

SEQ ID NO: 149397 - protein, 592 aa, Heterodera glycines
MVCWDTETRLEQLQQAGQQRHKVNYLSARITCTECCDSENGLRLNCKICLTTYGAMERTKDWSESEGHEPISAFVEWILKAWDNKYQTFIWAHNASRFDGHFVLKYLGQTKRRPEVIMNGLKIFEFRLQHSRRHSKLTWRDSCLLMPIRLEEMPKTFNLNCADKPFFPYAFNRRENYNVHLQHLPDKEDYCPGSMKQDKYEKFIKWYDVNKNTPFYLPDELKTYCRNDTEILLAAVVQFRQILMRDITEGFDVLPLSATIASVCMTIFKGKFLNEKELAIVPEGGYERNDRASVFAIKYLDWRSKRDGVRIQHAGNGLEKRWRQFKLDGWIAEQNKCIEVLGCYWHGCESCFKPDDELVDGKTCRELNDATKLRLLKLQEPVPAEDAYGGEDEQGLDVEEIWECQIREQLKRDDEMRAFFDDLGTDRGPIDPRQTFYGGRTGPLQLIAEPKEDEKISVFDIVSLYPWVNYATDYPIGIPAVIHPTVEEMIVDWTRPEHLQYQGIYRVRVIPPKGLRIPVLPLKIDERLLFCCCHRCAAKFRKLNTRRVHKCPHTDEQRAFTGNFTHIELARALETGYRVDRFWRAWHYDEWY

SEQ ID NO: 149398 - protein, 394 aa, Heterodera glycines
MKRTGDEPSTSSSATLEDYTTAAAAAAAAAVAAASFSPTISNSDGVAKRQRRQSWDFKTMAHFEEHHLRQQQQKQESHAIPMDGEGRLHQRGIDGAQTVVAAADNAEDHNEQTEKPLFEQLQYYVHRVERFALHRHVTEFVLNGQHDEPEEALLNAFEHIIGQAIRNAEENTDQDGGGTAGHRRRVLKLGVLLNGKGLTDPIVLPVRPPEQNTAEVLMAELDKLGQSDGDEDVHGGGISKRSLLLSEPIEIIVTCIAPPVGAAPRFHPYQHWGYDERHMIRIFNTGNNFCLFYALIATRAYTDAEFLKSTVHLQTAEGGQSSNSNHVSSEVIQRVKRRADFCSDHKALNRFVSNRDRLRIAVQELMRAAEIAPDQDAYGMEHLILIQQLWVQII

SEQ ID NO: 149399 - protein, 202 aa, Heterodera glycines
MSGLKRFQLTSSSNKRPADEFPSHPKQLSEVAKFNAPGIFFVRAKVADLQFSLYKACPLKSSGSVPCKKKLDDEMFCRGCDHRANSPLQCLFLRLDLQDCEDLEISQKVTVFSNVAEDYLAMRVNQFADMVEKCSEKLEALLQSKLGQTLTFKLNLKAKGGGEFTTMDWIAAAILVDKKNEADNEDGEIIELDIGKKRAKKN

SEQ ID NO: 149400 - protein, 202 aa, Heterodera glycines
MSGLKRFQLSSTSNKRPAEEFPAHPKKLSEVVKFNSSGTFFVRAKVADLQFSLYKACPLKSSGSVPCKKKLDDEMFCRGCDHRANSPLQCLFLRLDLQDCEDLEISQKVTVFSNVAEDYLAMRVNQFADMVEKCSEKLEALLQSKLGQTLTFKLNLKAKGGGEFTTMDWIAAAILVDKKNEADNEDGEIIELDIGKKRAKKN

SEQ ID NO: 149401 - protein, 27 aa, Heterodera glycines
NSALVLIWQKIKPFFLRTHWCSIHLTK

SEQ ID NO: 149402 - protein, 113 aa, Heterodera glycines
HTVFLLNKVFCNHLGVEACDTAVKLARRWAYDVKMVPKNEAKVVVKMVPKNEAKVVFAENNFHGRSLAACSASTDPDCYGGFGPFVPNFVKVPFDDLTALEVEIVDNQCSIGN

SEQ ID NO: 149403 - protein, 60 aa, Heterodera glycines
MNRRWISDRPLPSKIRFDSIQISYIEAKFNNFGWPSVVQMVALSEKRWPTQAIALFPMEH

SEQ ID NO: 149404 - protein, 86 aa, Heterodera glycines
MVPFELVNEWTKEKLTLAKANENELDNWIMKRCKIIGEKEENWDNNCNNVFFWLVGGIDCIGPLSPPPAEETGQGITKVASSADDE

SEQ ID NO: 149405 - protein, 44 aa, Heterodera glycines
HFTRPMTFYASQQHFTRPMTFYASHDILRVPTTLYASHDILRVP

SEQ ID NO: 149406 - protein, 80 aa, Heterodera glycines; identical to SEQ ID NO: 146657

SEQ ID NO: 149407 - protein, 82 aa, Heterodera glycines
MNLLDKICLVAEPSVTEPGDSGSPLLSKIGDKNWVQVGVLFGGSGCSEKHPFSTTRRRSLYTPIDCDWISRVTNDEVKCKGW

SEQ ID NO: 149408 - protein, 25 aa, Heterodera glycines
YQICITLNKCWTCQQNDFLCYVFSS

SEQ ID NO: 149409 - protein, 43 aa, Heterodera glycines
MGLPLTEYRQAFQTVFPFVFKRFSNANQVIPLQNGHPLETNLL

SEQ ID NO: 149410 - protein, 86 aa, Heterodera glycines
MIFWKIFKFLGQKVALGSAARQILSNTFISFNSFAMETIGSTTGDEPELALKHFEESLDLDSFVGPWTGNLTDKKNPEKPRKKLEH

SEQ ID NO: 149411 - protein, 39 aa, Heterodera glycines
MDGPPLPDSQSGQRLIVGRSGEGEKSWIKGTAPKATIEF

SEQ ID NO: 149412 - protein, 131 aa, Heterodera glycines
MSPQPENPPAKRRMSFFERLKHITGANTSEQGFQTSQDDDIEKEIKEFLALEIANPEADPLDEWKKIAPRFSILAKFAEKYLSAPATSVPSEQTFKVARDVFDYRRSKLSPETAEQLIFLNKSLPQMNYNY

SEQ ID NO: 149413 - protein, 191 aa, Heterodera glycines
MKGFKEWNYECGFCFYGADGEMKRVHKNKKNLPLLLIAEKCELFATLFANSFNNSETDPSNPCLGNIIEIDQCFISDINFNIIETQNLLKKLPNKNGTSPDNISYKILKICHSSLSTVITDLLRISLDTGSHPDICKESIVFPLFKKGDKNNLENYRPISLTCSLCRKAFDSVPHELLLYKLEKIGIRSKL

SEQ ID NO: 149414 - protein, 83 aa, Heterodera glycines
MPVNVNSKEWSGQQKMAREHRDLCSFPIVDEAHLKQFSKKDKVQSIELIKGDCGFIYFIIIVWRIKNYFNVLKSQLKLQNKIY

SEQ ID NO: 149415 - protein, 144 aa, Heterodera glycines
MKTFVEEKVAEAKELAEFAIADAERKMKQSLNNAIHAERERGQQQLRSVVEEQHMRCRHLALQIYRSATMTKPTSVRTSDVSPKWEPHCMFCLIDEPMFGSEWCAHVNVCAECSIVWSGDDQFKCLTCQTTCNKFVYFGPNPSP

SEQ ID NO: 149416 - protein, 158 aa, Heterodera glycines
MMNLRIGVLKRFPLLGRRRRFSRRRKRKVGPFTQSLSVLVMPLGEQKGGLIFVIKHGRTGQYPLYSTCSESWQAQGFLLKQELSACLVHAVLVHLGNPGPLVRIFFFKLRALLLQNISIFRDPVRDCELFKNRIFSLSPIRRQCQEVWLVTMYGWDGT

SEQ ID NO: 149417 - protein, 91 aa, Heterodera glycines
IKSVRSSTSDGDYVLNNGDQQHCSINEELRNLTLSHNLLRQQQSSALSDYMERMVTFPSSCVAAYRPEERPMRLVRNCNLLDQKIRLYRDQ

SEQ ID NO: 149418 - protein, 54 aa, Heterodera glycines
MRLIQTCNLMEQKMRLYRDQVVFVQPNSLEIPKSMGDDAFGLLMYTLTQTYDAN

SEQ ID NO: 149419 - protein, 51 aa, Heterodera glycines
MSNSNDMSGYEKLGKIGEGTYGTVFKARNKDTEQIVALKIVRLDDEDEVNY

SEQ ID NO: 149420 - protein, 153 aa, Heterodera glycines
MTFCICPKNWHGLVNCYKIPNFHSILPMSASRTKVIWVPMLNCAIFFASLFFVVLPTLCKNWRYHLKDVIVGKIYFLLVRIKIKHMEIAILKRESVGNGPNLFNENETIAKYEIMDGAPVKGESIPIRLFLAGYDLTPTMRDVGKRFSVKVRC

SEQ ID NO: 149421 - protein, 84 aa, Heterodera glycines
SAGTDKCPDGFTCVANKNCCPGSKEIVCGIEYDTGRYAFQGSHTPRYFYKKDIDNCLLFTYYGALGNGNNFETYNECIKYCKKT

SEQ ID NO: 149422 - protein, 29 aa, Heterodera glycines
SPIFVLAFLIELNRFISPKSVQFIHIKFA

SEQ ID NO: 149423 - protein, 166 aa, Heterodera glycines
MAFFSRINGVAKRAAISNAADTPSAPRRSMVARHHRISLKPSPAEGTVDIQFDDNQQQMPTATIGGAAGGDQNKQSCANGSSNTSPPARHGHQTQSQQQKMTTTSRSSTTPTPPSTAPSLCPLNGVGCDGEAAQQKQDTIQPANCVAGASSSSSSSSFSVPNEHFA

SEQ ID NO: 149424 - protein, 71 aa, Heterodera glycines
MQFEVEFQETVYQNLLDPGKRFIRHRLFREHCVFVYGNYIKDLNILGRDLSRTVIIDNCLQSFAYQANTNI

SEQ ID NO: 149425 - protein, 65 aa, Heterodera glycines
MAFSIIFVTVFRAFFQQSAIFRPYKIPGLKWQLNSCVLIDHMVKDGEKLISFRFDIDCDTDSKIF

SEQ ID NO: 149426 - protein, 125 aa, Heterodera glycines
MLRFIYSADLSQLNGQNAIAVLYAAKKYNVIGLIRACLDFPIGQLQNVFFAFAETHFLGENALRWADEKCRQNDTECSAQNRRAMLGPALYKIRFPCIFETDFSTQIGQYCSQHFKIILKYRTPS

SEQ ID NO: 149427 - protein, 37 aa, Heterodera glycines
MLQTVSGVLLRSKMFYVPFLICKQPEPIVDEKSQQIG

SEQ ID NO: 149428 - protein, 148 aa, Heterodera glycines
MANSAMEQQLGMLCPITALTLPQKRLILARWRQLSAADILRLSENIFERTFRRNESFARTVLRQNDRNWKNLPQFRVLTMRFSYALSALCASLADDAAPGAELLAEFGAQHAIGLDNGQVVPPSYWDVLLLAICEAAGAGEGQQQIEV

SEQ ID NO: 149429 - protein, 105 aa, Heterodera glycines
MEKLINGPSAVYVLESEGFCATSVEGTPRGALAANAIAQTAASGCDGTTAEGTTACQICLVKRSVVAHGIGQNYRYRVGTVRGTAKSDGWTPIRPSGTERGQTNG

SEQ ID NO: 149430 - protein, 44 aa, Heterodera glycines
CNFIKNGKNLNLIRNVPPLRRSIQKIFVCLQSILIHFSHKNVLI

SEQ ID NO: 149431 - protein, 122 aa, Heterodera glycines
MGNAESNAAGRHVGSGKLRQSKKAKKEKRSCSEHLEQLQIKQRNTSMEQEKQKMKQKQEKGDKKEKEESISAKFIRMPRRLTQKSSEGTAASACCCTRLAAQRMPRMAEETVAMSRTTVLPH

SEQ ID NO: 149432 - protein, 37 aa, Heterodera glycines
MAKYAKNRKIFEEKCQNMQKIGKYAQKMVFGIIKLNW

SEQ ID NO: 149433 - protein, 246 aa, Heterodera glycines
LSLLLSPGSIPLHNFQMYWTDRRLEKVFAGSSKPNQSSMILSPVTVVGDLQDLTDLAAFDALAQPKATSPCHISESLRKPCQQLCLAIPGSSSPNCACAKGVPKGRICDEPDTFMMFIDGDRIVDATIVPDIKASSPLREQPLREQFPPFPSIQIFDVDVNLRRIYVATDAPNGANISWFPMSQPKQIRQLINPRLHSLEIRHVSDMRYDWVTQKLYWTTGRSGQFFVKIIKFYTKLHSSDQNFKK

SEQ ID NO: 149434 - protein, 751 aa, Heterodera glycines
MANKFVLVPQEIYRGLTSATDTGDINLDAVRHDLTRARAERTNPSAKNVSYNQQLRRYLQMRREVADKPARVELVKGLSVLMRRGGADDEAEVVDTPPRPPPPPPPPPGQHPPRRPPSPPGPGPSPPGSPPPRPQRPPRPPRAAAPPSRRDGRVEEWRKKRNDIQQRQPVVRDLLAEAAAAPLPESDEEDDYMLESGFALPAPSQYYGELPVLPDNADAIEEMDTAQHRIAARRKLKKADDDDGNDDLHRKKYRPSTSQQVERKPKREPKFDLDPRPSTSRQAGYNPPAEPKHEQKPSKKPPPRATPYHIPKREPKIEETLPRQQPPPAAPQVPPVPPPRRGTKRRHPPENGDESGELRIRKRVRQARRVRVYYSPEPGPSTSAQSDEQQQQQQRELFAIPSNQLTMAQRIELIYIKCNRYADRMGVRGNAIINTQNAQPLGHRTYTLMRPRRVRFPRAKTVAAGFMTDVQVDLADFQALSRHNRGHRYLLVAVDVLSKRLFVVPLKNKKAEEMLDAFKELVKQMPMVPHRIFSDKGTEFKNKLLKEFFEEQEIEKHEPVHSSVKASVAERAIRNVKQRLYRYFAERETLNWVDVVQQIVDGINSTPSRVHGMRPIDVNFENAQKVWKRIYESPQKRKKPRFRKDEFVRMSREKGQFEKGYLPNYGDEILEIDEVLKAVRPIRYKLRDDRGEKFRGTFYEQELARVRKDAGTSYRIEKVYRKRRKPDGTTEMLVKFIGYPEREWIDESQIV

SEQ ID NO: 149435 - protein, 107 aa, Heterodera glycines
MCVICEYLRGTDGLAGFISSQQSLPTLNTLKKMPPREGQSNNAGNDAPGHRQPPFAEQLVNDAQLRDIMNVLQQHGVLVGLNGTPQQIVEALRQLAQGQLDDRRRQT

SEQ ID NO: 149436 - protein, 111 aa, Heterodera glycines
MKFFLTFLLLAISFLAIKTAADGSDDRNGDKSLPNPLAVEGKASKSNRHKRHYGYGYGGYGGGSWGGYESSRWGGWNNGGFGGGGMGGGMGGGMGMGMGMGMGGGMGGGGW

SEQ ID NO: 149437 - protein, 290 aa, Heterodera glycines
MLWQVVVHYAPLSIVGRLAVVLKARFTDTGGHFLLTLFVPNSGDKFSEFGQRHKAYDALSEEDKKWHRNGLLLSHAALHGPEGVVPAHAFAREAPFTILEDVGLDSLTAVCRRSIAKLSVDTVLEEHRRISGPYRAQSPDRAVRRLLVELETLSDRFEQQQQQLKRRDMSELVYVLGQDTDRRDVDLVDRLRELRLMAHRCKLEEQKRRLAFETSSNNLQFSKEYVDRLKVLQALHYIDRHNMVGLKGKVACEISNQELLITELILDNKFEQRTAAQIAAILSSITCQFE

SEQ ID NO: 149438 - protein, 155 aa, Heterodera glycines
IRKFPQCAAPHKVVFVFSRQRCDDTAQLLQSVDLTTEKEKSAIHRFFTKCIDRLKGTDKMLPQVLLMQELCKRGFAVHHSGILPIVKEVVELLFQRGYVKILFATETFAMGVNMPARTVAFETIEKFDGNQKRFLNPTEYVQVEKHHQMLENFKK

SEQ ID NO: 149439 - protein, 341 aa, Heterodera glycines
MTGLPPNAKSKCKNRMSNSSASTTWMPTASGGGGGTQFGGPIAMPTTTTMTVGDGAPPPTKIRRKENDGGATAAATETENIFGTQQHAQPSAAKNVIITLNDDDIFPINRSHFTKQHFSNAQKTLASPRQKAPQKHTHTPQTTTNTAAGTGCQPSSDTSPMPPRPPPPSFTGTSSSSLSASVAAAVHHDPCAGLPRSALSTMIAALSSQLSHHYPHQPQQPSLAVINSHQLHKQQQQHQQSSSMTRMTTAVTQPTCSSPSIASSTLFRQQAQQQQQQHHQQQQHGIPPLQGQQQHVVNPQILSSQRNNAEQQQQQQQPDLLLSHLVEQTLFFFVFDTASGN

SEQ ID NO: 149440 - protein, 38 aa, Heterodera glycines
TFFIYAGVTAVAFAIFYFVVPETKGLNLDEVNFYLIFL

SEQ ID NO: 149441 - protein, 88 aa, Heterodera glycines
MISNFGCFFLQFLPNFGLFSSGWIVFFVGVDRLISVLLPLRPVLCTNSDMFSFGMTTMLLRNGLVINGMSIICYLFVGLSLFWSWQKS

SEQ ID NO: 149442 - protein, 54 aa, Heterodera glycines
MAFQNYSMVNLAFNRFGVDTFSMELVLSNSCRWLITLPGLVFNSALLYTIISEK

SEQ ID NO: 149443 - protein, 143 aa, Heterodera glycines
MVTSCKARSKLFYNQLQVIILIKVASSIWTSHTKSGLLIRAEIEPLCPNCSNGTVGQRMAMQMRPMPMCLFGLRKICWNFADILIGQWPNGGTLTTKSATDSQLCSKRRQEEADPIIGLCTFFCPSPMKVSDSFIVIKILKIV

SEQ ID NO: 149444 - protein, 26 aa, Heterodera glycines
MCSNRCALITKSTESFANGGKDTFEK

SEQ ID NO: 149445 - protein, 202 aa, Heterodera glycines
NKSPKILFLDGRLTGILAFSVFMAAFGSSFQMGYHIGCINIPGSLIKEWFTESYKHMKGVPISVEEMESTWAFAVGIFAIGGMFGGIMVGTVADRLGRRKSLLYNNILAIIAAALMTLAKYMNVYYLIIIGRFIIGLNVGLNSGLSPMYLIEISPNNLRGSIGSLHQLFITISILASQIIGLPQIFGTTNRWPLIFAFTLVN

SEQ ID NO: 149446 - protein, 85 aa, Heterodera glycines
MRNEKNAKMGPSPGKISQNWEKHSIEGQNQEKMDQKYHIKWARNLPGPGQFSQKKWKMKGRSQITDHIWGKGSGQESSQKLGKYI

SEQ ID NO: 149447 - protein, 76 aa, Heterodera glycines
MKRENYWEFKPESENFYALGRQIPRAADTIEGALELSNLGKQSFNRTRPASTSCAYASFTTRVLTPEGQTVSCLVV

SEQ ID NO: 149448 - protein, 23 aa, Heterodera glycines
MACHFSGKCLGITIDAMECNSKN

SEQ ID NO: 149449 - protein, 286 aa, Heterodera glycines
MLKINFIIIFFLFLFVIIDGTDEDLIDDLWKNLKSPTPKNFKNQKFGENNTIKQEIVEKNDEQENANKIEMEDIKPIKIKEPKIELGQLNEESFGNQFDQQADQNVSFADLSNSANDKDYNNMNTEEINEMEILNKFNLMKKELRKENAYKNLTNVQFECEIAKKLGTNRNKIYEMKKKLGQKREKRTEENEETKRKLIRKFDQLRKEKICGYKYDRLKRNKIEHEIANELGVTFNKFYQWKRELGERKIYSVNEKLEYVKKSEEMAERNLTICEKQNCRNFGHSK

SEQ ID NO: 149450 - protein, 130 aa, Heterodera glycines
MANCALDCTVCMTRLRWNPINAMCMCWSSSTLATQNSTHLAVKRGALGVAQALAPIVCSLSSLTLWNFPLFSYRAFSVSRTSLEFIRAVSDLKIFNTREPGSRIDSQGVETESRKPWEFLTQEPRLSDIP

SEQ ID NO: 149451 - protein, 80 aa, Heterodera glycines
MSFKIRSLTARMNSRDVRETENARYEKSGKFHRVRELTGKSTYIPNAFYHFVRQLREQTIGANACATPSAPRFTAKCVEF

SEQ ID NO: 149452 - protein, 128 aa, Heterodera glycines
MCISAICIKIYLYYNCKKLKMCIFRYLYYNCKTQTKNMHFQYLYYNCKKLKMCIFQYLYYNCKKLKICIFSICITIYLYYNCKKLKMCIFRYLYYNCICIKIVKHKLKLCIFQYLYYNCICIKIVKQD

SEQ ID NO: 149453 - protein, 421 aa, Heterodera glycines
MLNPHPDELKQLIVGNKQSREGKEFVRHMSRYNNLFQFASVSAGNKPSPAGGPMAVILNGEFHRRISSMQAGTTQIPGFGQLYILDPVEAMEQRRNNPRFTGEKITNEDEFVQGHQLNEQTLEILEQMIQVHHPAAQAYKQAREQLTELLQQQNQEELRFFRMTLLDSRRAPAGLKDPKLHPHQIITPSTGEGMFAIHADPTGAPPPKGIWVENKQGQLNEIAPFSPWTDSLTYPLIKPMGDDGYTTGIKYAKPPSRKRKGAQNASGLFDSEAESDNESCETQSIASSDAGSVADSDAESVASVSSQHRRIDKSKQFISLRDYCKYYLAIRDENVELQYHHILSCGGGLGQRWILDQAAKIDWQIATFLRRPDMDLRISTPKNLLQYLVNQYNRQQARQNPNAQQKTVDDIGSVVRLSEHN

SEQ ID NO: 149454 - protein, 27 aa, Heterodera glycines
RPTKFEKRARSARLEPRCGLKTPNNFL

SEQ ID NO: 149455 - protein, 133 aa, Heterodera glycines
MIGRSVAEFGADAHSGQLRRVGGRLPISSDSSAANTQVIVTPSSRSAKGIPLKLLESLEHSEGNDTVFSCLFGTEGGNRAEISYNQWTDNIPLVEASKQMISEQTFSTGKETNGCAISINYAYKLTSKDEQKM

SEQ ID NO: 149456 - protein, 138 aa, Heterodera glycines
MSANCYMGSRVLISVSIGGTALITFVTLITLVTLCRDINSLYDEIISDLDEFKDIANHAWKTMMDERLVKGGVAEQFGSGDAEFVRRQPRQSYADGDAAATATGGSAARVSSASAGICKCARQPNNCPKGPQGPKGQP

SEQ ID NO: 149457 - protein, 237 aa, Heterodera glycines
SSPGPPGSQDPPGPPGLLANPATEGSPGRLAKRDPPGPDAAYCPCPPRTGEVAGKQQQSAGAGGYRRFFRAFHSRIRPSNLEHHYEQLLFNAELSSSDRELLARRIIAVHFHLSIMAKLALPNESSSSSSSKMKNKKSRKPEKSDGGPVDYAHAYQTIRQTIELVSAKDFVPMEHLCHLWQLERLFNRRSDTEDKARDELIKACNFVKVVLLIGESGQDRITGIKTPVLTGFIPRHR

SEQ ID NO: 149458 - protein, 46 aa, Heterodera glycines
SPFQNLFLDNKMFGLVGNAGELWRLEINHTKKPFTCVIFEIARKIT

SEQ ID NO: 149459 - protein, 150 aa, Heterodera glycines
MQNSQEQQQRHQQQQQQQHSQKEQPKQQQQKQQRKRKCEDGEEHSARADSVATTNKIVAVEQPTKPVAAAAAVAVPSTRTTRSSNRIAKQYTQNTSKTSQSPHQQSANSTDCQYDNFHHQQRGGGGTQRRSGGKSQQQVKGERKSWDGKK

SEQ ID NO: 149460 - protein, 69 aa, Heterodera glycines
IINMDTTMEQPAEDVEDVQLDLGKKKKKKKAKTTELKLSEDEHEEEKEVTALAEGVGRTNLLDAKNPRR

SEQ ID NO: 149461 - protein, 81 aa, Heterodera glycines
MVFSHDEWFVQCVPALCEQLDKLLLLSQHQREEEGNSCLQQRRNTDDDGECHVRRVLRHLLALTTRIPMRTRPRTEMGLFI

SEQ ID NO: 149462 - protein, 83 aa, Heterodera glycines
MANRNASAVSKMLCCKSWANSLSSPLIVKATFESSINCNALTAHSVAASCKCCEVLGWLSTERTERKKGERTKKYPKSTNETK

SEQ ID NO: 149463 - protein, 325 aa, Heterodera glycines
SIEAGLGRNSTAIITQLSAALCDLYIHVVHWKGLVAQILVQFDSPTSSSNSTVLVALFKALPEELYSHKLKIGENRRTEIEEELARHMETLLSKLVIILRLYKNVSSLLLWRNRLARSAVNRKLTRSPFFRSVLSVLSQPNTSQHLHDAATECAVNALQLIDDSKVALTMSGELSEFAQLLQQSIFETADAFRLAMREEDSEKLQNFTRLYAEQSNAFLSAMANNPRKGFGDLRMLDMLLMANDYHDYTLCEMSFNVWYQLSEHLYQCNEAEFDELQGIFTPYVEKHILSLCKHCRVEPDSQDLLDKNSEHADFRSKAQESVKDV

SEQ ID NO: 149464 - protein, 54 aa, Heterodera glycines
MSPLRFFVALFLITLAILAGTHGTVENSVDGGPNMASPIIRERPKSLLLVLIML

SEQ ID NO: 149465 - protein, 202 aa, Heterodera glycines
MFASVFMILLATSERLLQTFSGRKIVKTRRILQRHRPQVTLLVMCVSFAYKMSIYFEIEVIEIANCTDFERFEVRSAVEGEEWKFYRFWWMFVFRNVIDHIVPFFLLIILNFFIIRALNREHIRATHSFATAAASASALTLRGSSASSDDGRASAAAAAATRRESLCQKGSGRRLQRHALTLAEDNAQKKNLRRFFGKFEKT

SEQ ID NO: 149466 - protein, 57 aa, Heterodera glycines
MFTFICFFMLLISPIISAQNSKCQCPKNEQPGQLKCTGCEPSCDNRNPDGAILQLLM

SEQ ID NO: 149467 - protein, 228 aa, Heterodera glycines
KDIQPQCRDTFVQSIADPCPQRRALCCVLSNPDQKGKMRRIDCLRQADKGIPLESTDGERLEKCGTCNFPTLCVNPYHISIAIRELDLWLANYIFTTDPDKPETRRRPRDKDDDNDDIDDGTVSDDSSEGIWGTGVFSAYELKKLHKPSIMCSSSGRGAKTAVPLLPNAVATTTTASSSSMTAPSVGATVFVGGGRKASLTAAGGTTVATTIVPLGSIWGKTQPQKWV

SEQ ID NO: 149468 - protein, 97 aa, Heterodera glycines
MGKAVAEVAEPIDALSGGKQSEEKADKRQPMLLPLDALFGVLSALDPQMIGRHCAILDRLESVIGRQTLTSVANLQKRIGTSDHLAVTWQCETLGNE

SEQ ID NO: 149469 - protein, 39 aa, Heterodera glycines
MPNHRTVEDGTGVFASSLALLALALRRKIEKKKLPREED

SEQ ID NO: 149470 - protein, 47 aa, Heterodera glycines
MRPKMRSFGAPQFRFVRTCENYFVEKIVQILFLFFLSTTDENDELHL

SEQ ID NO: 149471 - protein, 44 aa, Heterodera glycines
MSRRKGKHLINQKQLFIYLFIFVNGLAIAIGQSEKHLNSSRRKG

SEQ ID NO: 149472 - protein, 87 aa, Heterodera glycines
MARGQQRGCIRLRGAALGIDEENNAQFTIAVDGKGKNRAERDTWVRVLERVIHEKCGYYKPPQEDPLEELRKRVIIAENQSQTLMEQ

SEQ ID NO: 149473 - protein, 244 aa, Heterodera glycines
TRNLEQITARETDKTDQKRKKMLTEIIATAKRLQSSVDHSSVLLRQVQRDIGTSLTMSTDQQQKRRTAADKAIRSPTTMATTTGTAKAAMTEEDNLNGNEDGEGGKMGGGAGGGGPPQLQQHQRERQESEDEEMCPIGGGSNGKEHQQQSELSDWGQFDAKGTDYDAIYNNTHDEQDIGDINKQHGSVLMHLLSQVSVGMDLTKVTLPTFILERRSLLEMYADFFAHPDDFISAVDEDSPEIRR

SEQ ID NO: 149474 - protein, 79 aa, Heterodera glycines
MDKFVIFRRNAAINSCFLVPALKVSKITQMDVALLLARSGASIEKKNRQNKTPIDLVDGKEQKLKLIKASESVKPTAGT

SEQ ID NO: 149475 - protein, 171 aa, Heterodera glycines
SATDIFSLLDAIDKLKHLKRTGWVLVGISEPETVASHMYRMATLAMTLSAHRTDLDVNKCMTLSAHRTDLDVNKCIRMALAVETISNWLPETVGDEWKNLWREYDEGKSAEAKAVKQLDKLDMLAQAFSYEKRLSIDLTEFFDATSNAFSEEPFASWAAQIRLGREQKTMT

SEQ ID NO: 149476 - protein, 330 aa, Heterodera glycines
PPPPPFSLTVTLPPSTSPCIPFIVSHFCPLPGTGTIRWAFFEPSRVWSQADERSVYNVRVPVDVVLSLLMLSRVYLVCRWQVLHSKQFQDASTRTLAALNRIQVNFAFVLKTVLDQRPMFFLSIFLDQRPMFFLSIFLFVFWLITAWSFAQCERFGRDVDDPFILYTNALWFIAITFNGNGYGDIVPKSLAGRLIAILVGISGAVISSILIAVISRKILLSQGQKNVNNFMNDSRLTLAHKHAAARVLQKTWHIYRCLRSSDAADHQLRRHQRKFLNAIHQFRRIKNKIRSFGENGSATVQQLSRLMTEMHSHTQRLALAQEEMRVQIEL

SEQ ID NO: 149477 - protein, 108 aa, Heterodera glycines
KDSLLDARSAMPTGKRPLFYFHVRAEFFSFAGTLSTAHTLSMPFTIATRRNQDCQVQRMMSSYTATCFWLYGTNVLDGLLIQWFDGGQYWKHFKLLYSLYFLKFQIFS

SEQ ID NO: 149478 - protein, 21 aa, Heterodera glycines
MNSSLIGGSLGSWIDEERSQL

SEQ ID NO: 149479 - protein, 168 aa, Heterodera glycines
FQYPCKFCCASAFSDPEDLYLLLVFSFFPKNFSKCNEANFLNLQINYLFSFPMKTLCRFCFFRDFSLQIVSEEVAQQIQQERHRKTFDPPSPVRKTPTPSAALLAMKPATGVKRNNAKASEVAEGGNTAHKKSDVNSRECISIPPLFDAEHNGWCATYPHLLCTTRQK

SEQ ID NO: 149480 - protein, 156 aa, Heterodera glycines
MAINLLFFKEKIHARLVELVNKAHRMQPPPTVQPNDQQFERFYQAYVTALISLHELYTLCQQKCLTSAEFEAHLANFKKQLVAALALQRDFSNCHGNLLWRKLREHQIHRMTHYGYDNRTFMDSALSFYAHMLYNLGVLAARIQVKKEEGWHANWS

SEQ ID NO: 149481 - protein, 43 aa, Heterodera glycines
PGLDPGLEEPGFFLDLDFCPGNPGPGPTWNPGPGPGFFQNVDL

SEQ ID NO: 149482 - protein, 62 aa, Heterodera glycines; identical to SEQ ID NO: 125756

SEQ ID NO: 149483 - protein, 151 aa, Heterodera glycines
MASSLIIGQMQQPTNINANANNNNFNNNNSNNNSEFAPLHMEMFDFGHYQFRRMAFFTIAWQMVICDLMTQTVQIIVAVPITFTGEAVYGHPFWYYAVLFFDTVAYNATLHFSALLTSNRLCVFFVPRLNAFLFSYPNIFGYSKTFGIRNQ

SEQ ID NO: 149484 - protein, 18 aa, Heterodera glycines
MIPTIFGYIANDLNLLQN

SEQ ID NO: 149485 - protein, 108 aa, Heterodera glycines
MKKSVTVAVPEQKEINQPNAEVEPPKSDTTKKRKVEDQELWKLAKGKFMLATYLCADDWDRLFHNQQKVARLEDGRFAVCFELCEECVWRNCRANDLIASMKKKQNNA

SEQ ID NO: 149486 - protein, 591 aa, Heterodera glycines
MANKFLLVPQEIYRGLTSMSNTGDLNLDAVRHDLDRARAERTHPSTKNVHYNQQLRRYLKMRRELEDRPAKVELTKGISVLLRKGGEDENGEVVDIPPRPPAPPPPPPGRRPRRGPSPPAPPPPPPPAGRRSRPPPIPPAPAPYPPSPPPRPERPPRPSRAAAPSRRGDSRLEQWHKRRSDIQRQRPIVRDLLAEAAAAPLPEKWALPAPSQYYGDLPALPDNADEIEEMDTAQRRIATRRKLKKDETDYADLQGKRQRIYRPSPPRLPLPPRLKTKAGPRPAPPPPSPRRPSVKLEKKEPKLMEVKPSTLKQADHPTPAPRANREPMSGLDPRPSTSREAGYFPPATYKIEPKHEPTKRPMPYRIPKKEPKSKEKPPQTQQQQPPPAAVVEEMPYVPPPRRGTKRHYPVNGDDEVRVRKRVRQPRRVRVQYSPEPGPSTSAQSDEQQQQQQRELFAIPSNQLTMPQRSERLYIKCNRYADRMGVRGNTINTANVPLSTSDKPFGTEDDNNFRLFDGELSGSGDDDDDNDDDDEMVRFNDWRAVSTTASHLYMPWRRIRSAMTSCTFSCCFSKSNHLRRTASEIDEVVSNG

SEQ ID NO: 149487 - protein, 255 aa, Heterodera glycines
MPIFHNPEFAQHDMYLDDTLWDEENAADDDHQQKPEKIQHLWLIALVFVCVLAIGLHFLFMSDKMNKFQLAMLDKLEQKLISERQPKVNENFREIEAIISEAIDAKIKTAIYYVIGLAIAAFLLLMRLKANHEEERRREMEENEEEEGTHQMEENEEEEERGEMEANEEEEQGREEMEENEDEEESQEMEENEEEEERGEMEANEEEEQGREEMEENEEEEETQEMEENEEEEERGETEANEEEEQGREEMKRRG

SEQ ID NO: 149488 - protein, 79 aa, Heterodera glycines
MHYFFTFYFMVVLFQRIDAIARPATFNRNILKNNSFEAKLSSILHNHPDKEGTLSKKEVFSNGVIRKCLNIFPIFLFIF

SEQ ID NO: 149489 - protein, 428 aa, Heterodera glycines
PPRIAVEGPMSIVIGEGQSFEENVTIYANPRVNAFAWRKNGITIDRTVGTIFVRQSVIGGDGVTKDDSGIYTLFVSNGVGTANATIKVVVVVEYAARITYITTPVIASVGEDVVLECEADGMPMKAGMIKWFRGGAYTCTVDNGIGQPNHTTAYLLVRRAPVIVKNAAFSRAAGPIGGKAVLRCRATAVPNAEFTWGIEGELVHYNTTKYRFFDTQLDYTTFQSTLTILNLEEHDYARRYRCRAQNRLGLVQSFISVGPPAPPELPTELEIVNVTNSTASISWTAGFDGGAEQMFELLYQDMDSNEIRSLNTSETQVLLKGLDADHGYQLQIRSINARGDISDLTRPLLFRTMDENSQSAGVPLLFRTMDENSQSAGVGFSIITKVNSAIVALCVALLALLLLNCLLICYLNRRNKRRKMREPTEGKQ

SEQ ID NO: 149490 - protein, 37 aa, Heterodera glycines
MADLKKMKRDTEAEKKAESKNGLQKRHFSRPSNNKMF

SEQ ID NO: 149491 - protein, 307 aa, Heterodera glycines
SYFNNSFFILKSCAETYLTLSITDLFRISLDSGSLPDIWKESIVFPLFKKGDKFNPENYRPISITCSLCRVMERILSQKQLSPKNNKISEYQFGFVRNRSTTSQLITVVEDWYEAIINGKVDCIYIDFQKAFDSVPHNLLLYKLEKIGIKGKLLMCIKGFLSNRTFVKIGDSLSSSKKVTSGVPQGSVLGPLLFLIYINDLPDALPSGVKIKLYADDVKLYISDTEIMHNALHNLFEWANKWQIKVSIQKTFIYLGSKNPKETYKFDGNTINAVDTIRDLGVDIDNKLQFSDHINQITRNAYLRMRS

SEQ ID NO: 149492 - protein, 107 aa, Heterodera glycines
MGLVLSGKQCFTHGQVYVAMSRVTQMEGIRVFSPNTCMGDNCYIHNVVFQELLGLPLNASTPTEQFFDVNGNNAGALNEILNDETEELVSVPDFGSVMAEGSSPIAD

SEQ ID NO: 149493 - protein, 65 aa, Heterodera glycines
MPSASAGTVSVSNGTKANGNQPNKHMQMLAMAGPAPFSDSPEAIAIRDAVDYTQKITLEMAYNNT

SEQ ID NO: 149494 - protein, 67 aa, Heterodera glycines
MDATNWQPSQEELNQIVSLLQHSQSPDNQMQQRVQQHLDQMNAHPEFCCYLLYILSELTEQDVIHWI

SEQ ID NO: 149495 - protein, 30 aa, Heterodera glycines
MDCCCALSPAAEEEKEARQSNEMASGAEVN

SEQ ID NO: 149496 - protein, 128 aa, Heterodera glycines
MPKRSKAGKAQKRRWRKWSNFKKGIEEARRTGETTPALVAAHEAAHSIVVKLNEDIAESFISTTIIGQNGLDGQTLSTRRPNEDCTPAQLRAALMATMAGKAVEIKLVGVSTGHADDLADARAAAREV

SEQ ID NO: 149497 - protein, 142 aa, Heterodera glycines
VLWLEQQVVKKRVKRDFRPVIHRRRRHRRESSSSLTSTDGQSSSNSRCRRHGVPNDPYWKDLWYLHRRDEQPDMDHNVKEAWYLGYTGKGIVVTILDDGLERTHPDIGPNYDPDASYDVNDRDEDPTPRYEYTDENRHGTRC

SEQ ID NO: 149498 - protein, 593 aa, Heterodera glycines
MDQILAEFEFATAYLDDVIIVSQSVKEHADHLKKVLEKFQEWGFRIKLEKCSFFREEIKYLGQIIDRNGRRPDPEKISAISKMPAPTDVPSLRSYLGMVNHYEQFVKNMRFVRKPLDDLLKQDSEWTDASELGIGAVISHKFPDGTIKAIAHASSALTPAEKNYSQIEKEGLALIFAVQKFHKMIYGRKFTLLTDHKPLLAIFGSKKGVRQCSANRLLRWSLILLAYDFSIEYISTNDFGQADVLSRLIANGKSDEDRVIASLRSDSEIDDILIGSIEALPIKFKEIIAAAEADKTIQKVKKFLTNGWPRNVGDESAEIKLFHRIKEQLCITRNCLMYADRVVIPEKLRQKTLHAFHKGHPGIKRMKQLARNYAYWPNMDADIQQMVENCQPCQMEAKAPVKSNLQPWPKPSAPWQRVHIDYAGPFFGKEYLIIVDAFSKYPEVFEMATKSTAATIEKLRYLFSRHGIPEILVSDNGTQFTSNEFAKFMAVNGVNHLFSAPYNPMSNGQAERFVDAFKRTFRKLKGEGAPSKEIIETFLVSYRTTPNDSLPNSKTPAEMFLGRKPRTTLDLLRPPPAQPIERDVEMARRFNKR

SEQ ID NO: 149499 - protein, 43 aa, Heterodera glycines
MKINIECSEKQRIGDFMVGLVSLRNEMSKIFTTLTLKKRVWSF

SEQ ID NO: 149500 - protein, 28 aa, Heterodera glycines
MISMAQNYFFQVYVEYYATFGFWSYCTL

SEQ ID NO: 149501 - protein, 71 aa, Heterodera glycines
MIAIPIILIFFVQPVICLKILCFIHSKMFEANSFLQQQPNCSHLVIKDFAKIGLKEFKADLNARYKAQYLK

SEQ ID NO: 149502 - protein, 126 aa, Heterodera glycines
MSPKNGNTLVFPIGIEGQKNFVQKLKRNLRHLRSLNPLTGKPIFSGLFFRAAAFQKEGEFFGFFPLLAKLREEKLRKKNTPSFGEFMLGIDSHFNPYTIGFPANKSIANLIDIFYLSMMSDGLIKV

SEQ ID NO: 149503 - protein, 126 aa, Heterodera glycines
MSPKNGTTLVFPIGMKGQKNLFQKLKRNLRHLRSLNPLTGKPIFSGLFFRAAAFQKEGEFFGFFPLLAKLREEKLRKKNTPSFGEFMLGIDSHFNPYTIGFPANKSIANLIDIFYLSMMSDGLIKV

SEQ ID NO: 149504 - protein, 235 aa, Heterodera glycines
MKNNLNNNNGNNNNNTNQTQPEKTSPILLPPFLASTVMPPAGEETSTVVDQHTVDGLTLTEEKPTVDGRGPMNSTPAEENHHTVAMENHTVDGGPTHTVVDGSSSHQQKGDQEDQDEADHQQQGEEEEDYAIDDDDDEDGGFGTLIGLANSETTVSAVPNCSECANGAKCVRVGQRIRCLCGADFAGTLCNIKKPLCAALKCHRPGELCQPIRGQPGGKKDMAHCECQLGMGGKR

SEQ ID NO: 149505 - protein, 136 aa, Heterodera glycines
PAAVRTAMEFAIKMTVETVPADLRNLRACLVCSLVKSEDQVKSEDQFMADGCDNCERFLNIKGDIDKCYECTSANFDGIIAVCEPNDSWVCKWQKINRKCPGIYAVSVSGNLPKHVVAELSHMGIKYKSGQRDKSA

SEQ ID NO: 149506 - protein, 118 aa, Heterodera glycines
MPLKTMPFSALYPVLAPQNHIYPPSKPGGHWHSKVPGKFTHLPPFWHGPRNSDNSRPPPTSSPPKACDEEASTVSALRPTFAPWHSSMSSAQCRPSKPALHSQTKSFLIRGTLGWVFF

SEQ ID NO: 149507 - protein, 91 aa, Heterodera glycines
MASAKTWTTAATTAAFAMPISPAHIARQNANHRALWRRQMHRPALAGDHCELDVMAAAPCAGEDGSANGQCQNGGQCVPAGTKAFCICPTG

SEQ ID NO: 149508 - protein, 59 aa, Heterodera glycines
MWRKISGRRGRRSGRLSSEFAWMSICACLPPGPGERRVPLRGLPINRRIIHFTFFFFWF

SEQ ID NO: 149509 - protein, 27 aa, Heterodera glycines
MQKRLISFVVWLLISPAITFLFCFRVL

SEQ ID NO: 149510 - protein, 22 aa, Heterodera glycines
MPLRDTRLMTKTLNVQNGKFAK

SEQ ID NO: 149511 - protein, 41 aa, Heterodera glycines
MGRSRCGIGIQNFCGITGGQAVLDTRTRSTTKFGHLSSAEI

SEQ ID NO: 149512 - protein, 84 aa, Heterodera glycines
MTCKKLTNFEMAWSMDELPKCEDFVRRAVREAMADGQTQPITAADQTSEYGQLDALVRAAKPEKGESIEKREKQQPIGADQCLL

SEQ ID NO: 149513 - protein, 419 aa, Heterodera glycines
MQNFPAASAPASSSSSTGFGISGGGCVAVTAPSPTFSSTTAITSVPQQQFIHPPYTTANSVTTVSPLSPAKHQQHLVVDQSAQQPQKHYHHQQRHPNVPFATPRGDGTTMVHQHHHHHRLAAHHHQYSSHGMGMGQPLARHSASLLPSTAGQSLEDLADLAQASSSLLQHATSSLMRSTSTASGPPSPPSQSSSAAGAVNHQQQLQQVQPVQTHQQQQQPTMHFKVVATNDNGSGTHNRPEILYHPKEYRQQVFTVQQQREEEANIRIEQQRQHYPLQHHRPPVAKKLTKKQMATIQREFNELLPFGSTSGGGGAAAANASTLCQQMEKAVTIDGDTKLLQQQQPKKRGRASKETIGVIPTKNDGTDNDGLAAADRPARRSASTVGAKRSAEADGGQKLSNEGTTSKKKRIWEGADYVT

SEQ ID NO: 149514 - protein, 90 aa, Heterodera glycines
MCLLIILCFCLFFFLFFFFFAFFEKCQKRIFEFPGDKKSNERMAKEEKALKSERKETNGNPPKEKLNFRTKVGMTAGHFESELIGVCCEL

SEQ ID NO: 149515 - protein, 217 aa, Heterodera glycines
MRITDRIRTFEQIVTEIDFLYTVSTEVPSALSDEHWVQLLDTVSAAEREHLLRTIHYAQLVEKAAAAERQTLKNGTKTLDVIAGVNDDDDDGCVAHSSSSATTATNSPNYQQMFGDEFCDQSALKSRMDTHFGLALCRNFLLEPSDRMPNLFVDCRFMYAHKTAHILSAANQWHFLHGTPNEQSKEMGGGHFVPHPFAPQVTTRGLSEICERNSIPK

SEQ ID NO: 149516 - protein, 71 aa, Heterodera glycines
MKNLTYFFVSILFMLLLKHQIFVDGTKTGKSVEAKKRGETLGQLKAKEGKDKAENLQAEEKQKKKNLGDLI

SEQ ID NO: 149517 - protein, 236 aa, Heterodera glycines
MFSNKRKCSFNPDWENSDWLFRLFLNSKKGAEQLQFDIESVVYKLTSYFKGSTQRHTEFHEICDQYENFYKIVLKYIDRWFQLQLLPKNISWTNLQNHPLNSAEVVQLAEQICPEIAQLDELFDEVSAVNQTLADIPEEFWLKSAEDKWKGIFEADGATEAYANLYRIIPTSNAFVERVFSLASSQWTKERNLLEVESVKALLLVQESEQIFFCGDFLAVVFSILAPSNDNPKSNL

SEQ ID NO: 149518 - protein, 74 aa, Heterodera glycines
MLFVRDPSGSVWNTDPGPSPDFQLQVLPFVFKPAIFVTSIKIILSYYEQLRKSVILRYGTHDMIVFFFYRLKNF

SEQ ID NO: 149519 - protein, 234 aa, Heterodera glycines
STKNHNVLILLEEDHIVAPDFLHTLQLIVKNRKNICICSNCEMLCLGTYPSTFANYAENINKLGVEVWFSSKNNLGLAMDRQLWRQIQNCAKFFCTWDDYNWDWTLLQLSIQCLPKSKGLVLIKHLIGKGLVLIKHLIGLQFILLLIRVIHVGDCGVHWHKCENDRRSLDQALRDLFRDLFDRVNDSFFPSKLEVSHVNGHMKGVPSGPNGGWADPRDHRLCELNTIHQLMIIP

SEQ ID NO: 149520 - protein, 121 aa, Heterodera glycines
MRYIGESAKAISSVVGSTVPFGGGLGFPFGSGGTTSGTPLRRTASSGANRHNGLDDGAISGTPLRRTASSGAGLTRPNRHNDLMALEPLREAMYVPASLVNGDNEIMKEDLANCWAKENSR

SEQ ID NO: 149521 - protein, 53 aa, Heterodera glycines
MSCLFTELTETGSFPPNRTRHFEQITDNKMLAMASKRRKARLSSSRKCEWKMR

SEQ ID NO: 149522 - protein, 39 aa, Heterodera glycines
MLIFLIVISAVLINSALGNVDHPKTAVDKSTNEGIVTIF

SEQ ID NO: 149523 - protein, 74 aa, Heterodera glycines
MVWLLAASSGFNGANAVGDNGVVQVNPTIPPANAPLPPKHFVNLRDLKPHTQLVPNVPRKFGKNANNGKKNGGQ

SEQ ID NO: 149524 - protein, 51 aa, Heterodera glycines
MCRARPGPGSKPGFFLGPGLNFSWIPGSSSRSRSFFVNMDFPGFLSRKSSP

SEQ ID NO: 149525 - protein, 149 aa, Heterodera glycines
EEQIVGWEPDDYEKELVKRTWSDDFDFLYELGASIYDYIFEHNPQAKQLFPKIHRHGDEWRQSADFRSQALKFVQTIAYAAKNLYHMEECLKPSLLAIGERHVQYAARGFRPEHWNIFLARISTDLVWTLTRDPFLWDPKSSGLITIWS

SEQ ID NO: 149526 - protein, 117 aa, Heterodera glycines
PNPYQIPMILERPSDCIPSRDPDQVPINPDDFGKMIGTDPESGSRPNPDQIPIILEKRSERIPSQGPDQIPTKSRLFWKNDRNGSRVRIQTNPESGSRPNGDQSYYYFEFSIEKKLF

SEQ ID NO: 149527 - protein, 208 aa, Heterodera glycines
WICNDVWMDIFPSFDRAQLGLKLALLSPRFNALVDKHFNGKSELTIWRTIEIQKGKGPEPKLSVQMDDKFVPFPLPDRPLPSKIRFKRLRMWYIGHSVIAFLRSNHQIFNKRGTNLKLWLPSSHTTNGQRIWDIFTREIWHFFSTNIRHLGFYNGDHLDHLLRQISPTILIDLNQLVSIHSFDLLPEAIGDDFDVPNATISTGQALSK

SEQ ID NO: 149528 - protein, 156 aa, Heterodera glycines
MNRRWICNDVWMDIFPSFDRPQLGLKLALLSPRFDALVDKHFDGKSELTIWRPIEIRRKDKGPEPKLYIDHSVIAFLRSNHQIFDKRGTYLHLRIPSPHTTEEQPIWDVFNNFCWPSIVQMVALSEKRWPTQAIALRWLQRTNGLRLDQQFQGGVA

SEQ ID NO: 149529 - protein, 29 aa, Heterodera glycines
MYGFVLKWTELCLLDAASPGPSDQQKKDA

SEQ ID NO: 149530 - protein, 115 aa, Heterodera glycines
MANRLTNFYHCGPVPKFIRSFFCDAFVCEHFNELELFYYGQRLIFRITDMEFANESEGKTKGEKKKTDEKGQAADEGRQNVKTHRISPLCAFDIHWNEVRENARREEDDDPENLC

SEQ ID NO: 149531 - protein, 122 aa, Heterodera glycines
MRVAFPATQRTRCCDAFPSIEKIPRVRCPTLVIHGVDDDVIEFSHGMKIYVIEFSHGMKIYENCPGSVEPLWVRGAGHNDVELHAAYLDRLRQFIDSEVCNPPTHREQLKNAKRPQTNQQAQ

SEQ ID NO: 149532 - protein, 193 aa, Heterodera glycines
MTATTIAQDPTPSPRRVFLRDLCSLFCCPPLPSAIVAKLAFMPPEPSYRILTNDSGRTTLELIDGRTEWPHGQDELNNVEVFFTRTQRRNKIACMFVRPFELSHFTLLFSHGNAVDIGQMCNFYLGLGCRLRCNVFSYDYSGYGQSTGRPSEKNLYADIAAALKSLESRYQIPPEQVILYGQSIGTVPSIDLA

SEQ ID NO: 149533 - protein, 26 aa, Heterodera glycines
IHTPSEKTRCVPINRECQRKTLSFFL

SEQ ID NO: 149534 - protein, 371 aa, Heterodera glycines
MLSGVNSSTDTENSYEFRTKARLSKEAVKDIARQQPDAQPRNVIAQERAQLSDEARMNLPSASSLQRSIERQREIPDRARIDANEIANDVIEGILLISEFFSRKNAYLHVYGNDVQIRFCLFHLGQSINRRVSKDKLIHYYTTNNEYKILVRSLAALAFLQEFQVVPGFNLLRLKAQELNVQVIQDGGQPISVFDYFGRTYVHGHAGHGPLFPIATWNHHESIIQDMGRTNNAQEGFHLALRTQFTSVHPPLSKSKCFAPFGNPSKCRLVTVLKKEERIAADKLRQYELDPTNGIRLRERKKVYRDNDVALRNLVEGFDLLADPNDDEFLTHLRSLQYRLMRNDFENWDGPDVEFVFEELMRAWAKYWPLE

SEQ ID NO: 149535 - protein, 272 aa, Heterodera glycines
MIRNKLESQQKSRKKRYISDISNTNEDAVNLGVEFGEPNAVITFDNVEQQTLNEAEVSVMTFERGKTNFGGHCLWLNGFRYTHHSGDRWRCTIRSCSAYANITNNDEIGATGTLGQKEHNHLPAPQKQQAESRRQKIKESVLAEPCLKPTRLLAKVRRSATDEAFVAMSSNNALTQMMRREKRKLLGNVDVQNPLAFVIPATLREKGVLCDFEKAEITSVRTAFPTAQIKCCMFHYRQSLYRNFKRLGLVHLYGEKTERGEEVRNTFRLKFW

SEQ ID NO: 149536 - protein, 320 aa, Heterodera glycines
MIIILSTKLLPLSVLLLPIMLGITNAAGIGDRQKRAVEEEEQRSMSELCAIHEQKFKELFKVKTGNAEVLWMENKEKKAEEKQEEKEKREEKAAEETMDAKNKAWLSTLLGNYLCQKLRGKGGEQRHGKNNEKLDYGVEKNVWWTTPEKNSNEFKVRAEKIFGRIRVKNGISDEQLLVSLSELVPLKERGGSGGVFFRTKDDKFILKNLNPEHDEPAKMDEVLDKYAAYVIDGVISGQSEKGKQSTKKNSNTIHKSMMNTMFMCFKMKLYAKRKEDDGNERKKVIRLHELQFVVLNNAFEGLKLEYATLPHVVSLPPKKM

SEQ ID NO: 149537 - protein, 25 aa, Heterodera glycines
QFIYKGQGGNTNNFPSKKLCDQVCK

SEQ ID NO: 149538 - protein, 57 aa, Heterodera glycines
FLKMIYLSKIFYRYEFIYFLTNFNHFHLLFSLNSLLGLQHILSPSDSSHSSFIHLGL

SEQ ID NO: 149539 - protein, 83 aa, Heterodera glycines
MSNFLFRAETPQLNFAEVEDRLRPNPNLLTENVTIPEFFEYAPIRDRIPARMREMRPPLRQHLRLHVHAKSILSGRAPYIGGA

SEQ ID NO: 149540 - protein, 75 aa, Heterodera glycines
MVEVQRIYAFLALFTFIYFLESIGGTYMIASVQNIERQFRIPSKLSDDISYVLTVVFVSYYGSRGGGKWNYYFFY

SEQ ID NO: 149541 - protein, 80 aa, Heterodera glycines
MFNDRILRDNVMVLCMMIIILQWNLQLEPGAGPDPAQDFAGSQSAILHFLENAGFAGLIRAGSGPAKIFEFQSLHRVPQI

SEQ ID NO: 149542 - protein, 21 aa, Heterodera glycines
MLNLIFLAWLDTDPLESDNDN

SEQ ID NO: 149543 - protein, 131 aa, Heterodera glycines
MLLDLVSISFILFPSIGLFLFLIYQKGNSAADDKNDDSFEDKKNMLYELFGIVHSFRSHLNKLFLECVLVGEVPKNWSDNSLFALFGAALNGQIETLKILHQKGDDVNGNGSVTFGDHKIISDKFNLINKN

SEQ ID NO: 149544 - protein, 382 aa, Heterodera glycines
RKFDQLNACNSDQFDLIEYQRERGGEFALGSDGSGTMPLNKKRQQKVIKLRQKRQKVLIDGAFRAIPMVDTMCRIVESQDFDRTDLFPLGSHHLPSSSDGTGVDGNTNGGGGGIPPFRCPNQCLPWARHCADHITYNVAQQLFTFCKWRLCNEAMPTTDLVLFDGLCRRHFYAQQQHQNQQQHQQQQQRHQLVAPTEQQQHPHRLQHNNNGNNSHGIVNAMAQSGDLRLSMLHHGVACPDHSLKKNCHCFQQHQQQQQQFLLHHQRTAAHGDSSLSSAVTIRCEPFAMDVSLASVAKDLGFDGHDLTDMLAKLPVEEGFEGDMDPDEDTLLSNCPQHWVAFQSKVSPCLADINKEDSDEAPPGTTLGHSWADVEQFLLEQEE

SEQ ID NO: 149545 - protein, 101 aa, Heterodera glycines
MPLLLLLMLLLILVLLLCVKMASAQSIKQYQVRGWHRLVAQTPLAKGEQLLRHVVRDVVGTVPGPGQTLVRTTKRRYATATTVGVAVHAGAIRRRRQMMAL

SEQ ID NO: 149546 - protein, 152 aa, Heterodera glycines
MEKGAPWKTGIYSRFAPKTICYLGGIIVDRPDSARHRSVFGFKCRQSGRIWVAFEVFPSAHLLRTSTKQMGEDGDDDGGNQQQIENVGRTRPWKGANKKKAAAWKGGAGGGRVEKRRQRREAKRERRKGGDWHRDGQQKRQTEENDGEEMEQ

SEQ ID NO: 149547 - protein, 154 aa, Heterodera glycines
MLIFKINKQVHFTYLPWANQVENIKWTNKGTSRTVSQKIAFDFKVDEKDMPATDRAIEKLFDGIDAIYFMENGFKAIAHELEKLSAICSELEIDELERERFKLKRQMQIVSRKMSALIVKNSLSFNRQVENYESVRTNAEHLLRITRRMPRCEE

SEQ ID NO: 149548 - protein, 137 aa, Heterodera glycines
MWRGKSAHFGTRRQFAIHKQFGGLCGQCPCVGALLGSDKNHQRMAKGGGFVYMDVPHKERTMENNLPRTPLTELLERHEGKRKPTNPAEELKPERHKSVWITSDLLELCRHFNWNVVEWRDVDDKVGNGFTIVIKKK

SEQ ID NO: 149549 - protein, 119 aa, Heterodera glycines
MVSDFFCPNTGGVETHIYQLSKCLLRNGHKFCIFSQGYRTHARVWSAEGHTVPVRWNTEGVLFARLGVGQQLFAVCARLVAVVPTHFHTRTNSNRPLPFEKPWPNVLSALVDLFVIFEG

SEQ ID NO: 149550 - protein, 107 aa, Heterodera glycines
MRQTYGCNIANTKQCDLFRAEKGTDQIGKNVVNWQSQIEKGIINVLNEGNLFKYSTPLTLRPTDRPPPNSPTKRRVPLQRGRLRAVDVLRLIAKNGSLGRRHQRLEN

SEQ ID NO: 149551 - protein, 236 aa, Heterodera glycines
SSSEASSSITSLDSVEMVVLLYRAERIGGWKDDDISDYEMSISNYFKDKYIGQKYIGQHIRVLTISTSVQVEVDRAGNIIRSYFGFGLAVMILCSLFSNSLSAFFMHQFSIYKLPVAIFACLCPFMASGTALGILFFAGVRHSSILAVTPFLILALGVDDAFLMIHSWQLASKRRRHEGVANDANLINQSINDTGPAILISTLTNIFADLVGAFLGSEEITLLCIGNIASVSLAHL

SEQ ID NO: 149552 - protein, 25 aa, Heterodera glycines
MNPQKWAKYSRTPLEGIPGRNNSIK

SEQ ID NO: 149553 - protein, 127 aa, Heterodera glycines
MNDNDRAISNHRQKQQQQQQQGGDINGAIVINNFTDQQHQHQQQQKTADQQCHSPSASSSSSSSASSAAHSDTSSQSFSARCSLRLHAVVARAYRRWAHFVVAHPYKIVFICFILTAICVVKMAKTK

SEQ ID NO: 149554 - protein, 73 aa, Heterodera glycines
MALRIRFSNFGLIITIVPESFFLVPSVILIVPESFFLVPSVILGKSRAARLNLPSLSLFWTASENVFPYFHPI

SEQ ID NO: 149555 - protein, 228 aa, Heterodera glycines
MSSTQYLIFFLLLCCLKNISGIGFDEFAKNAGAINLADQYLKKEIKTKGELLEKLAQIGVEISLRTLERHLSKIKSNVFQNLTINFFLLLAMETNIENTKKRTKMQILSMPNAKRGFIHLNRLNGTVSNHSEIRKDVIEYLEETVYQHSFSNHHDNEWWLLFDSIENIRKHIENAIAPAIGTHEIEKWMNNLDLAAVTKMFRINIIVCERIQERIFRWQVYSPDLETS

SEQ ID NO: 149556 - protein, 96 aa, Heterodera glycines
MDCPKKVKLPPELLTELANCLHYNSLRTEGEIDALKEALASLEQRHTLDGLEIERLKKNIRSLCRRKAKPPIDPPILEKEEEGEEPEAKRLKANDE

SEQ ID NO: 149557 - protein, 68 aa, Heterodera glycines
MAQIVPLLSEPPEGGNVTLKPGLVIGWPTAGRETSQATSGQSLTNNCLIRWCFQWQKMIIEPIVDNGK

SEQ ID NO: 149558 - protein, 42 aa, Heterodera glycines
MSQEELLLSFQDETALDWLIDHVKSFRMIPRLLDLIDKEKKL

SEQ ID NO: 149559 - protein, 54 aa, Heterodera glycines
PNEGCLSGFITGFGLVGYTALWLIEVPFTFNSPISDHKDLREKLQEALDDVIDY

SEQ ID NO: 149560 - protein, 92 aa, Heterodera glycines
MIQFRHPLILLLLILIGVEVICSTKDNNSNYKVHVKTVTWEEFVADALKSDNELEREEVEPLFDPIYKKDTERMKALIGTLSEEKLRRFLRT

SEQ ID NO: 149561 - protein, 66 aa, Heterodera glycines
MAVNYGNMEKYGSIPNAIPICIQTNFKFEPSNFIAKWAYIRHYVNLNDVIQQKIFFAINQPIINWQ

SEQ ID NO: 149562 - protein, 359 aa, Heterodera glycines
MSRHESFIPKNPRKSRNQLSPTPPTVLVSISSDESDNESAEEQPEQQSKKQQTVVGIQQRPYNPKLHEFERSNVRVLNSIEQRRVSEQQKMVQFPETATESQREREIRELKQRILLLESENAKEEQKTEEKEEKAKKDAEEKEEKAKKDAEEKEEKAKKDAEEKEEKAKKDAEEKEEKAKKDAEEKAKEGKEGGDSELSLGEDDIEREEAERKIEEIREKLRKKERRDALKAKNDLRKTSEKEKGQSVVKGILRRKMTEEEKEEKTKREEAQGAAKKDQEEVGKNANQKGPLIGADAKKSILETINQPYVHGRVIGQVIDPRAEVEEPWDMTKALANREKEDEIRVKRKDEREEGWKNL

SEQ ID NO: 149563 - protein, 323 aa, Heterodera glycines
MAFDVDIIHRPGKRNQFCDYLSRYLGDKTDQGINSLKFDQKITREEMIAAQKQDKESQRICELIKNADEKGNSEGTFGRWKLFGGLLCVTDRGEWKIYVPECMRRRVMSEYHSDPFQGGHLGEKRTKEKIRRSLFWEGMDKDIGNQVKNCDACQRRKIIGINKSAEPICPIEPAARPFERLHLDLMGPLRTSKGGFQYVLMIIDSFSKFMAAIPLREQTATTVTSAFVEKFLCLFGLPKIVITDCGTQFLSATFESLAENWGFKHQTTVPYHQSANGQVERYNRTLVDMLVTTTGGKDWASALPILCFAYNSSIIRKLDITVL

SEQ ID NO: 149564 - protein, 141 aa, Heterodera glycines
MGEFEGKFPILVSEDEGCPCAAIIGTDLMDHISEQGGEEEIGLNFKKGTVRVGHIHLPMIAAINFENKPTEVRLLQTQTLPPLSDSFVWGQINRNFDPEDTFITVEKEHGYFPIRVGNPNSMERLKGIISDNEEAFIRPGE

SEQ ID NO: 149565 - protein, 186 aa, Heterodera glycines
MTRPELDFGEITAMEVNNTDDNGNSISGIFSVGEILVEAAQEEGENLRQKASETIEKGKEWMEDPIGIVKYIKWTAFIIIAIIILIGCSVLLIKAKLYASALMLPLQLIRSLITTLVSCFSSGREIADQVRYPMVMEVELREQTKPTAPPEEALLETKAYVLNYMPKICQINRSGPKKKRCYVNIF

SEQ ID NO: 149566 - protein, 159 aa, Heterodera glycines
MANHLLLVPALLFHLLFVLHGRSKFSAILPFLLSGLVHNWPLFKPWVARMGHHSFPSDSPIPNTFCAMPAKPNSLSQELADLEKRKMELEKLIASATNEKPEGKARRPKKCQNPDEPPPTGRTGKKGTKGGSFIRFPDYAAIPFADQCCATATCRLRNG

SEQ ID NO: 149567 - protein, 480 aa, Heterodera glycines
MFKFPLQAKSHSVQRLPVHLENEQIIYFDENDDVETITEKRDKKSKLMAYFAFFNENHCSPKFLYTEMPKYCIWNPKQGKWILRKNPEISKTIGRMFPISPTEGEKYYLRYLLLHVHGTSFEDLKTVNGIKYNTYAKACLARGLTKDDDEWKHCLNEASQFRFPAALRSLFTSILLYGDPKQPEILWEQFKNNLSEDFLIKNQPNIAYVLALTRINKNLLQEGKSLKDFKNLPQETSLTDENENINYEEEKKIAENLYKSMNADQKIIYEKIKQIASGKLNPKLIYIDGPGGTGKSFTLNALYHLVRSYKKHMTNMAFSGIAATLLKNGRTIHNRFKFPLNLNAHIISGVVQGTKAAEEIIKSDFFVIDEAPMTPRFALDAIEKKLRELTNCKQLFGGKTIILAVRSEIIDLTIKKSIFWSKFEQMKLIINNRAKDQIFAEQILEIGNGTFGDSMSLPNNCIIANDSNLIDEIYDDVFKE

SEQ ID NO: 149568 - protein, 320 aa, Heterodera glycines
MFRFLKYKEIFIILIMQLPSRITQWCVDQAARIEWSRLNYIRLHQKEICKESYNAIDKFLYAKAAETGAQVKKKIILPSSFNGGPRNLHENFMDAMAIVNEVGRPDLFITFTCNPKDEDIQKGILSGQQSFDRPDIVARVFHLKVTQFLKEIIDGKIFGRVVGFCYTIEFQKRGLPHVHILLTLDPLNKWKNTSDIDKFISAEIPNENNDRDLYELVTSLMTHGPCGSEFPNAMCYDAATLRCISNENGNIKELVYDETGTYLDARFLSPVEACWKMFKFPLQAKSHSVQRLPVHLENEQIIYFDENDDVETITEKRDKK

SEQ ID NO: 149569 - protein, 135 aa, Heterodera glycines
MYIKYEHNDKIWTNMEKTYNASVDEKNGRDNVKKIKLNKKEDDYKLQKRYHIDDKKEAEEKVDKVTKAKRSVKKTIDSLADIEKKDEMYLFGNFFNLPVRQKSAPFRAEILARENEKVIEMGKDYMTIWVKRNSQ

SEQ ID NO: 149570 - protein, 95 aa, Heterodera glycines
MWHPQKENDKKKAGKKKSTNVEPKVEPDPKKLKEVTEFLLLDAALDREARNLCLNLIFRVPMRNWAAIAKDMDDKEIENYFIKPLEEKHLKNNNI

SEQ ID NO: 149571 - protein, 242 aa, Heterodera glycines
MIPFSLLSVQLFVIIVASVLTLVTQCCACCKKKKKPPTTNFADPADSRYSTLAGINKEIFVQKTPSQQQRSQAVPYGPYSSATPVKPALSDEYKFLPTLRVDPPAFPAQAAPPTSVLASPTISAKPTAPTKPTISAKPTTSTKRPTSAAPAPTAPAKPTISTKPTTSAPSASPTTSAGKSSISSTPMDLASTSMAETQPIIAEATAADSGYSQMDQFGPDMSIKVLTPEEAKNRTLDRMAYL

SEQ ID NO: 149572 - protein, 63 aa, Heterodera glycines
MLYWSSQQKIDYSIRCLNKNKIYIIIYYAGQFIFLENVLKDKNNYFILPSLDMHMYFKFFIVM

SEQ ID NO: 149573 - protein, 169 aa, Heterodera glycines
MAIKTRVQMAQIFTWMEGANDVDILPPGGRVANIATMDWSFKALSLFKNDSRNSAATEHGFPAHLLLSKGYFQVSLSRAMVEFIQLELNLTELVRRLNLIGYGRDEILLTTLHSADQLNAPGGFTQTCFSRKGGGRTNHLTRCFLTGFNLQIKSLSIFGMKHEIVKVLS

SEQ ID NO: 149574 - protein, 65 aa, Heterodera glycines
MTYLHTGGEQLDKMEALVNKSVVEQLPNRFKRDMILRNKNNKQQKRGVGEKQLTFEEVMGFQCEV

SEQ ID NO: 149575 - protein, 104 aa, Heterodera glycines
MVDKGEGYTGYQELKDGVYHGYQPLKPRKTPKFTAEFGLSSGMLNIAVARDIDSIPKGDNQDGSQYQYLSAHNVARGQYIPPTNPNLPNLDIPVQQQQQEVAEE

SEQ ID NO: 149576 - protein, 280 aa, Heterodera glycines
KETDNSTSVKAETEDADYSTTETKETDNSTLVEAETDEADYSTTETKETDNSTSVEAETEDADYSTAETKETDNSTSVEAETEEADYSTTETKETDNSTSVEAETEEADYSTTETKETDNSTTVKAETEEADYSTTETKETDNSTLVEAETEDADYSTETDNSTTVKAETEEADYSTTETKETDNSTTVKAETEEADYSTTETKETDNSTTVKAETEEAESSSTVPIYEKMDLAIKELVHSGELIETKGIGSSVYYNLNVITNATPSAAENMVSMDVVLG

SEQ ID NO: 149577 - protein, 373 aa, Heterodera glycines
MKKDVTKKVAVREVGKVDNSTTMKAKTEEAGNGNSTKGKVVETKEAVNSTTVKAKMEKVDNSTTVKAKMEHADNSTTVKAKMEDADNSTTVKAETEEADNSTTGNAEIEKSNSTTVIAEKEEVDNSTTVASETKKADNSTTVMAQADNLTKGKTETEEADNSTTETKETDNSTTVKAETEEADYSTTETKETDNSTLVEAETEDADYSTTETKETDNSTSVEAKTEEADYSTTETKETDNSTTVKAETEKADYSTTETKETDNSTLVEAETEDADNSTTETKETDNSTSVEAETEDADNSTTETKETDNSTLVEAETEDADNSTTETKETDNSTLVEAETEDADYSTTETKETDNSTTVKAETEEAESSSTVP

SEQ ID NO: 149578 - protein, 347 aa, Heterodera glycines
SFKKPMSYSSNRSQKERKNLPMKRKRSNTSRNLQVQSNGVPTKIPSEQTAIAAAAKQFKTDQSNLRLSDLGGCEAQFLEAIQLMTHLKEAIQLMTHLKHPKLCEQIGFTPPKGLLLHGPPGCGKSAFAMALAGELQLPILSVSSTELVAGVSGESERKIRTLFAEAKMAAPALLLIDDIDVIAAKRENAQREMERRIVTQLIASIDESENDNESCTVFVIGTTNRLEVLDASLRRAGRFDREIALGMPDQRARMEILKIVTRHMKLDVDVDLAVLARLHMKLDVDVDLAVLARLSPGYVGADLLALVQESNSKAISRIFLVSFHIFIFSVRALCSVVDAKKHKIHLS

SEQ ID NO: 149579 - protein, 154 aa, Heterodera glycines
FNVPFCFFICLFFLPFVPPAFFPVLLLLLSVFGPSRHPAFFPVLLLLLSVFGPSRHQSLIGTGNPLPDIGIGTPIATTPSGAISLPTSSPISNSSVPPAVVGALPPIQLKIGLLFVNGSQRLRMLFGFGQSAPAVSLALERARQEHLIDNINFT

SEQ ID NO: 149580 - protein, 98 aa, Heterodera glycines
MQVTLKGHKVKAIYDKNICNIVTISLEGCYSCTSGANWTLSCKTNFGTALANVECPSQKVRVNCDKEGKEQQIQLAYNKKNITENCEVICPDDITVKI

SEQ ID NO: 149581 - protein, 60 aa, Heterodera glycines
QKHILIKMRNCSVLWCKKIVFKGVDFSGNFRFETNGSLRSFPAPAHRLSLHPAFAALCLC

SEQ ID NO: 149582 - protein, 81 aa, Heterodera glycines
FFAYQIFAINAHLFKKYSILLKCSVFCYILRIAVHLKASVIEQISQISRKVQAVAVEIVYIKTMAIRISALGPFSKLMCFY

SEQ ID NO: 149583 - protein, 106 aa, Heterodera glycines
MANNRRLMKREKRPLAKVSQIRGRSRAENGERGTFWGTPADTSEDGTIPLTRHLIGQRVSGMMPIGSPMLSTETDGKTPALQPADDESVNCADQRTKDGIFAWEFN

SEQ ID NO: 149584 - protein, 87 aa, Heterodera glycines
MYPLKIFAKITKKKESTDNEKSLGIFLLCDAPKEVPSEVLSEDEVHAVYQFKSLPNFLGISDGLFPIPFPTNERYMEKDRVLLYIEK

SEQ ID NO: 149585 - protein, 217 aa, Heterodera glycines
AHRAAQHIDLATVRRRQKQQQKQVGGGQHDDDDDDEHEHEQQQPVAEQQQWLRQRQQQLLLANTESSSQEAADEADQSCCSSSIASSSSVTCREEVSADNNLVTAVSSSTVAAADHFCHSQQQMPNSSVAELAASADPLASSALAHKPASAVVAVDEHDYTTMDKVSCSSDSFSHLPVPQHWDRQHSSIGIGGCCQEEICSCASDSGDSCYSSMVGH

SEQ ID NO: 149586 - protein, 20 aa, Heterodera glycines
MSKEQQMCSHLHLTWSIANT

SEQ ID NO: 149587 - protein, 360 aa, Heterodera glycines
IFTAIGVRMNMKIKKKNCKKKIKKTPAPLNYKIWQNNAETRRLIRHQMSTLCKEDTFCASCILPCRESLYEFDVCSHTLCDTPDPTHCRESCVFMEQIAADTPDPTHCRESCVFMEQIAAKKAGHCPPQKPSISKECSAFCDVISKECSAFCDVDSDCAEVEKCCVVGCSRFCLSPSLNDVEKCCVVGCSRFCLSPSLNDSRLLPRPEGITVHERKRKRSAILRWVMKRLSPQHTATNSNLFVIQWRWSVHKQSFVIQWRWSVHKQSDTMAPWQTIMVRNKMYAILKHLLSPGRFYIFRVAAVNLHGTYGFSEGFSEPSRPPFKLSKEAKAPPAPLNLTCLRPFFTNAKNCWNAPISEIP

SEQ ID NO: 149588 - protein, 108 aa, Heterodera glycines
VFAVYGCSQLREGLEPVNLLVKDSYAIPHYRALENYFWHYGATVQIVVNNPPNLGDPDERQKIRSMVHAFANTRHTIGDESVQFWMDEMEHYYMDHPKFCFIDSFIIK

SEQ ID NO: 149589 - protein, 171 aa, Heterodera glycines
IRTYKSPYISFTYLYSQTLAEELKRNADTLVPRFVFAFFILIMFSVLCNMSTCRGNCYIDWTLSKPVLAILGVANGMGIVTAIGLLNMCSVPYNDIVGVMPFLVVAVGVDNMFLMIAAVRRTNRASPVCRRMGEAMADAAISVVITITIKTLIISFGGANRYFFFSFSFLR

SEQ ID NO: 149590 - protein, 1510 aa, Heterodera glycines
MAIHSTNVEQMPTINEVEHFFNLESLGIQDDPAQDDDQTALKLFNKSIRQEADGRYSVKWPWKESNPDLSSNFKMAHSRLSSVLTKLRHSPEILEKYDATICDQLQQGISEEAQRAPGQLEHFLLHHGVLTKKLRVVYDASAHTRGTPSLNSCLFRGPLLLPDLAGMLLRFRCPTFPLLADIQAAFLQISLEPEDREVTKFLWLKDTSKGLTPDNLAIFRFCRVAFGVVSSPFILAATLRHHLQQFDSPLSREISESIYVDNVLLECETVQEALEKYKFSKDILQQGCFNLREFISNSKEVMKQIPQEDQLDKPKAKVLGLPWDTEKDEIVFKFPTPDPLRPVTRRLVLSHLASLFDPLGVLGPCILPAKRLFQELWKEGHSWDDALSEEDSIRWNSIQRQWKDEEIRVPRRAMLNDTQSIELHAFVDASVHTFATAIYVRCAMNDKVQAWLIFSKNRLKPKSASKALTIPRMELLAILVGTRALKFAQRQLRRPIASLHLWSDSQIALSWVKTHETQPQFVERRLKEIQECLGCTFHFVRTGDNPADLATRGATPSELRNHHLWWKGPPWLAQASHHWPSELCFQVTESDQQPDSTENVGPSGAFLAHTHSNQPNEQVLIDPSRFSSWKRLMRTTMFVLRFLALMFKRGEEPIASLVKHRKEIRQISKSGDFKAEDFALAERVLIRLDQMDDAEEFQHFKTVTGDDGILRLRTRLEMSEKPYSFSHPILLAKHSALAKLIILDRHQKRHHLGVDTTLTEFLSEFWMPSARLNVKRALRDCLLCRRMNAQQFALPTMPPLPGERVRRHAPFQSIGIDYLGPTTISLAGEKIKAWILIITCLATRAVYLEATLDLTSESFINVLRRFISRRGKPDIIWSDNATTFKLAQKTLELLSAPGPDQEVQNFLTHNRIQWRFIAQISPWAGGFYERLVKLVKDCFKRTLGRRILSFDQLNTFVAEVEATLNYRPITAVSDAVDGPVPLRPINLLQPEIQINWETATDPIDSEEQISSTHERLASRIQALREANDVFWAKWHSEYLTLLRERAQWDHKGPRLQNFGEPKKGMVVLISQDLVPRNQWPMGRIVETHGRPGAIRSVKVEIPVRGTNNRKPKDMPRKTVLTRPVNRIFPLEAGPEMTDPGTEAVAATEQPNENHPKLAREPGHQMVTRRKAKLLEMLPVVAMIILTLALPYASGFPIGKCDECGLTCYTKGIVVTVPPEIQKFEICCAESCIVRQGIKALNFELPIEVLLNNHHCEARFWTDSQHTFTSNTTCPAVDECDLIDCYFCFTQLVNPTCQPVIAAMLAGGLSLSLLCFIFTMCSMVGYAMAGLRILFWIFSVLFARLFKPRKETWVLSEEEENLLYPHRRIRRPRPATRNWASGRVSQMAMLVMASLPFVHGGIETVAIMAKSESCLNNGTTKMCQVKGSVTLALLPAGQPNVLSIKTDDGLILGTLQVILKGLSLECQAFTKAWKRSRDRFHSQQTMSCAQMAQHQHFNNRGQPSTGPPIER

SEQ ID NO: 149591 - protein, 123 aa, Heterodera glycines
SLNSCLFRGPLLLPDLAGMLLRFRCVVSSPFILAATLRHHLQQFDSPLSREISESIYVDNVLLECETVQEALEKYKFSKDILQQGCFNLREFISNSKEVMKQIPQEDQLDKPKAKVLGLPWDT

SEQ ID NO: 149592 - protein, 644 aa, Heterodera glycines
SPTRGNNLLDLLFTNNVLNNVKVGPPFGNSDHNAIQFSINLQVNSDASKKFYNFKKANYLEINGILSMVDWNYVPIQTTKKVEKLPEQNSSIVNSFGRTFTKTIKNSKFRKKSMKINFIKIAKKFLRTLDSKKRFQFINSFLKTKNTMIPAFTDKNSLILFSDKEKSNALAQQFFSVFTDQNLEQFQCIENPEKNIEYFNITPYEIYFSLSKLSNSNNTSIDGIPNIFLKIVKKISDLFHIFSFSLMTAKIPEIWKKSIICPVPKIQNPVNPVDFRPISLLCSVSKILEENIAGKIKNFVEKNNLLPNCQHGFRKAHSVTTQLLEVVDDFSFALENRKSIDVIYFDLAKAFDTVPHNRLISKLQNIGINNSLLKWIQNYLKNRKFFVKIGSDFSDEYPCLSGVPQGSILGPLLFLIYIYDLKILPENVKIKLFADDLKAYHVLSNISFSPLQNFINKFNRYCKLNGLKIASNKCLTLHLGHKNQKINYFIDDFPITRNEPVRDLGIYFTNDLKWAQHIEIISKKALRSAFAILKSIKTGDTKILVNLFNIYCRPILEFGSPIFNPYLKKDIEKLENVQKTFLRVIFRRNNYAADLPNYAELLNIYDQKSLESRRLKIDLKLFHEIILGKINLQNNESFSFPKTH

SEQ ID NO: 149593 - protein, 226 aa, Heterodera glycines
MTSINTSSNDPLYLAYRSIGPSADLIVPAVALYLVALVGIVLNGTVLVVTARSNSLRGSANFLMALICLCELVHQIGHTFFLVVVISGTNFVSFLTADLIMKPSIFAINCGLMAMLCAAVDRLFTVISPLKHMDILLQFKYVYLFSYLLICTIYGAYSLNYVLANAFENAGNPTTGMVAESFRGTVGYKSITHTFIISLCSTCCYVAIFVLIRRRNFGNFWHYEKI

SEQ ID NO: 149594 - protein, 170 aa, Heterodera glycines
VPLGSVPNGNRRVTWLIAMAWLLAILCALPMTVFRGTRPIPHTPFVQCYHLQGFNASHIIVFHFFHVITTFYIPLGVILFCYVSIGLSLRHQGASLRQSNCLANTDQHKRLQQNTKLRFLKATAAIVCTFVLSWLPYQVMALLRVVCEPESKCEQLASNFNWLQSILLAR

SEQ ID NO: 149595 - protein, 56 aa, Heterodera glycines
TMAKNIACSMIYNFFSEANRLNFLFRISSTLFILFIFKISKNFIEFQKSSGQKILT

SEQ ID NO: 149596 - protein, 113 aa, Heterodera glycines
MVWKCHLDSKRQAFPIPSELRDYIVNALVEMGVEFSNHNNRRFKTNSSVDKVNVYGIVRSFRANPAESILLAVPMRSSKIEAVAVALAFADYAKSCAISARSQGRGTNALPIL

SEQ ID NO: 149597 - protein, 131 aa, Heterodera glycines
MGSKNGRIPSELLFELISNLPFDIRWAFTRVSKAYDCFVWQKQNSWVRAELIRKNAGRKKKIELVHCINSVLVYAQNISDDVIRANEGECNAHIENLLCIRRQLARLYRLGRTSPIDTSQTVSAEEVNAED

SEQ ID NO: 149598 - protein, 193 aa, Heterodera glycines
MEQEQNPGVTNTEASSTSVAILDPSAVTESDRSSPLVPESAAVATDAATHFVAQGSPQASLPTPPYIENNDVWRGQFIWREQKFFDCTCTPLSGGPTVSKAGREMMTTVSEGEQSGSGDGGGRIFLIGLTDSCAVWKYVVELRDSWDEKVCMMIINKPEGGQLLDKYSECVTFCDKENQIGVLDFVDHPTIKD

SEQ ID NO: 149599 - protein, 16 aa, Heterodera glycines
PVSINPAVSNYPPVYE

SEQ ID NO: 149600 - protein, 63 aa, Heterodera glycines
MIDNEQKPLERKFIQQLIDKVRPLYVDTKKDHLHLWSKLRILGHDKQIKDDISTTELLVKNLM

SEQ ID NO: 149601 - protein, 193 aa, Heterodera glycines
MEDNSTQTDINDCHSEHCSKEKTHISELHKSVQKKFHLELEQTEKKVDVIIEEQSKKLEELQQKAHKDEVAKAALRQAVAEECQQKCDYADKLGKVEAALEKANKNNKELKDDLDKVRRQKAENDAQNAAEIRRLESDLELVQHVTSAIHQQRSHSAIGHFSFTTSTRTISSPEEEEEQNEKALDELAPIGAK

SEQ ID NO: 149602 - protein, 55 aa, Heterodera glycines
MKRSSSGNESDSATKKIKWSPPEKINFNHYWTGKVTFAQYWDGGYLPPDPEFANW

SEQ ID NO: 149603 - protein, 52 aa, Heterodera glycines
MEDDGPAVRTEVSTVTKVVAPMTMDEEEEEAAADADFVEDKHKQLILAKFIM

SEQ ID NO: 149604 - protein, 87 aa, Heterodera glycines
LHLCRLLARSVCFTSAFSAWTRNRSDQSPILPPRGQTFQSTQMDIGHRIANSRERAMVWQEANGNCQCQLEAFANPTKSVAQQSHRI

SEQ ID NO: 149605 - protein, 207 aa, Heterodera glycines
DLSPIIGLIVCCLLIVLFSPIKISHGNPVKSNNKWPWLVALFAREAGICGDDGNKFCCTASIIGPQHVLTAAHCFMSFKGEQRENMHEKIFVRLGSYNHSSKEAIEPNLAKVIVHSEYDELTFVNDLAIIKLAEPITFMENVEPICLANSTSEKDFNSNNNLHIVGWGHQNEAEYDEEGNELWRDPDVEPEMLREGLAQKRDEDECA

SEQ ID NO: 149606 - protein, 97 aa, Heterodera glycines
NLGMPHIHMLLILEERERVLTPESVDQYVFARIPPLPPMEDMSIEANQQRRLWHYVTTMMLHDCNSACTEVDEQGRTRCRKHFPKPYTDLTELSGNL

SEQ ID NO: 149607 - protein, 515 aa, Heterodera glycines
MDAVRSRADCTVIERADAPTAKQVAVIWVQEDGLAPEVNVHIKVVVAQNDSVFEPVFGVQTKKRELGIKKTGSEENISERQFYRYRLALRENSKGAFHWLWFARRLAEFFVIAVLNRIERNEMDHIKAIQQRKNYRQTLARDYIKAIEQGLQQQGRNAKLGSVYLMPQTFAGSRQYYQQKYADLMTIVRSLGNPTWLGMPHIHMLLILEERERVLTPESVDQYVFARIPPLPPMEDMSIEANQQRRLWHYVTTMMLHDCNSACTEVDEQGRTRCRKHFPKPYTDLTELSEVRYTNYVRLPADFSDSTLLAGAENAQPADLNSAEHFLPEDDPERDCNEEKCGLFYQKRNKRGRGVLLLDDSRVIPYNPFLLLKYGCHINVEYVFGQKACKYIFKYLLKGFEKAYVKVMQPRRGGASTNEEVYDYDEVAATFKVRYMTSMEAYLRLNSYRIVSMSHQIYQLSIHDELGQTIVIEEGHEEQGRRRIANKTRLTAFFALCAKEPAVSELTYNRVPYFY

SEQ ID NO: 149608 - protein, 18 aa, Heterodera glycines
MENNLENGKCELTKFGNL

SEQ ID NO: 149609 - protein, 23 aa, Heterodera glycines
LSTAVRQRSSKIYSMPQILWAGY

SEQ ID NO: 149610 - protein, 23 aa, Heterodera glycines
LSTAVRQRSSKIYSMPQILWAGY

SEQ ID NO: 149611 - protein, 23 aa, Heterodera glycines
LSTAVRQRSSKIYSMPQILWAGY

SEQ ID NO: 149612 - protein, 211 aa, Heterodera glycines
MAVLHWASLNEITTKKAAGRIASDADRPDEDDVELGAAPDGNKFSVAQKFSRSISMIGGTIHRQDTATGRAKKKAMGSPSEAAMLNYVNQLIDVEETRANNNVKWPNHTKWQRIGTFQIVFEVPFNSKRKWHLVILEQSEDNADGLKQYKMLMKGASEILSHMCSTFMDEHGHQQKLGNVELKQFEDAYTHFAEGGHRVIGFSTKTFSAPR

SEQ ID NO: 149613 - protein, 456 aa, Heterodera glycines
NIYLHTNCQIIKVIHGERISRLSPSEWDELIEKESVVFARTTPEQKLMIVEQCQRRGKLIAMTGDGVNDAPALKRADIGISMGSIAMTGDGVNDAPALKRADIGISMGSGGSEVAKQAADIVLVDDNFSSISEVAKQAADIVLVDDNFSSIVHAVEEGRVMFENIKKLLAYTMPHSFPEVWPVIINFCFGFPPGITALQILSIDLCTEILILSIDLCTEILPGVSLSRELAEGDVMARPPRAMNKVLISNTLLAYSYAYTGQIYAYTGQIQSLGCFLAYCCVFWYHGIAISDLWMSADKLEAGRSGICQVNGKSFSVEQQLYIGRQACSAWQVNGKSFSVEQQLYIGRQACSAWQMGIVFGQFFNIWSARTRRVSLFRHGFLSNKALLLALLVELALINCFVYMPGVNSFLGGAPIPWHCWAVVAAVGLFINAYNEIRKYFVRNYPQNRIVRCFKW

SEQ ID NO: 149614 - protein, 95 aa, Heterodera glycines
MYGQISTKFDIWSVGIIAFEIFIDQLSLEEKKAPMNGMERRTMLCNIGNLFFGFKRNRFGDYPGNVKEVPLLYSEDPNWVWQNKRRHSRGAATLA

SEQ ID NO: 149615 - protein, 206 aa, Heterodera glycines
RTNSSDQKTQNGVNFSYLDATETKWAQNYRMYSYILDELVLVFSTFSVEKNKCGIFGHSMGGHGALTIALKHPELFSSVSAFAPICNPSKAKGQKYLRVFLGNDEGKWANYDATELAKKYEGPKREVLIDQGSADPFLANGDLLPANGSADPFLANGDLLPANLLAVENPNLTWKYRLHPNYDHGYAFIQTFIGDHFEHHALLGNL

SEQ ID NO: 149616 - protein, 61 aa, Heterodera glycines
MSLVELSKSRWFNGYQKIFEHNSAQLKCRMRFGVYLPDNQPESKLPVLFYLSGLKCTEENF

SEQ ID NO: 149617 - protein, 103 aa, Heterodera glycines
MSPIRYPSGVKLPPFARFYDNVYWKVKRYMKPQFFGVVATVTIIGAAFWAIAIQPMISNEYYAEKQREWWKRMPVSREELAGGLPVWRDPFDREDRKTPSYAK

SEQ ID NO: 149618 - protein, 110 aa, Heterodera glycines
MSVGEVNGRKVARILATSCATSNKCNHSLAEERRIVITSRRQSPQAEDDELVEVLSAKTLTEERRAHSGGGQKSGKNGQRKGRNGEEDEEQSTLDQVTPIPTTLELSNST

SEQ ID NO: 149619 - protein, 255 aa, Heterodera glycines
SLLFWCNLFMLFVSFFTCALIEFADIVSENIFGSVFMYYFVKRSSSENIFGSVFMYYFVKRSSANPWPRWMGIMHGYEIEYVFGMPFRHPQAYDQKELDMERAFSAKIMDFWGRFARTGEPIEFWPKEPIEFWPKYNRITRKSLVLSDEIARGNSHRIYVDVHGKLCRLLEEAQALARLAPDQRQRMAPGIDMASLNTWHRASSPSLNSATADQRNLHRPITFLTFGTLLTVSMASPLIIIPPQILFVHFHFTFS

SEQ ID NO: 149620 - protein, 117 aa, Heterodera glycines
MNFAFVPIDEDANFFKGNLFEKLQRKEFKKDVSIMLGTVRDEGTYWLPYYLHKYGFGFNHTISPEDQYNQALVTEAEYTKAFDAFLPYFGNSQLVRHALMHAYARITPDHNHAKAVE

SEQ ID NO: 149621 - protein, 110 aa, Heterodera glycines
MHPIKKFIFLYLILYQSVKIEQKPVHRRAILSVLAIGGIVALVLVPIVVGSAEHQRDHSNLCLVIGAAYGCKRVELISKRGNYSKSNFHLTDLYLFLSRLLVLFTNLGAK

SEQ ID NO: 149622 - protein, 598 aa, Heterodera glycines
MDYPRINESELAFPIPSGIIVSGPSSSGKTQLVLRLLRHASLMFDPPPKAIGMCKGGFCAVDCCYLVWAYGEYSTQIPDLERQGVVPHAGAPSDEMLKKLPKPCLIVYDDLMGDIEAKKLADLYTKKSHHNNFSVIFLTQNLFDKSMRVPRSNAQYIFLMRAPNDMLSIRNLASQMFPREQGFLMDAYRQACALPYGYLLTTRRESFLPPKMVKREQKIGERVVHNYDYLKKLGKTTSEKKRRHLLNSAGCEELLTLVEICLNVLNGSFCLSRKQKQRLAPFAKDIRQLARVRSERARETKNDDDIAERTNLGFVKRQVTAAVQKRKGNVSERNAMYNQHLRRYLKMRKEHKERPVRVQLSNGAQLLNKTVETGVQVRPGPDEPKDKSVMVTDEDEEEEIEVPKFLTPTSPTQGSSRSPRTNKKAAKQQKLIEKKDHLLAIIMSDPQRFGATDRGKIINPKTGREFIDSDLAWSIERLVDPRPENAPSPSGTKELKRKLAQNPLASSLLNRLFVGSGFVGQALSCKNSGYRYLLLVVDVLSRRMFGAPVKSKRPVDMKRAFEELFEQMPRVPDTMYTDRGLEFVAKPLKEFYAEKGIQ

SEQ ID NO: 149623 - protein, 152 aa, Heterodera glycines
YDKVSGLKLPKPRRLVYTRTSLTISVLLSGGIGYYMYKILRGDERLHREWVVPMVHRWFAPESAHILGVKAVRLGFLDDFVESRKEYPELACQMFGKQLNNPIGLAAGFDKNGEAIDGLRKSGFGFIEIGTVTPKAQIGNDRPRVFRLREDQ

SEQ ID NO: 149624 - protein, 34 aa, Heterodera glycines
MQTELNKRNKFGGWGTISVRDKLRMNASDETFVV

SEQ ID NO: 149625 - protein, 87 aa, Heterodera glycines
SPFKFVDDAISLKAASDGSSAVASSSIVAGVGDDQKSVKSCSNNSSSSNHANSSSCALDALVNGAGGDGTEYRIKLISVQNFKRMDA

SEQ ID NO: 149626 - protein, 85 aa, Heterodera glycines
MAFGTVGKLTGTLPSPPAPFTNASSAQLLLLAWLDEDELLEQDFTLFWSSPTPATIELLATADDPSDAAFSEMASSTNLNGDCST

SEQ ID NO: 149627 - protein, 261 aa, Heterodera glycines
PNVVVPKSRVPKCRVPKCQGPKVPKCRVPKCRDPKSQVPKCRVPKSRVPKCRVPKCRVPNVGIPKSRVPKCRVSKCRVPKCRVLKCRVPNVGIPKSQVPKCRVPKSRVPKCRVPKCRVPVPKCRVPKCRVPNVGIPKSRVPKCRVSKCRVPKCRALKCRVPNVGIPKSQVPKCRVPKSRVPKCRVPKCRVPKSGSPKCRVPKSRVPNVGIPKSPVPKCRVSKCRVPKCRVLKCRVPNVGIPKSRAPKCRDPKSRVPKSRVP

SEQ ID NO: 149628 - protein, 120 aa, Heterodera glycines
MAFAPLGPMALSVGPLFAAAPLMDEEDTDLEDDEDGAREGKASAKEDGGRQDDELDERERILGMEDANFCPNSLPFLLCSPSCSPAVVHGADGRPRQTNGQVVQQSQCKCNVRTPVGIFV

SEQ ID NO: 149629 - protein, 179 aa, Heterodera glycines
MPPPLYLSPIIEVIRCQICAHSQFVQRDAQLVPRDQLLAHIAAHINYGPTSEKNERLKQICQREYEHCICIDFAERLGHLSGEDGHRHHEQQQANMTFPAAPPPPHFASSIPNIRSLSSNSSSCLPPSSFADALPSLAPSSSSSKSVSSSSISGAAANNGPTDKAIGPSGANAIKLERV

SEQ ID NO: 149630 - protein, 42 aa, Heterodera glycines
MPTGREWGGRGEQIGKSGELMEEDEDIQQMYCSCLMPDNKET

SEQ ID NO: 149631 - protein, 132 aa, Heterodera glycines
MNWAKAPDGLLPGRQSPVPPPLSADFMLDVTELLSVSKSITSKPLRRRWLRRQKRLSREASAENVKISMFFNIFWNFPTSMVAIPPLVLTVAHCQQITVEALRGRRTVQLKSNWRGRRTVVRIGGDKRGDDL

SEQ ID NO: 149632 - protein, 143 aa, Heterodera glycines
MTNVNTDLVEDIVQMRPNSAKKLAEDEDKSLLRDVDELETDQQQRENNRRTKAPPPPMLRFPGVGLNGYQRKAVEMIISEMSANAALQQAFRAKMMKVRLGPNSAMFGQMLRTTCGPDEVCLSDSIPELGEKYPDQQLEIEAN

SEQ ID NO: 149633 - protein, 151 aa, Heterodera glycines
MSQNRDENSQPPVLDGPYPLAQERNEFVEDEAPVLLEMLDRLSQGGICQAMGLFSFALADCLATFHTFAILFDCETPVPFDEQHKRYVFEHRDKPRLIYVSEDGSAIQVDGVVKQGEFVMSIETMYLDKRNGVDHFCTFLHTFGICFLMCH

SEQ ID NO: 149634 - protein, 530 aa, Heterodera glycines
MIAEVERLLTRKRSAPVHASFGNIDDDDEEEGEILDVSFVEEEEDNTGEAPLNPLSYLAKQSAAQQETLRHEKWAQEERKRREEEQRKQRENERRRREEEERRRKTEEDRRKTAEKAAKEKKAKEEKEASEKKAREEKLAREKKEEQRIAKEKKGEKETKDKKAEEERVAKERKAEDERVAKERKAEEERVAKAEAERVAMVTKAEEERAAKAEAERVAMVTNAEEERAAKAEAERAENETKKKQEEEKQLEELKRQQQAIRKQKELELLKEFRPWRGGYMRLVHGKDPTPDVHYLHETDDYHFVNAVHKYRVRHSELPWEAPEFNPSAHIQQNIGEFRELFEQEVYDENYAVKTREEKEELIELVKGFRFYFTEQIGRFELKVFNGKISHITLTDQLAYVLGYEQEQQIRNEELAKYAVDLGGGVSHLCIYLNSGVIESMIVGNTFANLLQVIAVEGKSGSVVEKDFQAPLFHKIIAREVDVLDVEIRTLTGRLGSSAGQLFLITYLREVPFEFGQVVLTLQFKKVLTF

SEQ ID NO: 149635 - protein, 96 aa, Heterodera glycines
MDESKRENFSPQNDDDVITIGDNNNTQTLLDLQPGPSKRGRKPRLDKIHEEIASAMKKAKAMEAEVDESPKKQPTNVFEYPTIFWKLARPKVLANI

SEQ ID NO: 149636 - protein, 66 aa, Heterodera glycines
MDESKRENFSPQNDDDVITIGDNNNNTQTLLDLQPGPSKRGRKPRLDKIHEEIASAMKKAKAGGAE

SEQ ID NO: 149637 - protein, 803 aa, Heterodera glycines
MDYPRINESELAFPIPSGIIVSGPSSSGKTQLVLRLLRHANLMFDPPPKAIGMCKGGFCAVGCCYLVWAYGEYSTQIPDLERQGVVPHAGAPSDEMLKKLPKPCLIVYDDLMGDIEAKKLADLYTKKSHHNNFSVIFLTQNLFDKSMRVPRSNAQYIFLMRAPNDMLSIRNLASQMFPREQGFLMDAYRQACALPYGYLLTTRRESFLPPKMVKREQKIGERVVHNYDYLKKLGKTTSEKKRRHLLNSAGCEELLTLVEICLNVLNGSFCLSRKQKQRLAPFAKDIRQLARVRTRETKNDDDDDIAERTNLGFVKRQVTAAVQKRKGNVSERNAMYNQHLRRYLKMRKEHKERPVRVQLSNGAQLLNKTVETGVQVRPGPDEPKDKSVMVTDEDEEEEIEVPKFLTPTSQTQGSSRSPRPNKKAAKQQKLIEKKDHLLAIIMSDPQRFGATDRGKIINPKTGREFIDSDLAWSIERLVDPRPENAPSPSGTKELKRKLAQSPLASSLLNRLFVGSGFVGQRNTTYTLFKPKRDKFRRLRTVPAGFMTDVQADLADFQALSRKNSGYRYLLLAVDVLSRRMFGSPVKSKRPVDMKRAFEELFEQMPRVTGHTVHRSRAGTSSKKKAAVAERAIRTLKTRLYKYFSSNNTSVWVDVLPKFLSAINNSVCRATGLRPNEISDTNAREVWKRVYGEGLAQLDKTPKIRAGETVRIPEPKHIFEKGYIPNYSDHVYTVDEARSTNPQHYLLKDYYGTKLKRKFYLPELTKVQVDENTMYRIEKKYKERVRDGKSEILVKFIGFPENIA

SEQ ID NO: 149638 - protein, 450 aa, Heterodera glycines
MLEDNPAMKAYFDNCPDSGPIDFHDAFFGVINPETGDWKSRTIKVKDFNSLYPSRNMYTNYPVGHPTVVQFDKDVEWRSPADIVGDDGIRLEGIIKCYAVPPRHCHYDIPVLPYRLNNRTLFPLCRTCSEMYPRGLIDPEYNCKHFEDSERASGYPASCTEAGISDEESARRKQDHIDKAKEKAQESAHKNRNRRVPCGIAKLLNDSKIEVSSIDQLTEKFWMVCYKAKDEHVVEHSTSNVAIALWTTSAARIHLLESLKKCMDLLLDTDSIFYDYLTRLGDPLPGGEQLGELADEHPNHTIMEFICAGPKAYGLWLRNNATGEDEYKLKVRGITLDSDACERITFEKMKDMVQNKLGQPDNNVRFNYPTKNFRITKKGEIFTVPLVKQFNPTVNKGVVRDHGLKVVPFGYSDKEWCKWNCPGACTCLFNPDLNVNMFTEEELNDPDIMP

SEQ ID NO: 149639 - protein, 182 aa, Heterodera glycines
MPTEPVAAALTQLADLPENNFSFRINPLPVVPRSVSIQYLDDVERFKVSFNDRLIRHLSFSPQLGYVLGFENPQHVVSNEVAKYPVDLRGGISSFAVYSKGLTENMIVGNSLSSLLRVVSVSGATPNDYNEKIYDSPIFARVLPREINEIEIELRTMDKGRLVPFAYGTTLVVLLFKKVINF

SEQ ID NO: 149640 - protein, 208 aa, Heterodera glycines
MKRPNPLNLPMNEKKPKLRRRLPAELNSELISFVPLVCLFANVKRTPIGPKGVIALFDVMFEEKRTPKKKKVGRLLLQEELPHDLSRNELLHYLCYGRLGTNLFETYFVMSQATNSIGIGNLFGLLLDFAMSSPTPWHMKRPICCGIFFRQHLPWILQQPMNVMLSHGFFPEVRSDGFEFFWLFNPHLKKYAGNDDTMTDGIFWAKLS

SEQ ID NO: 149641 - protein, 1279 aa, Heterodera glycines
MNSWVSCTSLDRCSKAKEHQKRQRTTLKNSENNIEHMAKFHYVKIKSKFTITDLPSTPEALLAGIFQHCIDEAIVESRERNIEPTHLGCMISSPLLEGGDIPIPIRQMTNNTLDTILNQFKKVAQSKQQKNVSLWGEPFTVTITTLDRNGLPSKRRVKGGARRPVKTAVHHRINDQCLIKIRNNDNHFCLFYALQATMVDKTCNWPRWKFLDYLHDRHGQQGQLHHDTVKLMQQVKAPMDLVGYDADTFVPHVVDYWNNAQRQHRFAVFIFGSLGQYKPLYKYIDNIYDTPLLLYFNEDHFDGVQKQGGLFGQPYCLECERPYDKMSTHNKTCKARCVLCSRVGPAFPCPSSTGFIKKCKECNKKFTNNGCYQHHLQSGFCKRSKKCKDCGAVWDVVNNTQKGRKGHVCGERFCKMCNNYHNTERGCFIQPIEPKERDPYRIVAFDLETMQHTPSVKPEKREHLPNFIAARVACPDCIENESWREASGGCEVCGPNRTVAFCQRRFTETTVDKQVVAENPLEAFVSWLINDLPLAYDTYAFSHFGGRFDMVLVFRELFKRGYNPDMLRKGNKMYEMRIRRQKKRNPNIVFRDSFNLMPMSLASLVPSFGLDVEDKPFFPHMANHPDNYGKQIHPTPDDYLVKGMMPDKRQKFDDWYEQHRQEPFFLDEALASYCTNDVEILMAALVAFRHEFLDVTKRNEGIVAERAAFYEHHDGIDVLRECMTIAGACMKHFRTNHLPKKHLAIVPERGYDNAQNQSLLALRFFHWHAEEHGVVVQTAHSAGGEKKIGQYSVDGWVEEERRAIEVNGCVWHGCNECFPNNNMMMPNGKTAGEVRERDEKRLEFIESQVSRVDVYWECQIKRMLNRDPYMRESFGDYVDDGPLDIREAFMGGRTGPLKLYHKAGEGEKISYYDFTSLYPYVNFSTTYPIEHPKVLILNENVEWTSARDNPYKLSLLKVWVIPPRKCDVPVLPVKVNKRLCFPLCMQCCLDYPKGGVDFDYHCEHDDQQRGWVTTCTSIELDAALEEGYRVTKVFRVLKYRHGDDKLFQPYIAEFMSQKIEASGFDASIKGNEELEQQFITECAEKFGISIDKDNMKVNKGKRSLAKLCLNNLWGRFSLRNFGLAQTLITDDPSVLTEYVENSSIDIISVDELDEKHQLISYVQKKEWVEEHECSNIGEILKCRLLYTDTDSLIFVHPIGMNPLETGPNLEQFTDEYPKHEIVEYCSGGAKQYGLKLRRNGQDEFVLKLRGITLNYDVMQNQSLCYDTFKEEVLRYAETG

SEQ ID NO: 149642 - protein, 161 aa, Heterodera glycines
MQKVVRTPGCRLLYTDTDSLIFVHPIGMNPLETGPHLGQFTDEYPKHEIVEYCSGGAKQYGLKLRRNGQDEFVLKLRGISLNYDVMQNQSLCYDTFKEEVLRYAQTGEYEPINVMYPNFLRPDIRGGGHVTSGPLQKCYRPYVGKGIVGPNYDVLNFGHTL

SEQ ID NO: 149643 - protein, 128 aa, Heterodera glycines
MQKTFFVDGISDHGAALTPAYGRLRQPYNINIAAHFYARHRIKLHLPYVPCVVEKYFWSGEDRYYPMELLEIVDEDYTNKERWLGKLFMEIEDDFIPVKRLGRVEEVEEIDDNDGGGRYECSQPSYVY

SEQ ID NO: 149644 - protein, 97 aa, Heterodera glycines
MAKQFVQHETAEEQQVKAKKPNVDERFLWKITRGQFVLAIRLCSEDWNNLFHNKDKARRLEDGRVAIGLEMCEKCARINCCVSDMIADQKKKPKTTK

SEQ ID NO: 149645 - protein, 73 aa, Heterodera glycines
MASYCEASKQQRHQQNHFNEMMCISERRNRQTDDESDFHNHKNRRALKRTTRPASGAPLWNSQGAARKNYSSN

SEQ ID NO: 149646 - protein, 239 aa, Heterodera glycines
MSFRIWQCGGSLEIHPCSRNTRRAAEVWLDDYKEFYFQTVPSARYVNFGDISERLRIKERLNCKNFSWYLKEVYPELKPLKNSGERRVQIIQQGMCLDTLGKFKWNQSPGLYQCHGMVFGNKYGTKLSCLCDGGNQEWMYSPLSGKLRHNAFKFCLTVNASSGVPFNGDCKVASVNWRLPTPLQGQNQHEANGLVKIGLKCLGSASETHEGNGLQFVLQTFSCDLRDPNQLWTVRYLSM

SEQ ID NO: 149647 - protein, 50 aa, Heterodera glycines
MPATKKKAQLDPLVRRSIALLWAYNGSDLVLLTFLPGECRFDEYCQANRK

SEQ ID NO: 149648 - protein, 239 aa, Heterodera glycines
FSHVLPPTSIIITFHNEARSTLLRTIWSIFIRTPSHLLKEIILVDDYSFDATIGRDLFTIGRDLFGIDKMRIIRNRKREGLIRSRVHGSILIRSRVHGSIIASAPVLTFLDSHCECNVGWLEPVLQRSHCECNVGWLEPVLQRLVENDKAVVAPVIDVINLVENDKAVVAPVIDVINMDNFNYVSASSDLRGGMDNFNYVSASSDLRGGFGWNLVFRWEALGREKKYSGEKNRKKPIKE

SEQ ID NO: 149649 - protein, 317 aa, Heterodera glycines
MLYFFPSISFTIFCYLLLVPVSSAIQSVDEGMLIEFMKGHNENKISEFSMQKYEAHIGILHFMEKNWQCDKIGEQFKAHYEQTKCQKYRKYLDILYEYLIGEYAGIPTVKPKFVFKNRHFEIEGPIIYAVNCLAIIWQFYLNSTISNYDELKLIHLINSHFKLNLLNEKRIINFNAKKDADEKEKDEKQMPINEMILQLAIDTDYQYQINKSVDRIIRKTLDQNLEKMLKKAEERAKDGRPKAKADEINGDKTLIILDSKFDDSKGWVREEFLGLAGVGRVPVFLGKNWPGYCWVQKSRAGPMSKFFNRVRVSGPSG

SEQ ID NO: 149650 - protein, 68 aa, Heterodera glycines
MRNTKKYETLNTPKTQKDKPLNMIHPKILSCPTMAARNYGLRITEITGFWELRITGYGFLGFFRNFDP

SEQ ID NO: 149651 - protein, 140 aa, Heterodera glycines
MRNLQKERKVLDLERYMRKREQFEQILKSNKRQIEKKLPFLEEFLAKKPNSFEKIYADKGKTKTYTNEQYLKGLKAIEDELNKFEFVWWHNEEKRWTISDRPAIRQIVWVVRHAEKRNGGTEDETLTEKGEEQAKELGKW

SEQ ID NO: 149652 - protein, 187 aa, Heterodera glycines
MPVPRVRFKTVPITKVFASPFQRTMQTAASLLGEGHRAFVHIEPGLSEFEKPCDLKIGHKKLTELHKDKAFPHTNPNYWPMYSEKALKLIKAEREESKRKEESDCHFVVEQTLRRILTENKNAEHIVLVSHRDVIGHVNELLGGNWAVVDTATVNKYVQYANGKDQQKEDDDILSKFVIEHTGVHVH

SEQ ID NO: 149653 - protein, 345 aa, Heterodera glycines
MSHAFRVPPPHRPHNKSEGERNDADDDDDDQTEIEQFNRELNEICQMLREHYRNEVPKIGRLCAQMSEGTRQALAIQQQVPNPDEVQQHRENNARDNKNKNSSNKGISSSKGNNCDNANVKCESGLHQNAWWQQQFHEIEQALDNDADDEGISSGECSDNGTNENDNKSDDDIESDAESDDKPYECDCESADHPMECPLLAARRALRRLKLPTILDICAATEAEVRQYGTKLSDIVKQIAKLRVQNGGALTSELELRSRQKQAQNLLQQIGNLMPQLVVEEEEVAEILKFVEQSADRFSIGFRDRKQQKQFKKAIRQPKKVCSNLKLARSFFLLSLVEYFWYFVI

SEQ ID NO: 149654 - protein, 85 aa, Heterodera glycines
MFKCGVCTYSNVIQYTYLPSDIFFDGLGNKVRSTVKQTLAEQSTKNAEVAEAFALLKKLKKHRTQMDSCESVGTTDAEGAEQKQN

SEQ ID NO: 149655 - protein, 80 aa, Heterodera glycines
MKKSVTISVPEQKEINQPNSEAEPPKTDTTKKRKVEDRELWKLAKGKFMLATYLCEVIIILALFALSVRHDFVVFAIRSA

SEQ ID NO: 149656 - protein, 151 aa, Heterodera glycines
SCAYMERLAGCLICGPHWTVAFCQRLFADTNVDHQMVADNPLEAFANWLGNKMYEMKVRKQKRRNPNVVFRDSFNLMPCSLAALIQSYGLNVEDKPFFPHLANRPENYGSQIYPTPDDYLANGMMPGKRRQFDVWYEQHREEPFILDEALA

SEQ ID NO: 149657 - protein, 65 aa, Heterodera glycines
IIVIGDISTGKTSLIQRFIHNSMSGNYKPTLGVDFATKLVQFEDTPGTFCKHDPSVLQGFARCHL

SEQ ID NO: 149658 - protein, 62 aa, Heterodera glycines; identical to SEQ ID NO: 125756

SEQ ID NO: 149659 - protein, 72 aa, Heterodera glycines
MEERPGFKVDLGQWAANPRHFGGQQTTKGPKFAPFVSPRIGAEKETDEPEKLFPKRLLLNKYIICNLFGFFL

SEQ ID NO: 149660 - protein, 138 aa, Heterodera glycines
ERIKTEEAKRFPAALQRNAKNDNGRSGQSVAAFVPMGRHQLAKNESQAAIKVEKVVTILLDDPSAFDHFCVALLLSQQFKLFKMQFLLHNFVAALHQHNKQQQKQLAATNGSNNSAPNVCPAPPIDETEQIMAPFPPP

SEQ ID NO: 149661 - protein, 229 aa, Heterodera glycines
MDHNTFWNRKKLIQYMGTEEKVVKWGSDHGFIPKTAFCYGKWPNQHAKQEMVFENEGKVGNFRCPKCRKKQSLLINTWFENCHMPLSKIMSIMYSYAHEESYEKCTREAVENENGTLLGSDTITAWLFFTNSFLLNWNIRYKYCREMIVDHYIVREGMIEYGSEDFGLVACPEKIDSSADVLIPIIQQHIALGTEIHIDCWRAYARLTEFGYLNKVVNHSDPENRFVGI

SEQ ID NO: 149662 - protein, 176 aa, Heterodera glycines
  unsure (1)..(176): unsure at all Xaa locations
NLASNPIGKVQIPPARIAISRPRHLCERIGPDPGRSEAIRQMPPPHNLSTLRSFLGVLNYYGRFIKSMREIREPLDQLLRKDVKWEWTDEQQNAFQKAKEIMLSDLLLIHFDPSLPIVVAADASXDGIGATISPIFPDKSEKVIEHASCTLNDAQKNYSQIEKEALALVFAVQKFH

SEQ ID NO: 149663 - protein, 688 aa, Heterodera glycines
LTHPILYACSSDHNTSGVPVYSVTQKFGLIQLEKCKFLQPELLFLGHVISAKELPDPGRSEAIRQMPPPHNLSTLRSFLGVLNYYGRFIKSMREIREPLDQLLRKDVKWEWTDEQQNAFQKAKEIMLSDLLLIHFDPSLPIVVAADASDGIGATISPIFPDKSEKVIEHASCTLNDAQKNYSQIEKEALALVFAVQKFHRMLFGRKFTLLTDHKPLLAIFGSKKGIPIYAASRLQRWALIMSNYEFDIKYINTSSFGQADVLSRLIANYPRPEEDILIANICTETDCYINTILQTATDQLPTTKAEISEWTPKDEVLRKISDHTKNGWPQKCTDPDLSPYFPKRKEIEIDGVLLYGKRVIVPTQLRERIIKALHMAHPGIVRMKALARQHVYWPGLDLEIERMVRQCEDCQSAQKSPPKAPLAPWTSCSRPFQRIHIDFAGPCSDGHSYLILIDSFSKWPEVYRMDRISTPATLQVLRSIVYRLGFPEEIVSDNGTQFHAAEFKEFCDEFGIKHTFTPPYHPQSNGQAERFVDAFKRAMKKCAKDGKFSAEKKLLAYRTTPNSALNGLSPDQLFFGRRLCTQLSLVHPKEEQAEVIDPAKIRKSQADYARKMARQFDQHHGAKPVEFLPKDPVLLLNFNRGKRFWLNGTIRKIGKIPTYRVHVPALGRAVHRHVNQLRHRYPLEENGM

SEQ ID NO: 149664 - protein, 27 aa, Heterodera glycines
SVSVTVRISANPSVQWHFFGRKSNHCA

SEQ ID NO: 149665 - protein, 63 aa, Heterodera glycines
MTPFFAVVPIAQFWPSTVAILHKKKASVSVTVRISANPSVQWHFFGRKSNHCACCVSMSDTIK

SEQ ID NO: 149666 - protein, 114 aa, Heterodera glycines
MRSENGEQNEGVAPLSAADQQQLKAPAKLLGWHRLPQRIGNHWCQTFDGPIQRKSLKRCAMIGLATKEMPLYGRVGTYPNGYGHRSDGLFWVNGSCQIGSQSAKFGIGDVIGSG

SEQ ID NO: 149667 - protein, 265 aa, Heterodera glycines
MIRAVGNVITAKISEQISQSGVFGVIADETMDISGYEQLSISARIVNESNQIEEIFLGFVELEDQTAVTISKKIIFLLRGKYGLDLSKIVGQAYDGASVMSGGHNGVQAIVRRESGAHLLNLKLCAALTANHYHNVFDFLGKLTNFFHCSAKRTKILERSIDAISCSKKHRIPTFSDTSWTARHTVIEAVKELLPAVIAALCQIRNEDAAMRSEAAYLLDFFAQNEFQFCFIMIDKVMSAMKPLTLLFQSKEVDIEKGIFCRNVQ

SEQ ID NO: 149668 - protein, 19 aa, Heterodera glycines
MSHLPWCTRCLGIPSTVIA

SEQ ID NO: 149669 - protein, 583 aa, Heterodera glycines
MVEEAALLALSVLPEANSLLPTESQKALNQCKERGTKLLEEACLAVLFRVAHHWYDDLYLAHLENTQQQQATTTALPPPAHPQPTQRIAPQQCVVRLMMHSPLHHSHQSQQQQQHFFPVHSAAASTSAAVVFSPSVPPPPTPPQQFVGPNVVIHPQQHNLSTGNNFIQYSHHLQLTPTAVPLFHGQTAAVSMAPMLHNGQAPSVSSCCFLSLPPPQLQAVQPPTVVDHKQTSQPHLQQSVAQFGSTIGYPHHHHVTAHQPPLSTPPPPLMLMALPGANAAASAFPPRHILQPTPAQHQLPNYTQQQQQTANQQWTLQKGIGKHSIGLNGEHCNCERMRIESALFRRDLLAARRVPGDWRSRLRAAVSREGVRLCVLTLRPPPIAPRRFQSLPFRPLLFFSNICPRFSVFPTFARCFASARLERRLSFGLANGQQRTGEDVHSAGEVGHGIASDGRPRGGVAAPRHSLLLQRRLPQVNAGCIFFGVTNLIFRLSYPNFSASDQEYICELALVVRDIFRHIPPYHHPPHHQQQQENGRRKYMDLFLEHLQEQKAFKNRKNGGMAAVRNTLSQQQQQRQLTDRSDD

SEQ ID NO: 149670 - protein, 121 aa, Heterodera glycines
SVSPPPPPSSNECPPPLVPCQYEYLDHTADVQLHAWGQSLGEALEQLTIALYGYMTIEIDRVEPIYTMDFSASGHDLSALVYNLLDNCLYSFCAEPFFIGRFAKFLNLKKPSGNTGEELSV

SEQ ID NO: 149671 - protein, 231 aa, Heterodera glycines
MKRTNASNITPPRAKRAMPPALDLDQNTATLEEQERQRTLVFIGLPESNAIRPSERVQEDREAATKILDHLEVEAEPTAVFRLGRFDPQRTTPRPLKVVMPTPTHQHVALGGWKHERARLRSQQNLTRLFVRPALSKEQLKEEYEARLRKRQQNPAPMAPATQLPQTNAPTPVVEDGPNQKKTSDDIPKQPEVFDETILVCYEALNSFPPTDKIVHQIQSLKKQYPHLFNK

SEQ ID NO: 149672 - protein, 231 aa, Heterodera glycines
MYALKKLEKKRVKKRHAESLTLNEKQILQRINSPFVVSLAYAYETKDALCLVLTLMNGAPEIVKNERYSYGVDWWGLGCLIYEMIEGKAPFRQRKEKVKRDEVERRVREDTEKYSDKFTEAARTLCRGLLHKEPTLRLGCRRVGRPEDGAEELKAHAFFTQPDQKTGREPVPWRKMEAVKVGEAQGMLPPPFHPDPHSVYAKDVLDIDQFSTVKGVRPVRPVLFHPQTIPQ

SEQ ID NO: 149673 - protein, 270 aa, Heterodera glycines
KRGETTQMPYYVPEQMIAFVDMDYGGSSNISIHSFHQHLAKREKEEERTDEVPEEIYSRKIATIEQKLWNFSSFVQMATQRHFEQWQWHSHSATDPKRRINDVTESGDGAGPLEPMEDDVGIFSAQAEERLPIVPEFPGEETVAPGANTPRSMVSSIDRVHPDLVALMRRCFGTPEQRSGSLVDQMIKNMEQYTGNLENLVKEQTGKLELEQQKIEQILLELLPKSVVDELRMGRRVEPQFYASVTIMYSDIVGFTSLCSESQPMEVVEL

SEQ ID NO: 149674 - protein, 70 aa, Heterodera glycines
MAPENLVTNVLALLQLTNWRKTEFVNIVCISDYSPSPLALPWLSNGTMDSAMLNLFHGTILACFANVSIN

SEQ ID NO: 149675 - protein, 106 aa, Heterodera glycines
MTWTLNLGEILAWIQSNSSIIGTVVYIASLFEFFTNARRLLEITRMGRAGVVLSSGAEDMLQLRGPFDVSNLCSLFGLTPKCGRRFVSSNALSVLLRSQTRRHTVK

SEQ ID NO: 149676 - protein, 114 aa, Heterodera glycines
MGYESVAINVDIGKFGKESDIIWSDEEDEVVSKKRKRKKQKKLHDRKSGDGNERTSESEIVPDPFLVDESNRLTVSIDADSIHHLQHNKKVKLYDIIAVRVPDEQILMTLQRYS

SEQ ID NO: 149677 - protein, 212 aa, Heterodera glycines
MTLPSCSKDGAASLSPMSFKEPNACPMLERMHYQRITGRFCDACIFVKDRQFSAHRMVLAAHSPYFDSILRHNKIAKEKIIVNCQDPTVFDRILNYMYSGSVTIDRAIVVELLKLANNLLMIRLKNYCADYLMRYIDVANCLAIRDLASRYNLPRLQKHANEFFDSNINGLFGLLCVKSKSRFRCLLENADVLGWEPIKLVELLEMTRHASN

SEQ ID NO: 149678 - protein, 285 aa, Heterodera glycines
MCQTNGRNIEERTRPYAAKLFKICATIQPQQKQNFSQSFQPRENTVCYNCNEPGHFSRECRRPKQYFDGRANQSHAVPATGANSFQMRPNGPEKRALPQTSTKESDQRRSQNFLKQNCIVVQEEAPPEAFCRGVQLSSEIAEFFANEFKERKDGNNQREMSSDRVGKILVIKIETFGAKTEAMIDGGAQISLVGASFLYMLIREKGLDLQKTNFARTNDRIADVNGKELRCFGTLTLPILRKGCEQVAIHFYVTSAPFGFDMLFGTKADQFWNYGASAPVTTPIT

SEQ ID NO: 149679 - protein, 330 aa, Heterodera glycines
MDWYAKRNGVSIQTAHSPGGEKKIGQYTVDGYIAATDTVIEVNGCHWHAHDHPRHRFQPQTVMANGKTAQRIREDDARRLSFITSQVQQVLVFWECEINAEKRDNDEMKRTFAQYKDSGPIRLKDCYHGGRVGPQRLHYEVPEGWRMKYYDVRSLYPHTNAVTAYPVGHPTRVNVIGEAEQAVDWRRADQVPVRGILKVFVVPPHHIDVPVLPVKFDQRLLFPLCRTCALQHPHGAVNEDYECTHREDDERGWVSTVTSIELEEALHNGYRCTAYYRSVEWDDTQWSDRVFRGYVAEFMAMKTHASGFPDEIGQTEEDQQQFIEECEEKF

SEQ ID NO: 149680 - protein, 605 aa, Heterodera glycines
MPRVVSTRTGKGAVTGKPPNTTTVKNKNSSSKTTTTTPTRKTAKLVADEQLPVATLLPTLIHQMCKDRPGEENFYQQAVCWALFALYLMVIVSLILHQLCSICWLKKKKESVKSTFVIENLPANPESMLRALFAHCMSTALDESQQNGITPDQLVATISSDLLNPSIWIPIRRISDNTADSIMNRFLEVAQSKSREGSLWGSPFTVTITTLDVAQLPQRQQVRGSGKRTPYSVQHIVKESALLRINNSDDAYCLFYALEASRKYHSKEMPRRNFCYYINCQNGQRLEDVFGLMSGANIRTDLREYDAVVYVPIVVDYWNRKYATANQRFKVYIFGATGTYRPKFQYGPDNFNIEIPLYHHNDHFDGIRCGVGKAVFGRDYYCFSCECPYDNANDHTLQSCGKDFMSQDCFNHHLSSNVCRQFNKCKQCGIVWNIRQNRRKGRSGHVCGEKFCYTCKCYHKPERGCFIQQLKARRPKKYRLIAFDCETTQNTRIEGSGDRRLHSVNFISCHVACTKCITENSWRNSLQVPCSICGRQRTVTFSQSGYERTQTDAQFITPCPMAAFAQWLLSEFDPRYPTMLFAHFRVVLTTSCCFGSSSSTGFARK

SEQ ID NO: 149681 - protein, 361 aa, Heterodera glycines
MEQWRKRRYDIQQQQRQPPPLVVRDLLAEAAAAPLPESDDDDDDDDEYMLENGFALPAPSQYYGDLPVLPDNAEEIEEMDTAQRRIAIRRKLKKDEAYDDDDQRKKYRIYQPPPLPRAKVKVEQPRPPTPRPRPNVKREQQQKPKPEFKPPATSKKTGHPTPAKRVPEFVDLDPRPSTSRQAGYNPPPPTPKIKHEPTTKRPMPYRIPKREPKVEEAPQQQQPLPAAAVVVEEMPYVPPPRRGAKRRYPVYEDDEVQIRKRVRQPRRVRVQYSPEPGPSTSAQSDEQQQRQQQRELFAIPSNQLTMTQRVERLYIKCNHYADRMGVRGNTINTANGKPLVHTNLRMAIRYIIDGKSGPPHH

SEQ ID NO: 149682 - protein, 193 aa, Heterodera glycines
MFGLREYALATFLDVRFKDKVLTENSATFRARVTVWIKNELKELDIDNDFEELQQNEFVRPVISPQPENLPAKRRMSFFERLKNITGANTSEQGLQTSQDDDIEKEIKEFLSVEIANPEANPLDEWKKIAPRFSILAKFAEKYLSAPATSVPSEQTFKVARDVFDYRRSKLSPETAEQLIFLNKSLPQMNYNY

SEQ ID NO: 149683 - protein, 144 aa, Heterodera glycines
MNEQANVLKDLQFLITLINPFLYGFGRSGGSGAKLRGKAAVGQHRQKGRNACGGSKREFCANFDFCKEWLWHLSFVLLYAMMSLPISAVAILFLFSQINCHSSVHLILLGDFEQYLFRDHLMDKLHILKWHSCRRPSAAEYLCC

SEQ ID NO: 149684 - protein, 90 aa, Heterodera glycines
MVWLLSYRWLFGDFGCRLYQFLSAFAYYSNSNVIVAIGLDRLKIAEYTQTTNLISRMNSQRQSRTFNSRRKTIRGVPMPTLSSSTNCCTR

SEQ ID NO: 149685 - protein, 77 aa, Heterodera glycines
PSRGAARRGKKTPATIWEIGFGQAATSKWSIGFGFETPPHRGFFMGRQIQRAAPSHRHGLVRETPATNPQPFGTIYY

SEQ ID NO: 149686 - protein, 146 aa, Heterodera glycines
MQKPIIVNIIALANLGTGIKLNSLTITECEFKYNPRKFNAAVIKCTAPIKATALLWESGKMICLGTKSLIDCENAIKNFIEIIKGSGCPGASYTGLNFKRGKSMTALIFWTGKVVITGTKNNSEIEEMYHHILPYLKMAQKNLMRR

SEQ ID NO: 149687 - protein, 62 aa, Heterodera glycines
TVRLITDELDDGTVTLLAERPARRHYAHTLGQRPTKPCSGSEQDLTVFYLSWGGGLFGNDSP

SEQ ID NO: 149688 - protein, 311 aa, Heterodera glycines
TNVVTNFIAGGVGGSCAVITGHPFDTVKVRLQTMPKPAPGQPPLFTGALDCVRQTVAREGFFALYKGMAAPLVGVSPLFAVFFGGTALGKWLLQNEPGQQLDFKQNFTAGAIAVVVTTAVMVPGERIKCILQVQSMDGSAGTTPKYTGPVDVVRKLYREGGIRSIYRGTAATLLRDIPASGAYIAVYELLKDKFSGGKRHELTPMATLLADGFAGIANWSVCIPADVMKSSRLETAPEGKYPRNIRGVFREMLREEGHRALFRGFVPVMLCVFHANAACFSGLEQTLWAFRQAGVKKQTISLCLLYFSILI

SEQ ID NO: 149689 - protein, 119 aa, Heterodera glycines
MVRKRKKVSPPVPTAGAGTAGGASDAGGYRFSAPPFTPTVPCLSTVYYTRYRTLFLCYLCPHVRFRPTELCKGRLEEMVGESGEEQRQHKGGQREQCGHHKEAKNGSGGGATSAAYVSC

SEQ ID NO: 149690 - protein, 146 aa, Heterodera glycines
MNALESEAAAHGDLLVGDFMDTYFNNTLKVSLDEFPFAAFPPYIAAGAVLLTGQTIAEFYAAIPHVRLFRLDDIFAGILSHLLAITPQHNANFAFYRQSFADDSLALASSETLTTLIAVHDYLPEEMRETYGKAVKQQNQQKLKLL

SEQ ID NO: 149691 - protein, 342 aa, Heterodera glycines
NFCGSLWKQIGQIDAIDGRKVKWFLGGDLCFLWAIIGHCGSAMTAFPSPVCDCRRERLISSAKCQLRSVQELERQAGQFEQLTQGGDKATAEARALTMGIVCAPLLPSINFEQMLLAPFHVFQGLGNALIKELEAGENAEIAQQFFRRIGTRREAFRKRDLTGNSIRKILVHADQMEALFETEWAKTICQTMVHLGKIQIFTKAQPLSPGDLDGLETAVYQFKAFLDEQPMVRTLLSKKTKAHLLLHHFVPFAHQHGFLGLLDEQGDEALHSVWGRLEQLWKTMPDSEQMRQQLEHHFVLNWLLDTGRLDELKLREEEQREQAEEDKTNEESDQDADVDIVD

SEQ ID NO: 149692 - protein, 354 aa, Heterodera glycines
MPQPLPLRDMPQIHHPPRNVTSIWIKLWLLFLSLWVFLQGIHVRQIQREYAVPQFADPPPNVPYHPPENVPVMLGLVFRAFLIFPDAFSGNSTNATTAAAERPSYAGILKVLEEARKVDQNITLEDVNTFLEKQRTYTIHKPIKKIFPRLKTIPSGLHTDWQCDLCIFDQLKKHNVKIYSDSGLEFQAGKMKKYFEEKQILKHVMYSPDLHAGVVERANRTIKERLYKYFTQKNTLRWVDVIDKIITNINNSVNRTLGVKPSFVNFTNASEILNNIYGNKKEKIIKPKFKIGNIVRITKDKGKFGKGYYPNFTEELFAISNVLSSNPPSYRIVDMEGDQIKGIFYDQELVKTSV

SEQ ID NO: 149693 - protein, 63 aa, Heterodera glycines
MDQKSRNMDKKWPKYGHKFSKLRVFFIFNFNSPTLPLFILSSMQLKTALVAAPSPKFRSVIGH

SEQ ID NO: 149694 - protein, 97 aa, Heterodera glycines
MHVHNIDGILNINYTGTDDDDNGKAKRRTPIGGDADSTSLFKLALAIAAAIFYSLLSRRPSKDYWLQPTAKETLIRFGVQSTTFPIPHCVEKDKFYQ

SEQ ID NO: 149695 - protein, 16 aa, Heterodera glycines
MKTFFRNTRPAIQPCQ

SEQ ID NO: 149696 - protein, 38 aa, Heterodera glycines
MTESAKGVGKRMMAMKLTGDEALGHPGRFGSISKPVPD

SEQ ID NO: 149697 - protein, 168 aa, Heterodera glycines
MAAVIKAGKGPRPFLPEMCWATWWERFEFFIQLKGVTDVATKRLLLFTEMGQVYEELRRMAQPEDVRTMDLAEIEQLMVERFGEAKSIAACRHELFSAKQQTGQSIRDYSVLLRSLIAKAEWSRDSIDMCLCALFINGISSDEIRVELIKKGDNNLKFKDACRDNAKS

SEQ ID NO: 149698 - protein, 71 aa, Heterodera glycines
KFEVDTINILLLKLCPTWSICLDEHRHDSSLSDRSRPPTFPRPATLRASPISSPSRPLHPAEFDANFLSPR

SEQ ID NO: 149699 - protein, 541 aa, Heterodera glycines
MQCRSCESWQSAKRTKEAEEKHGMLLWVRKCGKWGHWAVGCKSKSSDGNANPGQKPKTVSVIHEVNGVSADTGFIQLLIQNGKLNFELDSCADVTVIDEIDWKSIGKPKLEPSNGLVAYGGKSIGGILGKATLNVRHKGRSIESNIHVISGKHKNICGRDLIMGLKIDLNRAFGISTICAVKTKKDEFGRSKPRPMPFSLRNEVESKICQEEAPDERKVPLHPWESPERPWQRIHIDFCGPFWGSMWLIIIDAKSKWPEVVRMRKTTALATIEALRIVFTAHGLPGQIVSDNGQFSSKEFGDYCKSRGIVHTTIAPYNSKSNGAAERFFQTFKQGMNKLQKEGMKQDIALSQFLLKYRVTPHPATELAPSEILFGRRLRTLLDLVKPTAANDFEAAKVPKESYAERMKRNFDRGANSRKKFEVNQRVYARNYRDGSKWIQGQITRQIGTAMFLVRTARGIWKRHFDQLKENLTDQNSDNSSSESEENSDSEDEVPIEAMDDEQLQPPPEEPQPEQPQQHANAEPRRSTRKRKKPKIFDPSA

SEQ ID NO: 149700 - protein, 52 aa, Heterodera glycines
EIVAYFDAKKIVFKGVDFSGNFRFETNGSLRSFPAPAHRLSLHPAFAALCLC

SEQ ID NO: 149701 - protein, 77 aa, Heterodera glycines
MAPMALDLRYVALHEIGHALGLRHSTYRHSVMNSYYRQNLALLDEQTEEFKLSKDDKAAIWELFGEKCHQKKKRRKS

SEQ ID NO: 149702 - protein, 96 aa, Heterodera glycines
MLNRANDQFLLCFILKIKDEEEYQRNKMRPHEIDQTRPVAEVPRTKKYLENDRAIKNLIEQFDQFGPDQRDDQRWITHLHALSFRLTTKGIDHWLD

SEQ ID NO: 149703 - protein, 83 aa, Heterodera glycines
MIRDVLLGQRWKLSNGPMALGEFFIEQKSTVLLTRVGPLQDHISELLERLFRQFGWLRSRMFYEKQFWETELHEAGFCKLLMN

SEQ ID NO: 149704 - protein, 109 aa, Heterodera glycines
GVGNTIFNFLKLKEYEVDKNERPIYPHKITSAKVLVNPFDDINPRKATKDDERKRSKREKNATNVAMAATKRNTSLLSFGDEIEEEDEQSEHLTKCYINQTLRLLRRRL

SEQ ID NO: 149705 - protein, 141 aa, Heterodera glycines
MKDRCDAEKACRDPNPIIDGRKANVNLAYLGAKPRNNAHLAALSTTINQLPQLQAAQIQAIIQLQQQQQQQQQLSGRFGLGSHLYLQNSPLGPQFAAAATMNPLAAVQLAAVVSQAQPNTLAAVAAQQVEQRHQFLLFDLK

SEQ ID NO: 149706 - protein, 41 aa, Heterodera glycines
MTKYLCDLYTPTFSSARLTPEAFKKSTSCSSAKGICNGFNA

SEQ ID NO: 149707 - protein, 40 aa, Heterodera glycines
MSHEVLTESESYMLVNFVSDVGGQAGLWLGASILTLFEVF

SEQ ID NO: 149708 - protein, 25 aa, Heterodera glycines
MVAQFGGLSLKYVCLRKSSKFPIIQ

SEQ ID NO: 149709 - protein, 55 aa, Heterodera glycines
MDFWASSAGIPTFLGSDRPNFSGSLNFHPCCIIVNDQLIKLWCNWNRGRCTVAVV

SEQ ID NO: 149710 - protein, 119 aa, Heterodera glycines
MALIWDFCANFLSFYVWIEEHEFWVVAVDGSYVKPKRFDSVLIHPGERYDLLIVSQQNPTHNFFRIIFESFDRFMGNFSTGEDRINVGLANLIYEDQIVGNESQKLGNFSNEGNSQISF

SEQ ID NO: 149711 - protein, 114 aa, Heterodera glycines
MEEKSAEIPKWFLNAIFAALVVFAGVFSKEKSKCGQIWKSKGSMSRTDELKGRKAFGKLGTIFSPKAGEELADVAAANLENLLKIGLTLQRDFMPNRSTADTLAAPFNARMHYR

SEQ ID NO: 149712 - protein, 238 aa, Heterodera glycines
MNNNNNVNDGEGGVEANAGGGAVGGGAVAIVGGGAVADVANAGDGAVADVANAGDGAVADGANAGGGAVADGANAGGGAVADGANAGAGGGGDAGGRGGGRGGGGGGRGGGGGGCGGGGRGAGGGGRGGGGGGRGGGGGGRGGGRGGGGGGHGDGGRGGGGRGRGGGSAVRGGGRGGGGHADHSGKRKASAGAKKGWKKAANGRGRDEQKQGGLRGGGGRGGGNDCGGAGRSVTINFF

SEQ ID NO: 149713 - protein, 257 aa, Heterodera glycines
IAKKPLTGSISSTHQISQQFNKNATIQKKLIVTDLPAPPQSLPPPRPPPPLSPVSAHPFHVHLRPSSSPFLPAEAFLLPPPPPPRPPPRTALPPPRPRPPPPRPPSPWPPPPPPRPPPRPPPPPPRPPPPPPRPPPPAPRPPPPQPPPPPPRPPPPPPRPPPRPPASPPNNHQSSPPPAPALAPSATAPPPAFAPSATAPPPALAPSATAPSPLATSATAPSPALATSATAPPPTMATAPPPTAPPPALASTPPSPS

SEQ ID NO: 149714 - protein, 155 aa, Heterodera glycines
MTSSWKACPFRSKGLICRRKLSDDNMCEACGQKAIAPIHTVFVRLLLQDVEQADIAQRVTMFSSVAEEFLGMKAAELLAKEKEPESLAKHLDDLIAVKIIAKVNIKANSQTYTGFDWIVNLFKKCPGKNDSDVPKEKDDDDGDVDEIATKKTKKN

SEQ ID NO: 149715 - protein, 258 aa, Heterodera glycines
MVAAFERLFKRSKYIPWTLLTDQGLEFKAKEVQEYFKNKNVKNFFMYTSPRIHAGMAERANRTIKERRYRYFTERGTQKWVDVIQQIVHGINHSYNSSIKMRPVDVNFENAEKLRKKLKQNAVGGTAELKRKQPLPRFQVGDRVRIEKYKHVFQKGYTGRFTNEVFTVAEVHTDRFPVTYRIRDDDGSLIKGRFYANDLCRVLVRKNDDDDDDTLYDIEKVVRKRKKQGVEYVLVKWKGYSQRHNSWIPASSMTWKNI

SEQ ID NO: 149716 - protein, 68 aa, Heterodera glycines
MPQFVMLEPTDQVILYIVLANFTAVLLSEFPVSFGASNINSQIVTNIQNNSFSPLFIYYQNNNPLYVR

SEQ ID NO: 149717 - protein, 203 aa, Heterodera glycines
MTENFNEQRSTALIQNDLTNELPEDFNEQRSALSENDNLQYDQNEQQPADVNRRADGVLFIVVVIFLNFNCRCSRPSVVPGLPRPNVMALMPPQNLASMPSQNVALMPSQKCCFDAAAKCCIDATAKCCFDAAAKCCIDATAKCCFDAAAKCCIDATAKCCFDAAAKCCFDAAAKCGFNAVAKCGFNAATKCDFNAAASSGNS

SEQ ID NO: 149718 - protein, 39 aa, Heterodera glycines
MSDWIFWGRKISLNWNAVFLKNGHDHLDRFSPSGAIFNF

SEQ ID NO: 149719 - protein, 196 aa, Heterodera glycines
FFNFQHIYSGSNLPNGGQLLPLEWCRTRHFSREAAQTLLDKMKKCTAATLSYVLANLHNVKKPEALRTVEMLKMASIRLGMSPARTMAVAEKLYTRGNTSYPRTETSAYHDEFEFERVLSALERSPTFARIVRQIRSDGKLLPENGTNKGDHPPITPLRSFYKCLYEDAHALYEQIAYHFLATLMRPCKYMLKSVM

SEQ ID NO: 149720 - protein, 113 aa, Heterodera glycines
MIFPKLKEETLAFYLNKFCNFEQRIDDVEEQVRAEIFDPANPRRQCFKCRRVMLTVRAVFNQQMQQHICPSCQFFSGKERLSCFFRLPTSFPESPAIEQMQRFLGVNPANCLI

SEQ ID NO: 149721 - protein, 246 aa, Heterodera glycines
MCFMGSQIHSDATAIDGVAVGCLCHQCRVFSRPGTLANLCDAKRRPEAFGNPSHFGACHEYQRHFHLHSHRIGSTTDIPRDAQKRGESAPFAPGQPKAGEHFAVRAAQIHCVGRAQKHRPDGAGVAIPKNLHPEVQRDLHSVRRHLRLHQFGIALHGRGFEIFAFCLLKFSKKSMPVRGIQHKKSNLRIPLRDWNSIFAGRDPARLILQNPSNFQKMRNCGLRFRAGSRPRAGSNFEEPCTTHPCF

SEQ ID NO: 149722 - protein, 69 aa, Heterodera glycines
MAENEADDGILREFICELDEQFSLIIAVFSTHNYKPSLNLINVDEIEYTDSRYFGVLISWGLPKLPVIK

SEQ ID NO: 149723 - protein, 28 aa, Heterodera glycines
FSYRFSGSFLGLGLVSRFQVKITSRTAL

SEQ ID NO: 149724 - protein, 252 aa, Heterodera glycines
MPSGSAIWQIGLYKKSNNNEFEYECAECSKNIKCKQGNTSNAINHLKSKHKNSEYEAKYEDLLKQKRGEKGTIETHLVLGSEGLSSFDKKVIHWIACTQSSFSDINNPTTIALFMGNNPLHKLKDESIYRKNHFSHSPSSGGAPCAIDDLKEMELSLSGISSTIIQQYCKAILNCYFHYDEVVRVNSAQVIRQTLEQGLVNAWHLGAHTDRHIHRPVDQHSGTGRSNALPRFLGLSAGLARQATYTTTRLGI

SEQ ID NO: 149725 - protein, 50 aa, Heterodera glycines
MCNNLVGRYAHLGTPEKVVEKLVKHVTLLNALHDRGVENNQENGNKYPNF

SEQ ID NO: 149726 - protein, 16 aa, Heterodera glycines
MAWTWLDQEKSKPGSR

SEQ ID NO: 149727 - protein, 264 aa, Heterodera glycines
MAAPQPNTDAETPQPSEDEPPTSEAPARDNDGRPPSTPTPMTPQEMDVPSVEMVDTDVQIPSTPADEDQQIQPMPSTSTARCDLMSTPSTSKCAGAFGLDDVHMFDELRRRHVWTEEELQRQRRSNAFLRKQLKAQRDRSTSLERSASACRQRKALSDVTNNQQGDNRLSAANDLLITLDAGISFKAREALKRSFAGQGHDVWAPTRAVKRLKAELCEAVNFHWTGNGETRALVSVDVRAMIEGRLQDLVNSGFSVQTSNSLRH

SEQ ID NO: 149728 - protein, 89 aa, Heterodera glycines
MEKGRRSFPSPEPLGNFPGDIKSSSDMNNNSNSSSSVNAFGESDQIYVYTVWVTIIQQILSLFGIALNSALVYITIKHKSVTRIVLALF

SEQ ID NO: 149729 - protein, 43 aa, Heterodera glycines
MKLGNSTEVSAFCWPSVLFVMHSLNWPLHWLPFSFFFVCGFLC

SEQ ID NO: 149730 - protein, 129 aa, Heterodera glycines
MVYCEPGDMIQGEVFLVASLIMVIFTLATIVIYIIMGIMLKVIRSDQNNSNNSSQSQIEITRRIFKSLAVIMAVIFCFWFLFALITNILARGLITIEPSLQFLIIRLAAQMVTIAGAINAPILYICRQI

SEQ ID NO: 149731 - protein, 166 aa, Heterodera glycines
MIQGEVYLLVTLIVVIFTLATTVIYIIMAIMLKVIRSDQNNSNNSSQSHIEITRRIFKSLAVIMAVTFCLWFLFALITNILARGLITSDPSLQFLIIRLVMQLTTIAGAINAPVLYFCSSEYHEIMKNEFPLAKFLLCSNNHNSPVVVVAVGQQILGSPNIQANAS

SEQ ID NO: 149732 - protein, 426 aa, Heterodera glycines
VSPRAPTRFETGIRLFSTVPASKVVDFFIALLRHARIADSREDEPTTAYFGDGLGAEHVLVQSFFVWLENTEKRNRKGLPSSTTATPNAPATTAASPSSTAAAAKVRLATSDCDGFRPSQRTPTPPRKGGGRAKQQRHRAVTEEQQHQTQLRWEKGTMVDQQQQTEFANNDEDGKQHKRNEQQQSTHLEAMSDKLRKILCENEQQHDEDGQKQGDEQTQLQKQIEDDTGANDAGNGEEGTVHTAAAAGNSITTLSPQLPCLNRVLITSFHRDQLVTLLAPLSFPPRTHSNIWKTVVSVLELKHAKYLTTFVTIVKEMVHQGQIGFDLLNFCLQHFADKMHFNVHHLVHALLLGPLCAATVEQFAANQSDDFRAQSRALLLEAESWKYDENKWRAASLAYAHRTHEQLPDFKVFCYNVNTLMNELNM

SEQ ID NO: 149733 - protein, 91 aa, Heterodera glycines
MTASTAVNPSTLLPLELIDKCVGSKIWVIMKNEKEIVGTLVGFDDYVNMVMEDVVEYERTPEGKRVTKLDTILLNGNHITMLVPGGEGPEI

SEQ ID NO: 149734 - protein, 166 aa, Heterodera glycines
MRYPDTGDEEAENAAQEDLLISKKKKSKEDQEQQQQQKGGNAWLKSHDPDLPASLSEVENSSSSVIGARRKAEDDTAESGEMGESGQQEEKKQSSRGEESGKKREGGRRKKTKSTTTEEEESEEEEEEEESATPFRPRPSTIIGFRTIQPMGTGQCPEQTVLAPTY

SEQ ID NO: 149735 - protein, 151 aa, Heterodera glycines
MAPHATTTPHADAPSPAPPPDPAASPPQPQRFETAAAYIRRKNRERRTRNLTVAVTELCPVRQDEWTTRFPSVDQPDYQPTSPGGGGLANRRKGSVGGQSEEGRITSIDESLSTKCRRPRATSRRTTGTQLPAVISTHWSATRTCQTTSGN

SEQ ID NO: 149736 - protein, 153 aa, Heterodera glycines
MIGVRALPELRFSRNRVLRPDAQKGDWRRDAGRAEYLKTEELANWLVLCARNRFDTAQQFVERLGRMGNEKGIPIAEPEIVAFNSPDIGYDVNHPGMCYIIFSKELIEILYDHVFLTNHLFFPYVAPMPQQTRRLLASQGESQLSSLDPSCVG

SEQ ID NO: 149737 - protein, 40 aa, Heterodera glycines
DSARRERSSPDSGGGDYYPPEQQQRGGPPPMRAERGNIGE

SEQ ID NO: 149738 - protein, 83 aa, Heterodera glycines
EVFHGDNPLSEPECANLAGFMHQHLPQIDAYLTLHSYSNVLMHGCNHSLITEWQRVGNEMAIAIEKAGGEHFKVGCGDEILCA

SEQ ID NO: 149739 - protein, 42 aa, Heterodera glycines
MPRPGVVCVPGKGHKQIGQTNCQKVAGIARPSRAYEGVQSLK

SEQ ID NO: 149740 - protein, 79 aa, Heterodera glycines
FVLNYLFGQFVYALFRVHKLLPVAASEEKTKKYIQLLIKLINYAHKISSPCAHSRQGLQMESHKYQVGRELNVILSVAS

SEQ ID NO: 149741 - protein, 35 aa, Heterodera glycines
MTTEQLLKGVKMGIELKFGWRGVPSRQMMRAEINF

SEQ ID NO: 149742 - protein, 189 aa, Heterodera glycines
SSDESIVNGPNTSSASMSESNGTADGGTALSPPPQLPRFDEDTQPSDTTTKRRRTRTNFTNWQLNELESAFECSHYPDVYVREALVYVREALAIRLDLLESRVQNRRAKWRKKEHCGHGLAADEQKQQQERVAEGGKTKTMPFSVEALLAASRVPRGRRPNAKYPRVQACKGIAPFMFPAFPITQPVGQ

SEQ ID NO: 149743 - protein, 226 aa, Heterodera glycines
MQGTGAGAACGVPLPGINVHAAWYNNLAKKQSCGNGGGGHGRNVGIYVNGRKVGAGAGGAIGSSIDARRRQSVAQIGTTGTAPTLNDHLQPHQRHGGGRRAISTVNPPAAFPIAIVRESSRCVGVAQFRRHQTESQPLKQQPQIHQNSTETDETVAEECVVDRMPPQQQISTEDSFDTNSSSNENCRICPEEADRKRSGQSIASRMSVWSLRIFSGQWRVSSFFYL

SEQ ID NO: 149744 - protein, 97 aa, Heterodera glycines
MKIRSPRIVAKFITSIQILQFVISVYIFTHIVYIKFTDVLPCDASWNVLSLGGLMYLSYLYLFAQFFYDSYISGKMKKRSLATTSSSNAMTEAKKIE

SEQ ID NO: 149745 - protein, 34 aa, Heterodera glycines
MHSQIHDSVHAEVQCQGPTAPRLFLRIGYGGVEE

SEQ ID NO: 149746 - protein, 148 aa, Heterodera glycines
EDSDELRSAQSSRASTSRQQSQRKETAEKHSQEKQPRGHNEREEHQFPAPPPHFAHPFQFVFTNRQSANTFSLSSGAKVDELSTPEEESVVDEEGIKEGETTGPPKVPPLKLEELSPEGKSPSETDTYNSSLNMDTVLIREEEEELKK

SEQ ID NO: 149747 - protein, 46 aa, Heterodera glycines
KVFKNIKDAMIDCCCYCSLLPFRMENLCSPLFKHSNVWRQRSLTID

SEQ ID NO: 149748 - protein, 30 aa, Heterodera glycines; identical to SEQ ID NO: 141344

SEQ ID NO: 149749 - protein, 99 aa, Heterodera glycines
RATALFLVHEANESDAGAYRCVAKNAHGSTNSACQVSVKAFKEEVKKKEGAEPSFTRGLVDQYIERGDTLVFICAVSGDPAPEIKWFCNGKLLKPSDRS

SEQ ID NO: 149750 - protein, 205 aa, Heterodera glycines
MPELVWYKDGEQVRPSERVQLERDADGTAYLIIPKCTMDDDGVYRVIATNPHGTAYDKCTVTVKKAAAEEGPTKHEGAKEFEAAKAPKLLEPLQNVKCPEGTEFVLRCRFSGEPTPTVKWWAKREGEAVKGLLIMLFPFLQVQGRRPTVSLRANANCGNVAGWLVQVQREKKPKEDLKELAKEFGRAPGFTIPLTVKHAKPGDTV

SEQ ID NO: 149751 - protein, 68 aa, Heterodera glycines
MMKNVIDEQKKSSNIKNNETQEIKMLLSLRKGFDPNRYNVQQTNEVAAIIVCNANEEIPAANIIVVEK

SEQ ID NO: 149752 - protein, 118 aa, Heterodera glycines
MAEMEAQPNVSPKQKYRDLKKKFKYLVYENEYYQEELRNLQRKLLKLSRDKNFLLDRLGQYEQLSESSDDSDASTKTLEERGVTKQKSFWRRDSKEMMRNAIEPIRFASEGGNGPIRK

SEQ ID NO: 149753 - protein, 185 aa, Heterodera glycines
MMQQQSTQAQHSNPSQHLRNTPQSPAATAPPTSSQSQHFQQRPHVAYHQPPQQHYPLQQETNQSQHIRPQPGVRPAHPQQHPTEQQYPSMAGPLFQSQPSSVQALQEHEIGNVGQPRLAQHGHTHISHQQQVMMGQRHATHHPSQQQTLISQQQSQHPQQQHPTTAIRIEQSGKCSETHQILFTC

SEQ ID NO: 149754 - protein, 103 aa, Heterodera glycines
VHRVPMPLLHATASRTDLAIPFPIPRHYESAGPSETPCGQKAGVRIWPTAYVNGHFFDRSYPMECASNGICGGGGCCGPACQPAPVACNPASCQPGYTCGTVQ

SEQ ID NO: 149755 - protein, 132 aa, Heterodera glycines
MAKRQISLLKIEEIYEQMGNVYHAVNLNELEWVNQFFEKGVSIRIEYMDRSQAPSGGWHHDFLVEGDNQPKLFFLYRPGHYDILYRRGSSNIRSKLIIYGVQPRRHEGLLEFHEKPGGPGKVPDSDFWNPRP

SEQ ID NO: 149756 - protein, 36 aa, Heterodera glycines
QIKSNHNSILHISHIYYDSVISSTVQLTLLLEKNKF

SEQ ID NO: 149757 - protein, 182 aa, Heterodera glycines
MSNLTFLNDASVLHNLRARYGAMLIYFAVSDEAYRNMLQNAENQSMLITGESGAGKTENTKKIQSGFLPDLKKQLLLDLPAKDYWFIAQAELTIDGVNDTEEHQLTHEAFKVLNFTDSETQDVYRLVAGIMHMEAEKTARMYGANPEEFMKALLKPRVKVGTEWVSKGQNQEQARQPNGIGI

SEQ ID NO: 149758 - protein, 300 aa, Heterodera glycines
MGKTKNFYSSQKKIKKIKFKIFVTYFEPIKFVLYILFTFIINNASAKCTSTEGLKNYGINAIENNGGKKMIASFSEQTMDWALAKGCEMAEKLWEKAKLGTKTANECVGEEMGQKMMEMCAGGTSKAKEIAQNWGKSALIATGQCVLAQMQTEEEQIQEEQNAEGMAKLAEFDASFKECAKALAPEQKAKSGIDKLLEAKANQQLKPSDLVQMLLDEAIFEHEIFQKFAESFNGGKQKNFVHRRRKRKNRGKAKKEFGYDTYIKLIFFLAITGQISTLAFLLLLFLLPDPVVVPTKAKEN

SEQ ID NO: 149759 - protein, 75 aa, Heterodera glycines
QLHFFTKNDQILAVLRQKTCKNSGNVGPAVPIGAAGKNFWKFECYLLRNLPIKLFNFRLGGGEFEKNFHYLLENF

SEQ ID NO: 149760 - protein, 120 aa, Heterodera glycines
NKKVESMTWVIEDKRCVYLTLEKINQMHWWNKLIEGDPEIDTQKVQPENSKLSDLDGEDLDGETRSMVEKMMYDQRQKELGLPTSEEKKKQDILKKFMEQHPEMFMEQHPEMDFSKAKFS

SEQ ID NO: 149761 - protein, 66 aa, Heterodera glycines
MPSARRRTAIRICGQYAALLMRTPMDDQRTGGGAGNYFGFFGLKNPSPTHLQLQSVNKNYFCSIFG

SEQ ID NO: 149762 - protein, 296 aa, Heterodera glycines
LTKCQTRRFSSSASPTIAERSVRRATAPVHSVQPTMAPQIEHQQQQQPFVLLPDRPAIRLDSRLVCKYEVLSVVGKGSFSQVLRVQDRISKRFYAVKLVSTEQDFGAVNNELSILSRVQHPFVIRLEEVFRSATKLFIVMEMASGGEMYDRVVAKGRYSESEARMAIKMLLTGLEYLHSMHITHRDLMHITHRDLKPENLLYSDTRQEARLLITDFGLAHQSRSPDHQSRSPDEKMTDTCGTPEYIAPEILLRVPYSNRVDLWAVGVIGQFISRIVDIDHHFYHQSNCHFFDLIIY

SEQ ID NO: 149763 - protein, 54 aa, Heterodera glycines
FSKRIFNFRIRKIIIKKFRIEKIKPAQKVWDQKDLNLQKKKLNFLHLSLLVTGG

SEQ ID NO: 149764 - protein, 182 aa, Heterodera glycines
MPSGEGPRNVHKFDFGFKEHQRIGITNADKFCLFYALVASKFYLEVHRNIFNRFMNNIMRQRDAAIELLHNCGIDINEYSYGVEQLPNVQKYWDEIYPGKYRVVAFEKSADPRKSIRVLWKGPMGRENVVPLFLENGHWDGLKNFVCFFNRGRKFCIDCECFYDKDVKHAMECRARCYYCNK

SEQ ID NO: 149765 - protein, 35 aa, Heterodera glycines
DHFLKKKMPGRSTGKADKSTDERMIFVDITLFIGA

SEQ ID NO: 149766 - protein, 262 aa, Heterodera glycines
IQEFYDNTLLNERVPLDMKTTETRKLAERWEQTKDGWHTQEYRTQTVDGPSGFQTETVTNNGLIDDQGKAWEVEDVVLEKNQLGLVSLHLSTMSTVLASFCRVSPFLAAMTTVPALISVSLTLRLGYFPFPIASANSAYALKGGVARDGRIRIGDVILKVNNTDTVDVPHQLIKRPKTSQASAFRPSSAEPLSRGSPPEGFGFGPPPPVPTHQQSFGESEAVKELEQMPGVRRMDLIKVESDGIHKGLGFSIAGGTGNQHYP

SEQ ID NO: 149767 - protein, 21 aa, Heterodera glycines
MPCRKPKLHFILSFIIWLYFI

SEQ ID NO: 149768 - protein, 204 aa, Heterodera glycines
MVIENQSYGNKSIYFISSYIDHSVIAFLRSNHQIFDKRGTNLYLWIPSSHSTNGQPILDIFGREIWPIFSANIRHLGFPHGDHLDNLRSLISPTILTDLNQLISIYSGDLSPAAFGDDFDGPNSTISAGKILSKWLHSPRKDGQPKRLHCEDIKEQTNTDWINNFKEKSEFSAIPGVAIIRPKRLRCVDYNKQTDLDWVNNFKE

SEQ ID NO: 149769 - protein, 116 aa, Heterodera glycines
MCASGNPSVKQSVGYGQSAKSKHSTGSTAGGGLSVPAPNNRKKTPNQQQQQKGNSEGGGEGRENGGKREEKGGEKGAAAEAEEKEKKIAAEHHQKQQQQKQEVQAVQQQQQKQILV

SEQ ID NO: 149770 - protein, 48 aa, Heterodera glycines
MNRRWICNDVWMDIFPSFDRPQLGLKLALLSPRFKCGWWTNISMAKAN

SEQ ID NO: 149771 - protein, 85 aa, Heterodera glycines
MAKAENRKLKNGIEKMQEKFDKKEEQLEKNLEELQKKLVEMDHQQKEQQKSIDQMEKTNADAEKENDDNMKNKKSLRKMSWHKLM

SEQ ID NO: 149772 - protein, 102 aa, Heterodera glycines
MALIRPKPKRVRRRTADGGTAPTGVTDDGAVGSGGQAAQQHSHKKPNPWGEESYSDLIARALGCAIDGRLKLSEIYQWFSDNIPYFAHRSSQEDAQGWKVKA

SEQ ID NO: 149773 - protein, 378 aa, Heterodera glycines
EDEDDADSFPGELEPRGRCYTWPVPQFGAVSTAQQSPLSSLHPPPPNHHHLHHHHLFSGAPNSATTSATSSKSSLSSIIGCGGAGTACSSSSCSLLTGVEQQQPCTSSSHHSPFSALSIGSTTTASASFSSSTTVVVAVLLRCGGQAAQQHSHKKPNPWGEESYSDLIARALGCAIDGRLKLSEIYQWFSDNIPYFAHRSSQEDAQGWKNSIRHNLSLHSRFMRIQNEGAGKSSWWVINPDAKPGRNPRRRANTMEAATKAVIDKKRRGARKRVETRPTEGQQRRLFRLHGLHSQRSVGRHVPLGQRRAQRATATATSEYRPRAESTLSVVGGPASCSLSPPNESSMEFPLWMDQLQQQQVSELLDRTDQMRLEATTR

SEQ ID NO: 149774 - protein, 119 aa, Heterodera glycines
MNSMVLDNKIGEGEEVPNLNVIREDDPVNEFLGFLHYDQKLGHHIAKAYNETVFCAAKNQIAKRVVDQILQLTFSLAIRIMLCVIIFPFQIIRIDAQTKEHFWDEIKANSAREPQFIGG

SEQ ID NO: 149775 - protein, 24 aa, Heterodera glycines
SKSSLTTAQKNMVFVRFRPRGAQE

SEQ ID NO: 149776 - protein, 287 aa, Heterodera glycines
MPFQKPRGVKEDPNQTPPNFIRPLRDKRALIGQNIVLECQIEAHPDPVVKWLKDGHNVSQCPDYKMEEEGKTYRLLIRKAQAADCGRFTVQAMNAAGIKQSTCMLIVAQAPTPVPGGMTSITSSPAPPQTPVGPSAPLFLKELKHQPMKPSEAAVLEARVVGVPLPQIDNTHSFLSRIKTEYDARSGICVLTVPQLFTEDLGEYTCRATNATGKAESRAHIMPQEQYDRWFADEKRMVTRERKQRLVAAQRAKTQPQQQQSQYQPQQQQYRVIKDKRKGLRRGGTAD

SEQ ID NO: 149777 - protein, 52 aa, Heterodera glycines
MYLDFTNFSHYVLGNWHPCTWKKLRTRVEEIQFVFDNFSFISVQNKVVKIAV

SEQ ID NO: 149778 - protein, 235 aa, Heterodera glycines
MSDFEIGMLKAMRHVFPSCERSGCSFHMAQAVFRKARSMGIFNLLNEDDDEAPVQRKSVHKTFSISQASIMTGSGPIQFGLHSPQPSTPTIPLSEESSLQLIPRWEQDIVCPPRFPISFWNVYTRAQMAIERTNNGMEAAHGQFACELNHHPSLSDFIAAIIKDIDKQLDIGRAERLQKSTKRRQRYIIKEQNVVRILDEADFESEEGLTNALYLIGLVMQGFVEGLHVRGNEDS

SEQ ID NO: 149779 - protein, 114 aa, Heterodera glycines
MSTNECFVDLSRRIISHLISKGSDQKFCNWHCGGAATVAEVAKTVLNEEHRLFLSGIRRGLLTFLHSQRQLFVLSNGTLSLRFWHSDYQRFEKEIGREKLRTFQCLFHQNHPDG

SEQ ID NO: 149780 - protein, 22 aa, Heterodera glycines
VEVTKVRMSDDQKGRVISVRNK

SEQ ID NO: 149781 - protein, 31 aa, Heterodera glycines
MHSAGGVQSGRKGKCICWDETFKKRTNDSFA

SEQ ID NO: 149782 - protein, 331 aa, Heterodera glycines
MAYSLSLQPWPSSASASSVLSVFVFVLLFARCCSQSADASSSSFSLRGFACAKKDAAVHGGTFTVVGEKRLRVDPSQLTTNEGNAKIDALRLDDAADKRLVMSVLFPNGGGINCKTSFLSRVQMPTGCAVDERAVALEGRAGQDRFGENCGQGKCAFLNVTCNLLQMTPVDGLPNARHFTMSLWKNISDDDDDLVQCGWKAFIVRVISDDVVVLLNKAESGPELLVEQCWQKGGGILNLKDLLFYGLLGGGLLILATVLTIVIVLVVRRQRKSASHTVAGDDDIIDDKREKKKMERPAAATRIVVHSCRMGQPAAGGNLSQMSHEGDSDTI

SEQ ID NO: 149783 - protein, 312 aa, Heterodera glycines
QDSDFDDVNEIMVTLTKEERNEIKANHKIYDTELAKNKKKYEQVDGKKNKEDAPGLCTDLRKRESKLKGASKYAIVIINLCETNREQTFAPFSKKGKKEAALYTPATIKKDADLLKAFIKDASNNFDDVWTRNNEFINDMDGKDRVVRMLTEDNYERLRCVLVYYNHQHGNVIDDLDRTITEEIKKKKIPADALALLRLARLVFIDALYGRPFLLALLLHEKLERLYWSASEQWPKGQKTPNDKVNELSDAFNDASRLFILHAPVQLWEISKVYSDAIKKFKKSEVKLVDRLMEIKMVFEKKKKIDEAFVIS

SEQ ID NO: 149784 - protein, 186 aa, Heterodera glycines
MDNHRRKRFTNFSIDHILSEPKKPRQGFLINEHGIVHFHDSVQQAEGASKVAKDYVKKLEKNIEHMAKFHYVKVKSKFIITDLPSTPEAMWTWTFKHYIEEAFADSRERNIEPTHLGCMISSPLLKGGDISTPIQQMTNNTLDSILYQYKKVTQNNQLKDVTLWREPFTITITTVDRNGLGLSKKK

SEQ ID NO: 149785 - protein, 208 aa, Heterodera glycines
MKRPNPLNLPTSEKKPKLRRLLPAELNNEQISFVPLVCLFANVKRTPIGPKGVIAVFDVMFEEKRTPKKKKVWRLHLQEELPHELSRNELLHYLSYGRLGTNLFETYFVMSQATNSIAIGNLFGLLLDFAMSSPTPWLMKRPICCGIFFRQHLPWILQQPMNVMLSHGFFPEVRSDGFEFFWLFNPHLKKYAGNDDTMTDGIFWAKLS

SEQ ID NO: 149786 - protein, 105 aa, Heterodera glycines
MSQATNSIAIGNLFGLLLDFAMSSPTPWLMKRPICCGIFFRQHLPWILQQPMNVMLSHDIFPEVRGDGFEFFWLFNPHLKKYAGYVRILPELSQPDNLHFFFSIF

SEQ ID NO: 149787 - protein, 52 aa, Heterodera glycines
MEMTRDGTKLKMSACDVDNVYQHWTFKEYNEAKAREYAMIRGGGTDKNGGGL

SEQ ID NO: 149788 - protein, 93 aa, Heterodera glycines
MLKTVVGIVRETLDSEWAEIDEMAPAPKNEKSPEGEGKEWHDDAANRCWHITKDGIEKLKAMKLYELLYEHILEKHFDNSNDTTSNRQLVAQQ

SEQ ID NO: 149789 - protein, 65 aa, Heterodera glycines
FAKSQKFWLSFKKVMARRNSKTQQFELFFALIFLCINKKFLKICTILAFFQCFRIIPRMINLDEK

SEQ ID NO: 149790 - protein, 165 aa, Heterodera glycines
MHLDLKPQNLLYVKKENGEDSVMKAIDFGTAQFIVEEEDSPEHHKLCNWGYMLHNERSMRLSSKTDIWAFGIIAYEMAYFGLNFGPKLEGGEQQKICAVTNNKIEHNKFVAWLWTIFSAERDDVLFGKKVVQRMGTQFIFAKIIQFIRFNSQFQMLINMTRNYMD

SEQ ID NO: 149791 - protein, 76 aa, Heterodera glycines
ELKFNYFINEFIKKNIFILQSPEHHKLCNWGYMLHNERSMRLSSKTDIWAFGIIAYEMAYFGLNFGPKLEGGEQQK

SEQ ID NO: 149792 - protein, 31 aa, Heterodera glycines
WHPHKVSKPRNVQKSKNPRNVQNFSKFIKTK

SEQ ID NO: 149793 - protein, 118 aa, Heterodera glycines
MSKEEIVPKQQKLPMGQCHCGQSNLSEMNEALEMTNLVDNATIKLKLQKEEKPIGEGSFSEHAVLYAIGARPYNKCVALKRTYIDWETSDWQKHVKEWKIQKAFDALPKNERVIKLIA

SEQ ID NO: 149794 - protein, 232 aa, Heterodera glycines
MDFANCSFGGANVLPRWMPKCRHIGRISIINCGLRSALQLAHIGSAVQIRAKHNQIGDLHRVAFECTRLTELDLSANEFVRKILKKLYWSLKTSNLTKLQLSYLYFMTQIAKIGAHTLARCHFLRFLDLSDNPMGELPDKLFQGCRRLKDLRLDRLGLRSVRAELFLGLNALKSLSLSGNPLSRIDPFTFLPARSIRALRLDNCTLAQMPLAVTQCCLLDRCFFLFCFSRQN

SEQ ID NO: 149795 - protein, 165 aa, Heterodera glycines
MPAPLLALLPRLSHFSFANNPLLQLPLALFLYEHNRAEEALLEDIVDTLTFCRELREHNGCEATRRLRSVRADGKNAVGIRCDSATPSKATEKEATKNLGFNWHQNNANKKPNVKNQATSVGPSAFAYGPNGTDTVILGSDLLSTNACQTAYSVLPMGGSANIIF

SEQ ID NO: 149796 - protein, 28 aa, Heterodera glycines
MNNFVSFSTLLLLIGGFMSFGDVDGMYN

SEQ ID NO: 149797 - protein, 81 aa, Heterodera glycines
MDKVLMRWINANCNSSSSKTSDFYSGICVFRQFILVPICPYGRLILVITVRGLGVSLAGIIRQFQPASRKPRGYRMRLKII

SEQ ID NO: 149798 - protein, 40 aa, Heterodera glycines
RFAPVSNFCCAFRPLRGLERALRARFLNFVGLIRALRARF

SEQ ID NO: 149799 - protein, 282 aa, Heterodera glycines
SSFNQYCTSSNHFCIFYHFCTSLNHICTSSNHCSSSFNHCCASFNHYCTSFNHSCTSFNHSCTSFNHCCTSSTSSNHRCTSSDQCCTSSNHFCTSSNRCCTSSNHCCTTSNHCCTSSNHSSNRCCTSSNRCCTSSNHSSNRCCTSSNRCCTSSNHCCTTSNHCCTSSNHSSNRCCTSSNRCCTSSNRCCTSSNRCCSSNHCCTSSNHSSNRCCTSSNRCCTSSNHCCTSSNHSSSCCTSKFKKRARSARMSSTNLKNGREAPVQGQQKLKNRAKRSTEAVKR

SEQ ID NO: 149800 - protein, 50 aa, Heterodera glycines
LITFVPLLITSCTSSNHCSSSFNQYCTSSNHFCIFYHFCTSLNHICTSSN

SEQ ID NO: 149801 - protein, 95 aa, Heterodera glycines
MECVEVQILLFGKAREMAECQEIRQILPKSLTSTELYNHIFDKIFPALMPIRNSCILAVNHRYCFEGRDALGGTENRIELEENSEIAIIPPISGG

SEQ ID NO: 149802 - protein, 108 aa, Heterodera glycines
MALLGGSPPHCRDHWTKESPSPSVKGQGEPEGPVFRGRRNVMPEGTECGRKWDKGPERTSKGGARSSVDGVPKKKPNLIAFEVQMRIQLAAAGVLGKLISRFPINAFH

SEQ ID NO: 149803 - protein, 56 aa, Heterodera glycines
MAESGCRDRSHLTLDLKGLKPTPNNDSGLSPIYTAMPLSPEKIQCKYDYAVLCFYV

SEQ ID NO: 149804 - protein, 175 aa, Heterodera glycines
MNLDRVFVNDRSNDNEQNLEYAYVFDNDYEVVESSYDILEEHNYSKRSRMDVVGGESQVSLNSDIGIAGPSRMSDSQFEERRRTEYLKRKRERERMRRENESQNQRVLRLEQMRDRNNSQRTEENANERRLRLEQMRNRNNSQRTEENANERRLRLEQMRNRNNSQRSEENANER

SEQ ID NO: 149805 - protein, 71 aa, Heterodera glycines
IEARTDSFKQTAETGQRLLDEDIDESDEIRQCLQNLAMEQTSLNNLWEERRILYEQCMDLQLFYRDTEQAE

SEQ ID NO: 149806 - protein, 242 aa, Heterodera glycines
ANATLKKWREEHARRSEEVVEIWEFVLSRYAAALKGELWAVLEQVTIAALDQARHDLAIECLQQLHRRFPKSTRVTKLQAMRLEAIGNYAMRLEAIGNYEDAEELYRRLIEGDDTNPLFRKRCIAILIARGDRQLAIRELNKYLEIFANDSEAWLQQGELFLQEADFGRAAFCFEELLLSNPQNPTYLLKMAPQNPTYLLKMAEIRYTLGGPDNVEIARAYYERSLALAPKIKRNFGILQRH

SEQ ID NO: 149807 - protein, 104 aa, Heterodera glycines
DGDAGQLVRSLKDQTPFGLTGAVFSQDKDFLYEAKDILRDAVGNLYLNDKCTGSVVGQQPFGGARQSGTNDKAGGPHYVLRWTSAQVIKESFGPLTEWRYPHMD

SEQ ID NO: 149808 - protein, 60 aa, Heterodera glycines
MIACFSAAVAALSAFTLFSLVSGEFSLALSAVESGGGGMPREGAKRPPSDAPHCQGQPKN

SEQ ID NO: 149809 - protein, 51 aa, Heterodera glycines
PKSVCCMFADKSASLTVSPALTCAAHASFSVLAGAVARTAASIPHVAWRSP

SEQ ID NO: 149810 - protein, 52 aa, Heterodera glycines
FFQSVCCMFADKSASLTVSPALTCAAHASFSVLAGAVARTAASIPHVAWRSP

SEQ ID NO: 149811 - protein, 90 aa, Heterodera glycines
MTELCQLLKSEIRRLETKMDYGFNELGKKISGLETKIGGLETRIDGLETRIDGLETKIGGLETKIDGMETKIGGMQTKIDGMDMKMNQFE

SEQ ID NO: 149812 - protein, 144 aa, Heterodera glycines
MGIIDGDGACPQQGCKKKVSMEGNQYRCEKCANTFDTYKNIMMLQVELADFSGETWATIFEDKAEALLGVKADQMAQWQREDPARFDSAFNVIRFHEFLFRVGVKYEMYNDKSRLKWSVFNIQPVPLAKCKAFFEQSVQKLEGI

SEQ ID NO: 149813 - protein, 230 aa, Heterodera glycines
SGGSSKGNGPALNAAFASLQCFSGDQLVRTARGPVRMDQLRIGDLVLSMDESLLSFSPVLMFLHRKPSESALFMRIFTEFGHQLQLTALHLIWVARGDRLIRANELRPGQCVYVTRQRGLIGPNQVMALKVRGHGIYAPLTANGNILVNGVLASCHANLAAQTLQQTFFNWWRPEGIWPQFSLRRFRPGGEDLPMGVHFLVTVLDTLEDLPMGVHFLVTVLDTLMPESIL

SEQ ID NO: 149814 - protein, 315 aa, Heterodera glycines
MKSHLFLLITLNILAQIFTPYKCMDRKGKKRVERTYSKGSFEDERDKEFYFRDDSYGIEPYRINVAPEGFRGTIQAMTASKDDPVREQLSQEMRWNSTFQQLPPNQQKEMYNLVKNGPNSASSSRSPQPFQSSNQFPSNQFGSGTVPLGKAYLGQQPLVASGSSSRPLQSSGTFLRPNPSRTSVAKPSFIVPKSTSSNAFTSSSQFNSRFNSSGTFLVPQNPSSNAFANSSQLNARLNALNSFKMPQNASLNALDNSSQFNSGLNPSNSFNAPQNPSSNDFASSSSYHSLFEFEYPQVDTLESLLFGCKKHKTDN

SEQ ID NO: 149815 - protein, 328 aa, Heterodera glycines
VQAVQRRAQEIGASVPTDHTIKNRTCAIRKKMRNKQKKDEEEAQQKLQSEQIVPIPQHEQIQQQPSTFQTPTDWRNSPTDDEDEIEILGCYEIERTNISTEVEGNNEQNSDNNNIITTNCELVHSTNNENNQEDAEKESYEENTVVDVAEETVAKSMDQLEEGIEVGTVVNEEMAQNVPEEPMASVQLAKRSKPFNQRIVENIGWRKEFGRVPPKERDSLGLIECIDGATFRSRNACGNKKSEVSLQIDEFDEFYKRWISNYEQEGAGKSHGEENSEHDGKEESESGDEEEEPPQNSRGPVIKCPRMPKIRINLKRRISTISIEKAKE

SEQ ID NO: 149816 - protein, 456 aa, Heterodera glycines
LRKQCIRGHLRNSHLRSIVWRLLLGVLPMEDRTQWVEVIGQERRNYTELRHRIESNPRINNSPEDFDGNNPLSLSAESPWCRHFENQSTRKNIEKDVDRTSAESPWCRHFENQSTRKNIEKDVDRTCPDLKFFCPDLKFFQIDDVKQTMVNVLFFYSKLNSQISYIQGMHELLGPILFVLDSDGMHELLGPILFVLDSDQKAFQDMKEQDILSHCHCLVVLNDPVFLEHDAFALFTRLMSLIRALFTRLMSLIRCFFTKESHSQKGIFYVLNSIPICFFTKESHSQKGIFYVLNSIPICFLKFAGKSSELLRRLDYICNGLLLEVDPPLHHHLSNLDILPQIYGVRWLRLLFGREFSLPDRWLRLLFGREFSLPDLLYLWDVIFAECHQQQSLEIIDCIFVALLVQIRNVLLNGDYSACIHCLMRYPPIVDSTSFLLMSTVLSSPLRHPPHILTLF

SEQ ID NO: 149817 - protein, 111 aa, Heterodera glycines
MTQTHLVLGSPRESLSTGLYASYQRDSDNAERQFRAALKLKGPNDDAELSTLANLGLALIFLSSGREAQFYELFDSLSPSRIPSQANSLRSAAHLIHGFHYFLHARHNECK

SEQ ID NO: 149818 - protein, 103 aa, Heterodera glycines
MKEKEEEEKKRREGKEKETEKKKEEMKQKDETETKRSLSVGTTKDDEISIVDSEERERDAFEYPPKPTNERMAFWESTLNNEAKKDLREDKEKALKTQAKLLS

SEQ ID NO: 149819 - protein, 94 aa, Heterodera glycines
AFASSPVNFIVVISFPLHFAFSVVPFDLINEFTREQLALKIIDNNRRFLLIRCPIARDESKWTKWEEEAIGWRIYNQWSSIEIRIYDEDEIGDG

SEQ ID NO: 149820 - protein, 58 aa, Heterodera glycines
MEPAKAPWDGRSECTRRRWQRLSASGRQAVRARAWAHRRCRVIVVELAPSVRVAVASD

SEQ ID NO: 149821 - protein, 55 aa, Heterodera glycines
MRPIKTLTKSERKEETDRERENAKRQREIDRASERDNYFCRVWVDGAPGKNASNK

SEQ ID NO: 149822 - protein, 211 aa, Heterodera glycines
MQKPIIVNIIALANLGTGIKLNSLTITECEFKYNPRKFNAAVIKCTTPINATALLWESGKMICLGTKSLIDCENAIKKFIEIIKGSGCPGASYTGHTVENIVSTFKFGHEIELNEFRKNRRAFYEPEIFCGLNFKRGKSRTALIFWTDSARELTPFFSINHIFFIHFLSRSHELYYFLNLYRVNLIKDLNNINFLRFYTASETFKSILNAN

SEQ ID NO: 149823 - protein, 98 aa, Heterodera glycines
MGVRQKQRYSPSLTNPGELFLNRDDPFEIVTAELLHAQMAEPTVPLSRKSKIGAEKIDRWRIGRSSSRTLAEQWDMGMGETSKNGRKRRKNEAKGRHF

SEQ ID NO: 149824 - protein, 102 aa, Heterodera glycines
MTAHIVDKHPQYAAKLLAKQLEFDGGSCHLQQIAKVEGTEETECPTSTTPKCPTPANTDANLTTRTTPTAPTNYSPSTELDSNRRMGRDDDKWVTENGAGFA

SEQ ID NO: 149825 - protein, 15 aa, Heterodera glycines
QLQHGKNSLALVLRE

SEQ ID NO: 149826 - protein, 221 aa, Heterodera glycines
MKFCILLFLFLIALIIPIESEKKKLQQKSFDEIFGEKWQEKEEERRNELKKREIIAKFYKIKEKIKQKGRKYSTKEWSKINTKIAKSLGTNRNKIYKWIKEIGLYKYHKSKTDEQKREIVQKFIVMKNEFKQNRKYSQKEWEKNYAEICKKIGVGRETLRKWKKQFGMNKFITKKEKMEKMKKYWQTKKENPKMSEREIAKTLQIDRKSISRWKNQFGEEI

SEQ ID NO: 149827 - protein, 36 aa, Heterodera glycines
MLIKALTATKTQDTVDRGLISDFVILQSTAVLNLLS

SEQ ID NO: 149828 - protein, 116 aa, Heterodera glycines
MAFNALDFGFDFLDGIAWKGITEWAHKRNKYPFSIFSSIKNQFTNQSIDSKGKWNESKKNRREDIVKYRAWHFFQISQIKNSANLSALTAAKTQDDKVKDVPISDVVILQSTAVLK

SEQ ID NO: 149829 - protein, 128 aa, Heterodera glycines
MQIRIKTLTGKTLTLRDVLPSNTIEEIKAKIERIGGHPRGEQILIFGGQLLEDGRTLKYYNIRDGDIFHLVVLRFCGMQIFVKTMTGKTLTLRDALPSNTIEEIKAKIERIEGHPPDQQRLLFAGLIF

SEQ ID NO: 149830 - protein, 254 aa, Heterodera glycines
MEMREQVHKKIMEEFNAETGKGNADFYLQKMEAQRQHNNENSQPEPWRDMPNSTQFLAQLFEKDAKDGLPFSLDLLLYKPSVEVRQVLVGSADEVPRNVPKPAKGKATEAAAFKLPYVRAMERGKTEPILAESLNDQTLAKLRELVKPMMVELNKTEQAKAHHKEPVQVVDCAQSPEKCKQMFFVSETDMLKAIHTALLDEVISSGGDEINGDRFAALRKFVELLIQRFPKKTFERNPQLSAHPKGTALSSIGK

SEQ ID NO: 149831 - protein, 135 aa, Heterodera glycines
MALVLLPSGLRIGMAICAILLCCSLPNSTEAALAEVGQQPKGNNPLLYSVDDPIVHLDADTFEDTVLRPNRDRAYIVEFYKDWSVRHRVFGHRGTVETEQNSSSNRTITPRGRARALPEKKWDMPKLTIFSVEML

SEQ ID NO: 149832 - protein, 47 aa, Heterodera glycines
MLLIRSVNPQSLLSLLSFRLCRPSVASLTFIHRFSKWAATKSPPRGG

SEQ ID NO: 149833 - protein, 478 aa, Heterodera glycines
SHNLFVHILPSPKNTDPMASAALGFSNFVNGALIFVNGALIRHPFVVLRRQCQVHDHATRKHLTPISLLPVVVNLAGKDGTFSLWKGAIGSGVLWVVSHASEFLIAQLFNLPKSFVPEGSSERLIAQLFNLPKSFVPEGSSERFWRHVFLKTASFFACTPASFFACTPFIVSSFIETVRPSWSGHSPPILFRAIIKSLSAPPYIFGTGVEGRRRHPLFLLAMPTAIYHTAHFLLYRSVYSFAYSCTRAYVSRKLSRKLPSERKRYHSIMPELFSTMTSMFVADLVCYPLETVLHRLYIQGTRTLVDNLDHGQSSLVPVLATRTLVDNLDHGQSSLVPVLAGAYSGVVDCFIKIVRKEGALALYSGIGALFLQYLLQHGVALGIGALFLQYLLQHGVALAVYWVLDKGFVLRVSFFLTMQKMTSAGGTAAVTCPQSLRPCVRKKTFCVPTAPLSTHSPKKHSRPPREPTWYPPFDENFF

SEQ ID NO: 149834 - protein, 350 aa, Heterodera glycines
ILHDLHSIASFGSANSGSFRKRNVRVGDNLCMDWWLVPDTMNGQGYPRRVEKRRQHRGVVHAQGDQISPSFYISNTNEDAVNLEVELGEPNAVITFDNAEQQTLNEAEVSDFVTHTTQGTVGDAQFVVAQHVQTSQTMTKLELLEPWVKKNTTTPSASETTTKVRRSATDEAFVAMSSNNALTQMMRREKRKLLGNVDVQNPLAFVIPATLREKGGEDIVLYDSRNVRQGEKDVVLIFGSVKTLDILRQCGTWHLDGTFKCAPAMWEQFFVIGASVNQKMCICMWCLLPGKQRRYYEEALNFLRERISPEVPSKVLYDFEKAESALGTTISTINSEHSYAASPIFIDGIY

SEQ ID NO: 149835 - protein, 116 aa, Heterodera glycines
MNQWILFFLIVLFLIIQIEIGAEKKKFEQKTFDEIFGEKWEEKENEQKKREIIHKFYKIKEKIKQKERKYSAKVWSKINSKIAKKLGTNRQYIYKWIKELGIYKWHNKSETDETKI

SEQ ID NO: 149836 - protein, 163 aa, Heterodera glycines
MESFNERPIIFALSNPTSKSECTAQAAYKGTNGSALFASGSPFAPVKFDDGRTFSPGQCNNSYIFPGVALGIILFQIAHIPDKLFLIAAVQLAEFVTDDELSSGNLFPSMNKICEISIQIAVAIAEECYKDGLARLYPEPADKELFVRSQVYSTDYEELIPKM

SEQ ID NO: 149837 - protein, 217 aa, Heterodera glycines
MERSEPKQQQISLRELYKTEPSGPNAGKGHSQLKDNRTNKGLAHSMAERQLFGLDGLMPQGVNPLLAMRAFILSTDTQSVEISVGKLSLYVALGGVQPKWCLPIQLDVGTDNETLLNDANYAGLRQRRVRGEQYDQFIDNFMVACCKKFGHKILVQFEDFGKNNADRLLKRYQDRYCTFNDDIQGTASVSVAGLLAAVRITGRKISESKFLFHGAGT

SEQ ID NO: 149838 - protein, 141 aa, Heterodera glycines
MRLNVLLAILAPLLLLIATATLCGATGKEAAANKIGVAAVALSEADNSTTPAPPPPPSPGGSDDKKKDDDDKKPDEDPAKKGNGTDTGDDGKKTDEAGGAFGAGSIFVAILFGMALMFGLIKMYVHWEKRRESDPPNYQMY

SEQ ID NO: 149839 - protein, 269 aa, Heterodera glycines
MANFGTENAKHFTAIKEQTKQICATEKTQKFDIQKLTNAITAAFEKEGAKLVEAMKKGEHTVTVTVDGAYGTLTELLPKSMEFRPYWTGINMLCLMNEQMDNGPGKKVIAKFLNATTVTGDGSAIANTVMPSDLMKIMIELWHILFHNVTGMGKIGGPKFLNQSFGQGAKSDRQEIPKRRNSDQIIVHGQQFGRAIPAISGHPLRRRRRRNLNITARQMANLFHALTVVVLALNLLRVVLRNMADQLDQPPIFMMVALAATIRYFMTMD

SEQ ID NO: 149840 - protein, 132 aa, Heterodera glycines
MMDNPPPPFRNRTPPVRFNNSGASFVQEYDSANREKMKDEEKGKGKSTAQKAEERTARPKKHNGQDDDVNEGTMAKIWKIFAPKQQLKKREETVPTHDKVPKNDNSSKSVVDDNNVPMPIDCANCAIRLGGN

SEQ ID NO: 149841 - protein, 73 aa, Heterodera glycines
MRKHTSDLRVAIKKCGNTSVARLEQSRQEDDDFQQQLSSVRSAQPSRFCEEQKNGTESEIGGRSAFIELSDTP

SEQ ID NO: 149842 - protein, 279 aa, Heterodera glycines
MLIQFKARACAKDDDEWTALEYLNEFLMNTKGMDKQQEEKLRKFGDLIRHRQAEAKEGVAAEKQQNFSEQFHFRIKWAAEKEKTDKRRLRKWELFEKPIGQREQKRMDKLDEPIYSNKVRFVCISDTHNKLDGEELEQFNSDIGSLPHKYKIVIAGNHELGFEDGEDVEGRRADALMWAMGSGRRGTPRGYERLTNCIYLHDSSTEVFGLTIFGTSWHPLPGFSFYRPRGVPIHKEWMKIPTVQPRPVVDVLMTHTPPLGSQIEWHLRKANGKNKSLHK

SEQ ID NO: 149843 - protein, 153 aa, Heterodera glycines
MKLIWLSLFFYLCFATVTSILTRKVSFSNIQKILAPYQNSTPPPENENAEKVGQNIDGTMTVDQQIDQKHTTKTDDSPAAITTSNNNEENGGTTIRQKNATKTSNGILPPKTPKEMRLIVGTTVPQKSQQQQPLKGNSSAISKALTSPAPKKK

SEQ ID NO: 149844 - protein, 83 aa, Heterodera glycines
MSSAYRSPTTVLFCKKRSSIWKIDEDKDKSISKKEAILYLTSLGNKNLTDQGLSKDSSWFDAMDKNQNQKIEPEEFDQILWHK

SEQ ID NO: 149845 - protein, 33 aa, Heterodera glycines
TYQGCAEPDKIRFRLNRRFRLWPKIRLIAIPIT

SEQ ID NO: 149846 - protein, 174 aa, Heterodera glycines
RSRVLKSSARQVPVPVLAKIPGPVALYKIIILITNPSLAFQSEMLTSPFRSAMVTLLSSLGGGCTSIVISLIATRKCQIDLLIDGLLASLVATTAGCQLSNSWDSIAVDSIAVGSIGSALALSVYPLIERLEIDDPVGVIPVHVIGATWGELAPLINCHACELHFVPKCLFLLS

SEQ ID NO: 149847 - protein, 67 aa, Heterodera glycines
MPPLHRYEQFVHRVGRVGRSGNVGEAFVFFNPEDPNDMYMAEFLRDELDEDQDEMRDDASFANSDWN

SEQ ID NO: 149848 - protein, 34 aa, Heterodera glycines
MKAGIGRSPMQNPTKIKLLREFQCFLSDSINVRW

SEQ ID NO: 149849 - protein, 147 aa, Heterodera glycines
SVNVEHNAISKVPFGIFAKANNLSKLNFKENELTAFPLDFGTWVTITELNVSNNEIHELPLDLEENELEVIPSEIGFLTALTKLWIQSNQLTSLPRTIGNLSNLVDFRIGENLLTFIPEEIDIIEGGPSLVIQYLKMHGPYRGVLNM

SEQ ID NO: 149850 - protein, 57 aa, Heterodera glycines
QFTVIAQYKSLLKSGEYLVSAKLKIIFCKGNECNGKAIFISVKDTQSMRINTVNSSV

SEQ ID NO: 149851 - protein, 76 aa, Heterodera glycines
VAEQFFKWVGPYQRGFFCDDDSIRLPYKSSTVPDWLLLVYALCVPPFVFAFGEFICLSKPPALAIRQRLNDFEFGE

SEQ ID NO: 149852 - protein, 136 aa, Heterodera glycines
MNELTGGNAWRLVLYFDNRRMERCTDDFRRQRLARTNCESLSFLLLHTAIVDLIIQINNNCEGVKRKTFYFFNISITFNGKIQIYLEGESKCELTFNSRKRARNCAKVRALTSKRPVTRNAATQSNNVMMSVPDAQ

SEQ ID NO: 149853 - protein, 41 aa, Heterodera glycines; identical to SEQ ID NO: 141076

SEQ ID NO: 149854 - protein, 83 aa, Heterodera glycines; identical to SEQ ID NO: 148173

SEQ ID NO: 149855 - protein, 83 aa, Heterodera glycines; identical to SEQ ID NO: 148173

SEQ ID NO: 149856 - protein, 698 aa, Heterodera glycines
MPIVATTISTTRNTFMLTTVRLTLSSPFLFLLIRPLFSDSLHSLFCALNYQKLFAELTKSTPSSEKVFAQEKLSIASPVNTEYEAIARMLAQRAKGVIHFVKLAFPELVDCPTDGADGKTLLHFSSQEHTDEDNNATKITNEGADDADTMKQMTETGHDDEFEKRVVFDLDQLAHSQSEPPLLLDNDDALKIGTPVGAHLLFESRFESGNLRKAIQVSPNGYELVLAPDINQCGAHFQWFFFQVSDMRSGVPYTFEVVNCAKSFSMFSEGMQPVLFSVVEAVRYKNPCWSRVGSSICYFPNPKLEHDLATPNNEDISADFQVDSVSSRTRSSNQSGETSFTSTPSVAGNDLSSKMQLRRQQTEKNNTQQKEEAEHLLDGKQSKGKTKKTRTASAHKIAAEKGDGKRNFTLRFTIQFPHEADVCYIAYHFPYTYSRLQATLERFFSSSSSHNIYMHRQRLTSTLCSNPVPLLTITAAPLEVKCREFVLITARVHPGEANSSWIMHGVISFLLSSHPLAVRARELFIFKLVPMLNPDGVINGCQRCSLSGHDLNRDDLAKKRPFAFVDLHGHSRKSNVFMYGNNLEESWRQSDRDAAVDTSAVFRQSFALLPQILDEISDSFALKDCAFSITKAKEFSARVTTCRQFGIEHAYTMESTYCGFDQGSKMGRQIKMEDMKLVGADLVKAMVKLWETQQPTDS

SEQ ID NO: 149857 - protein, 41 aa, Heterodera glycines
VKGHLRQFVLDMHSGKLHREFHQWPDPTEQPAPTTTQPPAS

SEQ ID NO: 149858 - protein, 46 aa, Heterodera glycines
MEVKLKPYSDPSRWVAIYPLYIDASKSLAQGRRIAKAKAVNNPTCQ

SEQ ID NO: 149859 - protein, 54 aa, Heterodera glycines
MPINVLILHDFLSMEILRLIFVTYLLYCKKNAKFEEWLREFGLYHNPSVAMSKQ

SEQ ID NO: 149860 - protein, 140 aa, Heterodera glycines
MAIKYGPKIAKYGHKMAKISKYGNKWQKCQNMDINFSKLSAKFLQIYWLKLHMRYISKFFDSKFWRKNDFLKNFSGFGLKKANLAAGGRSNRGFFEKCQNMDIKYGPKCQNMEKYGNMDINREIWKNMDIEILPRSFKPS

SEQ ID NO: 149861 - protein, 51 aa, Heterodera glycines; identical to SEQ ID NO: 124998

SEQ ID NO: 149862 - protein, 22 aa, Heterodera glycines
MALADQGRIQDLGLGVGGEFFP

SEQ ID NO: 149863 - protein, 214 aa, Heterodera glycines
MMEEHQSKNFLELLNRLVLVEQKIVTVAFLLRSTPLNVFQTQSLLTRFLEFNSNVTANYYLLGPLKAELGKKHCAIVKGDQLADAKRRLAKVDICNVFSIQTKRTDCEVPSPSEFRSLSPILSPSKDKKEEGKEMDEEDDREAEENATEVKKATGAKTLIRRPISFTPICKEEEQRKKQPVTRILLFLQLGPFLTTQLEGRKRPTDWETTHRKG

SEQ ID NO: 149864 - protein, 41 aa, Heterodera glycines
IVQNLLVFKKKIKKFTTFHQKFRKSEFRPQKCRKSEVFPCH

SEQ ID NO: 149865 - protein, 97 aa, Heterodera glycines
MASCKQAPGERVYEFANRLSDAVRTALAGESEEIIRKRMFEEFLEKLTPELQFEVKAGRPTSYSNAYEIAQHFEQLLAAKRHNQVSIADSVAELSHK

SEQ ID NO: 149866 - protein, 613 aa, Heterodera glycines
MLSRSLNATEKRRKKRAYAFVNGLKREYVINETDTTVTWLEPHPEIEQLQSVGLVYSSQLAAQLTALSAKVTFNTQKLFAETVRKICNSLRFLADQTLTLAEANPTLLARFFLANPFLTARLVTKEMLEISPCFAINDREMHFQWQNGRCFERLPVTFYLHSSYETKKHGFLDPKTLIVHHNSKENSCKEFRYLYVPLKGSIMQYDQLSGDVKEIPPDSVRYLARQGKIDFPEVHIQLFRNKVLANLSELYSPESFDETIEVAKIAKEIARLSKPNAWEFNSERTDNMATNIVSNGLFSFLRGGLISINQMWVFVCCCYVTLTILLQLIVPAPLAQAIQYLGVGGILLNKVRQIRNHMGKRKQRQPREAIKGKAGQSVIEIEKIAMEQTAATQMNREKAAVKSRENSPIVEKKNVTFAIPLTERWPSPDVAASTSQQAVREQQAGKNGKNDKVIIAVAGSSQCDEKFRINGEANEWKMSFLLDTGAHVTLCNKYTALKMGIRKLIASDITAVIGISDKLVPILGKAEIKLKIAECEVITTVYVVETKIGGAGSYEMIIGRSTLRQLPLLLDLQAGALIRKRDMKVFICEPPSDRADAEIQKKRGTKDRVGMVP

SEQ ID NO: 149867 - protein, 45 aa, Heterodera glycines
EIIGEIEDLKRSLKDACDLLQKYRQEKAEDAKEQQQNEAQRTENS

SEQ ID NO: 149868 - protein, 75 aa, Heterodera glycines
MGLIFMARINYFRAFSSTVSRSFKQVKHTVQDNVTTIELVDVPIASTHRELKESAATQSVVFFLYCISLFNLCNV

SEQ ID NO: 149869 - protein, 23 aa, Heterodera glycines
  unsure (1)..(23): unsure at all Xaa locations
MARKDFRFPTFLGSEFRLPXFLM

SEQ ID NO: 149870 - protein, 41 aa, Heterodera glycines
MMLGAQALRTKQKAEKREKEKRKQKKMKGLTNERENLQRAA

SEQ ID NO: 149871 - protein, 28 aa, Heterodera glycines
MPFPWVVLLVLLVNPAAGCCWVVDVIAA

SEQ ID NO: 149872 - protein, 299 aa, Heterodera glycines
MEQQIVRLLGEHPEEGLSNARLLQAVGDDSADGTDASSSVTEQLGAAINRLLAQGTIEMLRETVPTGEGVGGAGGFILRLKRGSQLNNASPEEQLVSLGNVFSIIEESQRMGVWIRDIRERSGLNEVQLRRVLKALEQRKLVRSIKAAGTTKKTYILSGLEADDTLTGGTFYSDQQLDSEFVQTLLHVCVNWLLVARYIHEKGLCRIQLGVADVERCAINKTIKQLLLTISVLDIAVLDGKIEKRLNHTYRAIRKQQLHPSPLASVPCLQCPVSAECTPGTGHLISPENCEYFRLHFDL

SEQ ID NO: 149873 - protein, 169 aa, Heterodera glycines
MRGDLQKLEIPSLGFGRPNVDPALLALLLLQHRCNHLRGGFCGQRPSWDFKTSEFRVTNPHKSLVAIIVIHIQGIGVNAGGGGAEERDPHGAGQQTGHPRLSVPGGSSQGVGLGGLSSKLICILYFQFRRYETGHSKSSKPQRPKATDWTKQWNFLLLLFNLPNDQTNA

SEQ ID NO: 149874 - protein, 52 aa, Heterodera glycines
MESDEEFTEVVGVDEAEGGASNTDLKRMLLLHSYIIQGWKALTDMKYPSTLG

SEQ ID NO: 149875 - protein, 143 aa, Heterodera glycines
MGGGMALKRMDSEERNRNEKLLSSVGPQLTSHPKFSLRKVFPLANCIVNPTEIVQIPYPNCPWTIHFRSPQLESDRNKSNESLFKNEKYIFVFLAEAKKLLLGMLTAAVAKRLDAEKVIRSEWVMAMMAQSADENVWEAANKG

SEQ ID NO: 149876 - protein, 115 aa, Heterodera glycines
ESDLVATWQVPMSDKMHKIEFEHGTTTGKRILRVDGKEILRHEWMFKLEILRHEWMFKLVGREMFELNGKQTKKQINIDAAGIFAKQTKKQINIDAAGIFAYEYSLTVGGKAFEK

SEQ ID NO: 149877 - protein, 70 aa, Heterodera glycines
MPTLFLHGANSTYFLEDDKIALRKIFSHANFEEIPEAGHWSEKKLHAEQPKRFIDSVTKFLKKGYFTYDE

SEQ ID NO: 149878 - protein, 56 aa, Heterodera glycines
EGTKTHLELATGSSAYILSESSGNRHIGMVHRLFVNDSLVKPSELADEGEENEKPK

SEQ ID NO: 149879 - protein, 142 aa, Heterodera glycines
MVEKIKPRGYYFMKNGINATIFIRVASPTSGSYQSLISPDDDFMVEIGDRKVILSAARLRCFSPVIDRMLSVEMREKQQPSVTLNDLGIDMDQFMDFLLYISPNALSQPILPNCKMIFPIIMRGHGVDEIKLYMINLQDFSK

SEQ ID NO: 149880 - protein, 26 aa, Heterodera glycines
RMLSVEMREKQQRSVTLNDLGIDMDQ

SEQ ID NO: 149881 - protein, 151 aa, Heterodera glycines
MDGGDYFKGGLYFNKYGNHCLLFQEEFLRSLGRQAVEHKSIDSEQQQQPLNIDGDQIDVACRVAMIHFYNGANIFANFSESYPGKIHLGIIRTEKKFSKILLLHKKKVLYFAECSLCPANEAYVRVQAGCTQAVQIGDKDNGSRLVDACLF

SEQ ID NO: 149882 - protein, 157 aa, Heterodera glycines
MENFGQKRCFSPTGRPIFGTHGFLPDQLFFGRRLRTQLSLVHPKEEHAEIIDPAKIRKSQADFARKMARQFHQNHRAKSVEFLPKDPVLLLNFNRRKRFWLNGTMIERLEKSPTYRVHVPALGRVVHRHANQLQYRYPLEKEGNGTIRIPADGYANA

SEQ ID NO: 149883 - protein, 107 aa, Heterodera glycines
MRKEEMMSQDSNDLIIKFYTILNIYHLITLKSNFTPTRGSLPSRCKTAQNFFDQRQIEEFEFNWMSNEKSWEKIFLLENRHMNEPPVTSPTSPKWRCKLQNSGWKML

SEQ ID NO: 149884 - protein, 138 aa, Heterodera glycines
MGGKWGTSQNGDGTKMGDGTKWGTAQKWGKCGENETAGENGTNRRTAQFGDGTGVVGSAHVNGTGRAALSGRCVKAVVGHGRARIGMAQNSRRTNGQGQESTARTDGRRSCRRLLSARGEGEGGKGGRGNASQKPLVY

SEQ ID NO: 149885 - protein, 475 aa, Heterodera glycines
MKHTKKMVVMVPETEYIALMNIVKSMGSRGDPIQDEKTSLDSNIHKNLNDKTIGADIKMKRHSWLYKRRRQLKELKENKPQKVIIEGNPSSAIPNVAPYMGIHKIPKIETAVEQENKRQPIRSIRASRKKKSENVFESSADYSSATEGSSSTPIRSQDVKLSQKNFSKIMNIIGKNPDKFGIDMQSGQVLTNFNKPVTGSNYTESLKLLSGPTTVTLKVKIPSIQFHSVEHMQKSLNSIIQSAYDVKFPKEKRVKRATAASADKELEPETRPEPDKELTREVSSSKTLDKELIREVPLPATYDIELPRGDEPKPLEKEIGRETGPAQLSDKQLGELEGEKPQKEQMPATPIVEHGEISTIDQVRMDLAKRVTEQSWKETVKLAANAADIAEKAKTALNRAEQARKRAPNAPHVKKWFDRLSNMENYLRELVEKISQESKEAAEAKRKLDVHYDSCNNCLALQQSDNFLYPIFMYK

SEQ ID NO: 149886 - protein, 230 aa, Heterodera glycines
MNRNNLKRFQIKPLSAESKGSEEQPTSRTKTLSEVKEFDSAGTFFLRAKLVSVLFCIYKSCPMRSKGIPCRKKLDSEDFCVSCVHRAKKPSRNLYLRVVLQDCDDEECEQETTAFSYAAINFLSIASVEAFYNLSENAPNKLESILQSKIDQPVLVKVNIKENNDTAKLDWIISSISVEKPVSVKVLDDKNNDDGVEEEASSSEPPKKRTKNNQVERAIDEDADDIHTIE

SEQ ID NO: 149887 - protein, 73 aa, Heterodera glycines
MTMDAPKVKVSEGTKSARNAHETKLLKRMDRETAKPWRNQQKTVANENETGEGPTTFRMLSAYLTTSAITSPP

SEQ ID NO: 149888 - protein, 151 aa, Heterodera glycines
MLTFLRHSITIFIIVSDLPIALKNRSVSSSFTENKSYKCGNIIMEKKIVYFKLLQFVLTLTIIWQLISLRQFCGTFADPKTFLCKSIGNCDYTLIGQDSETGEFGSMFNKLYKQFFMNSTNRRTTGEPKYALFYFLVSKLPPAGHHCIPIT

SEQ ID NO: 149889 - protein, 26 aa, Heterodera glycines
MRAFCWKHSLYIGPYSIESDFFELWH

SEQ ID NO: 149890 - protein, 203 aa, Heterodera glycines
MAVVSSAKSSSAHKWVSLIVLIGQTTALVLTLRYSHTQKSYPSDGPKYLSSTAVLMAEIVKFFTCVAVLGHQNGWNFGRLLRDFDWKDLLNVGVPALLYVNAPKKFSESPSLAADENAFGADNRPQQSTGDGFVGLCAILAACCSSGFAGVYLEKILKTSRVQLWVCNLQLAFFSMFGAFAMTLLCDWAQLQQWGFFHGYNWA

SEQ ID NO: 149891 - protein, 20 aa, Heterodera glycines
MNFIFKILFYFSSIKWQFIF

SEQ ID NO: 149892 - protein, 154 aa, Heterodera glycines
MIDTMNYYLCVYDKSCIFICHIIIFYAHVGGFTKCPRWRIYETPTLADLRNAHSGGIYEMPTLADLRNAHSGGIYEMPTLADLRNAHSGGIYEMPTLADLRNAHVGRFTKCPRWRIYETPIVAEFTKCPRWRIYETPTLADLRNAHVGGFTKRP

SEQ ID NO: 149893 - protein, 142 aa, Heterodera glycines
TKIYNYLKPMHSLFKHQGAAELCRPLPVYGMQASPLYRNGGVGRARGQWRQIGGAVAVGTGRGRHFVPDPSHISLPIADAGAATMNGGGGTAKICAADSSALAKNGGTLCSLEGTVPERFFAENRSNGIGEAQQLLMMHNAN

SEQ ID NO: 149894 - protein, 38 aa, Heterodera glycines
NGALRANIFTVRAFAARNNQIHQGELGKARRTPFRIAP

SEQ ID NO: 149895 - protein, 200 aa, Heterodera glycines
MRKRNYLSTPIKQQIIKAKEAGQTDRAVSEQFNISNSTVSRVYARHRQTGDISTKPKSGRPRKTSEWQDRAIARQLKLDPNKSASEVTRSHSHAPSSTRIEVLIAKSDIRRAAVNAISATPGAIVANALEGISDAAKHQLPKIANLKKTATRQRKGIGDGAAENPLPSRETLRKRLVQNYRNGSHRRTTVTVPMPQTSHY

SEQ ID NO: 149896 - protein, 195 aa, Heterodera glycines
MLSSFVSQLEEVDAVLRNSERSGGGGAEMAAQMRKELEHICAHKEDLEAYLMATEPIVEWIEFFEESDQPTIHRALPALAGIESGLNTLRMLAIQSCDGNGTTNNCQTMSNSAVLQRELCEAALDALDWNISPLRGAKINKHLLCTAAALNPSAWRRELPAVFAKVARWTEEEVLMNAEIKNGILLGVGQQETTV

SEQ ID NO: 149897 - protein, 83 aa, Heterodera glycines
MEPDRAMEMLLFNTDIAMNSSSSSNASESEANGAETVPQTTGPNSGSSTTTAAIREGEEPEQQAELYYNERFNFDDVKTSYLQ

SEQ ID NO: 149898 - protein, 68 aa, Heterodera glycines
GGGEKNEMKCHVKFKFGILTTVCLDNGLIFCWHLSFLTLLRRREVTAFFIQLERNKVNSLAERSNPSG

SEQ ID NO: 149899 - protein, 90 aa, Heterodera glycines
MPQGIIMNGKALAAKSALAAQKAKRASWTKTFVPFSDSVDHGQSSRSADADQQENNNNNNRSSSGAAARRRRRQSRHIVAHDNAGDKIFK

SEQ ID NO: 149900 - protein, 134 aa, Heterodera glycines
TVSTDQTNSATSDPRPLPVVTESVPEESTYDPPWDDRPLRFIKTMAALQSHRSTNVLPTVPSTSADSDPRPLPVVTESVPTSDLTALFAEFLRTNCVGHVPKEFLVNHLEEAIKILNLGGGQSDDNSKMSKFRK

SEQ ID NO: 149901 - protein, 126 aa, Heterodera glycines
EESTYDPPWDARPLRFIKTMAALEAHRSTNISDIVARLTAVVDANELTRLPPDVVGHLDAAVTHLEASAQRLNLGGGQSANTPKISKFRKVLFHSLLNNRTGRAQWGFTGSPGITFLDQPPGRAAR

SEQ ID NO: 149902 - protein, 137 aa, Heterodera glycines
MEVKNGRLNQLVVLQNSDPSKCATVYSASLSLSHLEKCGISTNSCAELECISSKIPQQFSTIALGSDLLDKKEEDDFSPEAALSSTPGSLLDSLVIDQDEQDNDKGMTETETNKHEVMSRSLTVTRIVRETPSLLAV

SEQ ID NO: 149903 - protein, 21 aa, Heterodera glycines
MQLMRKVELRNQFKGFPTNRS

SEQ ID NO: 149904 - protein, 52 aa, Heterodera glycines
AFDSINHSMCPFKLENFGVYLPAWHKPVTNRYGKRKRVVREAGGMEVPGDTE

SEQ ID NO: 149905 - protein, 174 aa, Heterodera glycines
VQATSKAFTDLKEKTQKLVEAEQQKKAKDMPKSQKASDSQRQVKTHNSFLAKYATKRTHSPSPNLTNRLTNPSSVPIKQRKQAEDATKLLPKKMVVSQSKERIEPHGRSINLTGFNCYFYSQDNFATHRPSSFCGKHPPTQFFMLTGRLIWVNDYSNETNKGLVSGIYNDPKPG

SEQ ID NO: 149906 - protein, 184 aa, Heterodera glycines
MAPSILSECPSLRFVIFYAGDLFAEFPADDSAAASDGQMLAKWLFTPRPDDVPKVLKCWLDTDDGNLASKIEAFKAAFLDASSPANFIFVIWFPPSADSVVPFELINEFTREQLALERINNSDRFLLIRCPIVRNASKWTKWEKEAFNWRIYDQRNRIDIEIYNEDDIGDRLLDEIPDPSDQQK

SEQ ID NO: 149907 - protein, 179 aa, Heterodera glycines
MSDRRKEAEAKMAKAIFISADGWLKVFDLLPPSQLGLEIATISHRFNAYVDEHFKTRKWALKFIQIRREIGKKGTKKLELANLDGEKLPIPKKPMPKKVVGFEAISISKCQSLRIVKFCDDDNFFIEFPADDHAAASDGQVVAKWLFTALPDNVPPKMLKCSLDKDDGFLESDIEDFKE

SEQ ID NO: 149908 - protein, 274 aa, Heterodera glycines
AQSKASKLNINVNALSTNDTEEQQIIEQAMGFEELHDEIAIKGQARENLIFELHDEIAIKGQARENLIFAVEEKPLDERVRLSQAKDELILKCSFNQHDCDIEKDFKLFHDPTYGNCYTFNWDRNAQVTAHRAGANYGLRVLVYANVSEYLPITEAVGFRITVHDKWTVPFVDAFGYNAPTGTLSAFGVRMKKFFRLEHPYGHKKFFRLEHPYGHCREGGERAEWYIYNNYNYSIEGCHRSCTQREVVRVCGCADPMFPVVVRVCGCADPMFPV

SEQ ID NO: 149909 - protein, 258 aa, Heterodera glycines
MNTKIVLFLLLPLLIIGWVTPTNTTNEKRTDKGKGLQRSAEGSAFSAYIKSAFRPYKQKDNGKNAKNETDGQQRADVIGDNEKLQAVAAENVDEQRAYTTGDNELLRAVSTGNSEQSRVVAARDDDQHRAISAGGVDLQEMDAVAEPMDVSADGSRSAKTQKPSGGGDGSTTSMRKSGVNQSSLGRHEDAQQSSEATLSADTPNAGNNGGAENDDHEMAERDGESQKKTPKKRRLIKQKTMEKSSKRSAAEKKKNVDS

SEQ ID NO: 149910 - protein, 336 aa, Heterodera glycines
MERSVNSNPFKSAEDAPSLASTSQNNLLEAQVKEQAAQIQKLTEVLNELQQKVNVGKEEGQQSTQQPQTVAASVEQQQQLLQQLHLSQEPPEQLGQQQQQLPMAQQQPVADVPLQPQNAAPFSVAQQSQPQPFASVLDPITRQRLSVRMITAGQLLADRQQQQQQQLRIQLQRRMQLQLQQQHELMGSPPASRSSSPNRLNIQHLQQQRPQPAARPLTSSNLSPISNARRAKEQQRKQQHDAGTSSGSVAGEVQQQWQQPQGDYAIDATPLRASIPLREGQPNQVGTSGAGPSGYSGDQQQQIQHLRMSANVGGNLVESQRRHSRVEKAKVMLLHW

SEQ ID NO: 149911 - protein, 259 aa, Heterodera glycines
MNDKIDWLGRFAPSHHFLGFSPISGTQPTSNSISGTQICGILNIHHHLITGTQPTNIPINGTQPSSISIIGTQFSRIQISGTQPTNIPINRTQPSSIQSLGLNPPTFQSTGLNPPAFQSVGLNPPTFQSTGLNPPAFQSVGLNPPTFQSPGLNPPAFQSVGLNPPTFQSPGLNPPAFQSVGLNPPAFQSVGLNPPAFQSVGLNPPTFQSTGLNPPAFQSVGLNPPAFQSVGLNPPAFQSVGLNPPTFQSPGLNPPAFQS

SEQ ID NO: 149912 - protein, 224 aa, Heterodera glycines
MSSTRSRRSGIVDSGGLNPSTIHLLPMARVKKELEARGLDTKGSAADLAFRLQEYVRLAGGFVSKFDPSPASEPTTPLKKRKRKQLDVEVDENVAGFDRQEASSPVAAKTFRHFSWAIAPPTAPHPVKEAKKEEIIESGNEEERDEEEEAEKEQNDQIQIGRKIEETERQQKTKVGGEEEGVEEVVQQPQTTTEKPADATQPTAEPAKIQGKLDNNENANGSAN

SEQ ID NO: 149913 - protein, 88 aa, Heterodera glycines
MRELRGPLDELLKKEAKWEWGAEQQKSFEKVKEITSRPKLSNCRSRPKKLLIHENGRLPSKISKFPAQEWPQKCTDTDLMPFIKKETK

SEQ ID NO: 149914 - protein, 110 aa, Heterodera glycines
MSVGWGSLNTDHLDSRPSRVTIWSGCNQTMARSLRSNWASDPTERLDWEKESSTKNCNNSFSAIKILKIKTAKPTRKTPLSRDNSDCALLSGIHQSAHNLTNLLWSVKKD

SEQ ID NO: 149915 - protein, 294 aa, Heterodera glycines
GSGIRKFLQLWAFSQKNDQFFVDDSFSQSNRSVGSLAQLERRDLAIVWLQPDQIVTRDGRLSRWSVFNDPQPTDIEQGLLGNCWLLSALAVILLGNCWLLSALAVIAERPDILEKLFITKEYNHRGVYEVRLCIDGIWQRVIVDDFFPCHRSVYEVRLCIDGIWQRVIVDDFFPCHRSGRLIFAVGRKNQLWVSLIEKALAKAYGNYAILRAGRTVEGLSTLTGQPTLSIDLEYLDMDQGLSTLTGQPTLSIDLEYLDMDQQSRTADLDIAWAKLISAREARFLMGCSCGAGQF

SEQ ID NO: 149916 - protein, 97 aa, Heterodera glycines
MNQMRKILTETQQMDQSESAHFTDFSESDESALKLDIWNSNPKSPCCSSITPSTLSGEPAPAVGTKIEAQLALYKDVERVGIDADIFLWWKERTSLS

SEQ ID NO: 149917 - protein, 209 aa, Heterodera glycines
MSEIWSFYKKSQTSETALCNLCRNSFSCKKSSTKGLWDHLKTMHNDEFEQWQKNKGNTNKEGQENKITKFFQQSDDQKQKADELVLKLMLRTNSSFLITESPELRELYSKAFPGFELHSREYFRKIVLPKMANAIKEKICSQVSNDYFTITTDGWSQPTSTPSLLSITIHHIDNEFNRNDFVLEASTYRITILATTLPTQFMMHLMKTD

SEQ ID NO: 149918 - protein, 32 aa, Heterodera glycines; identical to SEQ ID NO: 133941

SEQ ID NO: 149919 - protein, 196 aa, Heterodera glycines
MSSSVASTPASPISLTAAPRRASVFADLLTVFRRKSTATTALSTRRRSIYHAPVPSSYTARNRRSGAAKKAEEMELFTDRDSLHEADRGEKDEEEETAGKPLTRQHLLNKIREKKEVINKLRCQAWNMNRKRRTLRWDTTCPEILGAERVQSVQNAFVQGGVGETVALVPPLVEQHWHLFCGNCATFSVFCDLFSF

SEQ ID NO: 149920 - protein, 223 aa, Heterodera glycines
MRRKNMQNHTTYNPNYNLFNLVSWVCSDVWLDIFPHFDRPQLGLKLALLSNRFNALVDKHFDGKRELSIWSDITIGKMGAKAKLYIDYAVIKFLRANQQIFAKGTDLDLHVPFPYKAKDVQNFACEIWPVFATNIRHLSVTDGRHLENLRRHTSPTILSDLNINAIHSDDLLPDAIADDGPNATAGQALSKWLNIPRSDGQPKQLSCCGAVSRTIKLVNSFKE

SEQ ID NO: 149921 - protein, 88 aa, Heterodera glycines
AFLHATTSSASYIIRLEDFEPTEIEPFELVNERTNEMLTFEKEDDHQNTNNVACLLKRFQIGVTATIHWVDENLDNLNNVNFHLYEFG

SEQ ID NO: 149922 - protein, 675 aa, Heterodera glycines
MAALVAFRREFFEISRRQDYVDGIDDKENHDGIDVLRECMTIAGACMRHFRTNHLPDEHLAIVPERGYDNAQNQSLIALRFFHGYAKEHGVQVQTAHAAGGEKIGPYSLDGWIEAERRAIEVNGCTWHGCKRCYPNDNMLLPNGKTAGQVRERDSKRMEFLRGKVNRMDVYWECEIHRMLERSKEMRKAFDDYVDDGPLVIRDAFMGGRTGPLKLLRKAGPGEKISYYDFTSLYPYINFTTRYPIGQPNVHVLNQEVDWRSAADNPYPLALLKVWVVPPRRVDVPVLPVKVGERLCFPLCITCAKEHPTGGVNPNYHCEHNDRQRGWVSTCTSIELNEALDEGYLVTKVFRVLEYEQSDDKLFRPYIAEFMAQKIQASGFDNSIRGDAEKEQQFVRECAEQFDITIDPTKMAVNKGKRSLAKLCLNNLWGRFSLRNFGLAQTLITDDPATLAEYLDNKSIEVTSIDELDEQHILITYLQKKDWVDEHSCSNIVISLWTTSAARLVLLKAMQKVVRSPGSDLLYTDTDSLILVHPEERCPLKTGPHLGQFTDEYPDHDIVEFCSGGAKQYGLCLRRKGAEAGAQLEHVLKVRGLTLNYDVINNQGMRYENFKEEVVRYATSGEYEPIIITYPNFLRPNIREGGRVVSMPMQKCYRPFVGKGIIGADFNVLNFGHTL

SEQ ID NO: 149923 - protein, 138 aa, Heterodera glycines
MKRRIAPLTTATAPAEQHKIIGPESPKPHEETAKNVEPKDELATKKRKVDDRELWKLAKGKFLLTTYLCHDDWNRLYNNQQKVKRLEGDRFAFGFEMCEECVWANCRATDLLAPMKKKMRRVPFGPVQGVRKTEGTEL

SEQ ID NO: 149924 - protein, 73 aa, Heterodera glycines
MADNQLRRKRMKMTTQLGKRGTNCCGGRWPINALHRPARAAQSRAQRRPHCLPLRQMPPEDRGKITTKVDVYR

SEQ ID NO: 149925 - protein, 286 aa, Heterodera glycines
MLLPSGKTAGQVRERDAKRMEFLREKVNRMDVYWECEIHRMLERSKEMRKAFEDYVDDGPLVIRDAFMGGRTGPLKLLRKAGPGEKISYYDFTSLYPYINFTTCYPIGTPKVHVLNQEVEWRSAADNPYPLALLKVWVVPPRRIDVPVLPVKVGERLCFPLCITCAKEHPTGGVDNDYHCEHSDRQRGWVSTCTSIELNEALDEGYLVTKVFRVLEYEQSDDKLFRPYIAEFMAKRSRPVGLTTVSEAMRRRNNSLCGSAQSSSTSPSTQPKWRSTKGSGPWPSSA

SEQ ID NO: 149926 - protein, 214 aa, Heterodera glycines
MNEKPSHLFIFPSKYESSLFLSHISTKLFRYFKEAQRTFAIKVTDLESVSEKFKQKFLPRELEVWRELDHPNLVYLYKDFQWNNYQFAVMELVVGGDLVISSFVLCVLHYFTVYSSAFVPPKMWPRQRNDLSQLDAPNCCCFGLSPPSLGVTAFIMITNTMPFHEDLPNQQIVDSQRKRRYKYPSWLNITKQCRTAIDALLTYQPAFRPVEFCF

SEQ ID NO: 149927 - protein, 56 aa, Heterodera glycines
MAIARTSVLSPLLLFIFLLFNCCLCQPNVFSPNDFACAKKNAIFHDGLFTLTEDNR

SEQ ID NO: 149928 - protein, 52 aa, Heterodera glycines
MRPHFGPSLLSLFVLSLLIFAIASLNAADEMPGTEGEEIIIPSWFEACRMDF

SEQ ID NO: 149929 - protein, 51 aa, Heterodera glycines; identical to SEQ ID NO: 124998

SEQ ID NO: 149930 - protein, 133 aa, Heterodera glycines
MDAVECAVGKDLAREFQRMDENPFQMRGGAMLRLSVALTLSYLLSSLDRRRYVETRIASECPAALAIAAANAKESAGDGGGPSTAKKVKVAGPEDDILYRAAEQVKHHGSKRNEELLSNQMLVGIPEVDLGIE

SEQ ID NO: 149931 - protein, 105 aa, Heterodera glycines
MPSNAFAMAQSQSAPTSPAVTAFAMSEQHPLLLRQQQQQQQQQQQHWSQQTPMTTVAMMAQHQQQSSPCRHFSASPDGMEVPNICVTGTDGGDIDCFQVLLLAIS

SEQ ID NO: 149932 - protein, 96 aa, Heterodera glycines
MPQMSAPQVSAPQVSRRKCQRRKCQRRKCHAANVSAASVSAASVSAANVSAASVSAANVSAANVSAANVSAANVASPILYWPNETFNYLEFYYINY

SEQ ID NO: 149933 - protein, 117 aa, Heterodera glycines
MEKYHNHLSDGILYPLQFSNRNRCFYDANWNCVCSATFQIVSRMNDEARNWTDNFSAAFNNSNKGWGFPSFITLAELMDPNNGFYDKDEDKGTLAIHFIINPNQKAGRKFQSLLDPK

SEQ ID NO: 149934 - protein, 58 aa, Heterodera glycines
MCVVCTDSAASFVVTESDRLPMTPAFFCRKCFRAFHYDGEQRIGQFKAFHFMDHAGTE

SEQ ID NO: 149935 - protein, 19 aa, Heterodera glycines
YKISSKSPIFHLCERTSGL

SEQ ID NO: 149936 - protein, 88 aa, Heterodera glycines
MSAFTTTAQRQLAEKRGNKFCKIYEQNFCNSTVFANLFINRQMQAATSQQVVDHNGTKREPTTTDNEGTSNVDRGRARRRQHNITTAP

SEQ ID NO: 149937 - protein, 55 aa, Heterodera glycines
MKKQLHKLRNEQESKIISQGQNSVNKFIRNKLSKVNEIPTLIDSAGNMFSSNVQK

SEQ ID NO: 149938 - protein, 79 aa, Heterodera glycines
MEQQYGVFGSLFRSGTRTSFFASQVGVERYADLYAGSCLNLVHYPVFYFFRAPMALMPHESTVDHGAAIPDKGSRQNMD

SEQ ID NO: 149939 - protein, 45 aa, Heterodera glycines
MSGNRIQNLPPFRPLFAMAKNPNTNKNYNALFEFVEKVDKPCDQR

SEQ ID NO: 149940 - protein, 111 aa, Heterodera glycines
MHPTSCGIQSPEDYMSEYICADVPSMPDTRLQSAEEAKRMRELYKTITTKHTHTYSAQRYLVDGKCKKHFPKPFSYGYVYSENAYPCYLRRPPAPNETMRQKHPHCISEVE

SEQ ID NO: 149941 - protein, 64 aa, Heterodera glycines
MTMRFMSFHPRENFSKRLHLTLVIFSNSPTLIIDLIRRVLGNSASEGLSNDTKNVEFGWQRKKL

SEQ ID NO: 149942 - protein, 46 aa, Heterodera glycines
MTGKLSTYNFTKFMNNANTPRIYEYNIWVPSKVSKHDNKNAKKSGF

SEQ ID NO: 149943 - protein, 616 aa, Heterodera glycines
MQQAAPVQHLQNDRNEQPQNIENRPINTANTGVAENSVNDGEILAHTMNYDQILHAVLNVGSANRQSGHGQDEENVENQDLAIHPNLTQQHGGLRMRFRRLPNLGENSERELWQAGNENNSGHHSHHILNRNFLRTSTPNNEHIIHELHIQHPRQNPPNIQANPNFVRQNLQKTVTDNQRQANPNVLIPPPQVIQQPIAVYPPVQPPIPETYWGYPAPYYPHPPPPMGYPNQQMFGNANTKVPQPTQIRHQSPTQINGQQTALNGLECVLILDKLPDIKGNEGNDSIKSFFKKFSQYTSDWPNKKRIDSLESKLSGRAERAFNSALANEPFIFENIKRHILQQLEATDCHEMAAFDELMQGIRRKPREGLDDLADRIVSLVRRAYPGLTRNLADEYSIKHLIRSFDNAELALSLELNRRPGMSFDEFVALAARAETTQNAARRANSDRTQQNFGRSQPHRQYDGPMAKQSTNAFEPNKFQRFNENRITCQSCGREGHVARNCFKRFADQDQRRYFGQNQNATGANRAQMATHSNPNVSQKSEQNQFEQRQQHQQSRNFLKKNFLVEQNEKQVESSNVQCDGVISNTPEMLDFFRKFWTKCDETVDDGQKEAFPIGK

SEQ ID NO: 149944 - protein, 21 aa, Heterodera glycines
MVEPRHRSPALVIAGTPQPEI

SEQ ID NO: 149945 - protein, 249 aa, Heterodera glycines
RRGTVRTAGTSSSIAGTSTHPKHQHRGHGSQTTGTASASKRRRGTVRTAGTSSSIAGTSTHPKHQHRGHGSQTTGTASASKRRRGTVRTAGTSSSIAGTSTHPKHQLVDMDLKQPARHLLLSDAVALCALLERRLPLLALRHIRNTNIVDMDLKQPARHLLLSDAVALCALLERRLPLLALRHIRNTNIVDMDLKQLARHLLLSDAVAKKQKGTAKTQMSQAAAKTQMSQAVKSSMMSNSANMLIDKYL

SEQ ID NO: 149946 - protein, 123 aa, Heterodera glycines
MTMDEEEEAAADADFVEDKNKQLILAKFIMLHLCRLLARSVRFTSAFSAWPRNRSDQSPILPPRGQTFQRTQMDIGHRIANSRERALVWQEANGNCQCQLKRLPIPQNPLPNKVIGFKHITFM

SEQ ID NO: 149947 - protein, 57 aa, Heterodera glycines
MPFGKTKHSNFQLLTPINSSLQIVEYWTRHRHTSDTTQQGQLARTLRFGISLFLKPQ

SEQ ID NO: 149948 - protein, 116 aa, Heterodera glycines
MDSLRFASLNDYEKWAFSEAIYLAAETQSRKPNGLLEMSECDATIFRVLLEFVYGNIAKCMSELLKLDIDKRMEMVKAAKHFGMRRLDESAQKVTGEAITVEHFAKVYTFARVIST

SEQ ID NO: 149949 - protein, 220 aa, Heterodera glycines
MFFSSHLTALAPFGCPIAAPTNSVSSIAIAQFSGVHPKKSGNIFESIGTADDRHKRGDSTNDHQRKVGKQWEEGNRSGGEANEQPKKGGEKGIKSGKGKAKEKAKWKSQRKSQKEKPKERPKGKAKRKPKERPKEKPKEKPKGKAKRKSQRKSQKEKPKERPKGKALEKGQRMIINRKRASQKTTPPERCPRAELFSRVSEVRTIRPFSATVPMAVPFLY

SEQ ID NO: 149950 - protein, 133 aa, Heterodera glycines
MWQRIGQGVEQFRDRNGLGGEGSAMVQKVGKEKVENGGEEQRDLPMRGERMAPKEWHGEKRPSRQQWHQFESRSSTGERVRRLNASIGFDHSAIATALTDQRLFGRNVRRFSEHDESHAKQEKWAKTAEFGGE

SEQ ID NO: 149951 - protein, 70 aa, Heterodera glycines
MLKQNVIDAKQKNEEFDGSSKKEKGRAKGEQSDQSFTRKMERSMRNCPGVEHERDLQHFFAQFATFGFLA

SEQ ID NO: 149952 - protein, 35 aa, Heterodera glycines
HCFFIQLVPLIGSSIAVTLQLGIGIDRLFGVMLPL

SEQ ID NO: 149953 - protein, 565 aa, Heterodera glycines
MVSDPKRVLLMAKYVTIFSRRNPTKRIRILVFFDPETLNECIPMKKITKKDLTPKYPTHLLASIKEKARLYRQCKTDPTKKALYDSISLHIKIQTNKFHSQIEKKAISKGRNSIFKYLQKYDVNPFEIPNLVFENKCYHDGDEKCELLANLFANSFNNSDVDPGYLNLGNTFVNQCFISDIDFNIIETQKLLKKLPNKNGTSPDNISYKILKNCHSSLATVITDLFRISLDSGSLPDIWKESIVFPLFKKGDKFNPENYRPISITCSLCRVMERILSQNIYNFLLKNNKISEYQFGFVRNRSTTSQLITVVEDWYEAIINGKNVDCIYIDFQKAFDSVPHNLLLYKLEKIGIKGKLLMWIKGFLSNRTFRVKIGDSLSSSKKVTSGVPQGSVLGPLLFLIYINDLPDALPSGVKIKLYADDDKLYICYKARTDTEIMHKALHNLFEWANKWQIKVSMQKTFVLYLGSKTPKETYKFDGNTINAVDTIRDLGVNIDNKLQFSDHINQITRNAYLRMRSLFRIIKSKSSKIWITLYKTYIRPLLEYAPEPSANSIPKSIRIPATANT

SEQ ID NO: 149954 - protein, 71 aa, Heterodera glycines
MKASQFHFIVVDICHGINSESPGKCPQDEFTEEKTVKELSTNLAENAASNRQQSTSDAPTLPEILQPLLLC

SEQ ID NO: 149955 - protein, 461 aa, Heterodera glycines
MFLAHASDHFVTGPPACDHLVTVAPVSGLIIFVAYACDHLVTGPPASDHLLTGALASGHIISHACDHLLNGPPAGGHIMFLAHARDHFVTEPPACDHLVTVAPVSGLIIFVAYACDHLVTGPPASDHLLTGALASGHIMFVAHACDHLTTVTPANGYIMFLSHASGTHAVGRLMTGPHACDPLSFVLKPRRSARLRAPGYRPLFRVIFHQSSTTGDPAAERRKQQRRSSRRCRQRLLRRRLSTERQPFWRLLEHEWGEDERHRALEEDDWQLYGDQLATTRDVILADGRPLDDWIGHDETVDEWTPLDHSELKQLSDGVHRKADVGAEACPICMEPLVDQVLLCTGCCAQRFCSVCLWTHACQSRACPLCRRHMLTGESLTVDASGADDSNDDVDSIDDDHGGAEATVSPRQQQQHIRPPGRRRRHGPATEAGCSGYGTWGSPSSNSTEGSFVELSEWHDE

SEQ ID NO: 149956 - protein, 164 aa, Heterodera glycines
MGTDKSIFGGRKLVLKFELEVTQLLTVKEWERHDRPSELARAQPRDRVQLNRLNVVTSKAGATVENTFLFSTTYGQFSTMNIIAHAGHEWTPTGSAPLPQNVLAIANFEDGTRVGTSGTATVNLAQQPQLQPRNEVDENEEDDDLFVFSDEVREVRGDQQTSVS

SEQ ID NO: 149957 - protein, 189 aa, Heterodera glycines
MAHKQPSNSNNVQVPSWDEFNLVQEEANSNRLSANGFENDQQEIGPIYEPGHAEEFGPNLPPEYDIGTSLPPDEPQCSMDLAKKVPEGTNIHRKPKSILERTNFGPTLPSSSDEEEEEKKEDKTEDGGNEHFGKGEGTDERRHDVGWEEGEEETVGPMPPMPGKTEEEGHAEYLGRLTEFEFNKHTQVI

SEQ ID NO: 149958 - protein, 252 aa, Heterodera glycines
FSSHLDRFDRNWRDDPFWRDLYPRWAEPIFKDGIDVKTNITTNITNDSNRFAVEMDTYQFRPEELQVKTMDDTLLIEGRHEDVRDRDNYTKMYFVRKYQLPADVESHSISSHIDSSGRLSVEAQKLAGRGREGRLSVEAQKLAGRGRERSIPIESGSRHATRSETGGIPRGGGPNGKATPPPPAQPFRPFSSRSGSAANVLPPAAYAAHRVAFERRGRRQRRQAKNAANRRTSAERLQPPRASIVWTRGALG

SEQ ID NO: 149959 - protein, 66 aa, Heterodera glycines
MLTNFIVFHAMWTSHSEQQEKTQLFDTYQRKKHKNNAKAANISQGIAEFASSSTTPTNSTKNELLL

SEQ ID NO: 149960 - protein, 41 aa, Heterodera glycines; identical to SEQ ID NO: 129572

SEQ ID NO: 149961 - protein, 187 aa, Heterodera glycines
MASDVSRVAPRHFGASAVQKSAFVMRMVAFVTPTMAHAVVTANANVRLALKAICASVAVRNGLFATPDIWGNAAREVFSIFNAFEYKAKRAFCSACPAGTFGKECKQTCSKCSEGQICDPAVGCCSLNSGLCGIAYAEQQGVQRSSVSAYLLPGLLLLLVTSVTLIAFALYYRHKYQRARDPPLPTV

SEQ ID NO: 149962 - protein, 169 aa, Heterodera glycines
QLRNNSEKCKMIKGFFFRQNYWDANVCHKNLEIIDDKSWTVHHKGKDYGIFEQFVINHFFSSKDWSSVFAKHPILLDNNSSNIFYYEISVKNKKGWVFFGFAFKQHIKLDWIIENIGTYAYENDGEILINKQRKGINAEHSNGVGDTVGIGVNSPLADHFTKNDLRLGW

SEQ ID NO: 149963 - protein, 106 aa, Heterodera glycines
MMPMFFFFVFIFNCFFNNNGTFGGVCVSKYDPMINAVNYAKKTNTPGYQSPYYTPTRSPIKNGFPFNHREDLGQRDSFTPNDKEKVKEANRRHLGLSNVTNNVEFG

SEQ ID NO: 149964 - protein, 105 aa, Heterodera glycines
MSLSHSGKFNSEQPEESRQESEEEEEETSSSLDAKKVLNFNHADQNGQYKEKNTVLDRTKEVTNLHYKLQIQFIRYNEKDCLTLDSPAVFEKIFVDERMTDVRKK

SEQ ID NO: 149965 - protein, 47 aa, Heterodera glycines
MEKKALNKRKMPAAEDNACRFSKVKNSRTKAKRKKERDLASAVNELK

SEQ ID NO: 149966 - protein, 89 aa, Heterodera glycines
TILALPIPSTIAFIHHIMSAKIIRVPKIACDLSLEKNGLSKNRNYAQKASQTILALPIPSTIAFIHPIMSAKIIRVPKIACDLSLEKMV

SEQ ID NO: 149967 - protein, 58 aa, Heterodera glycines; identical to SEQ ID NO: 138265

SEQ ID NO: 149968 - protein, 338 aa, Heterodera glycines
MEYTDLAVCDKRLMEGKHMTAQAKISDLSRVHDDVIGLEEGINRNLRAINRKVTQVVGRVSDIEADVNTGFGTTAARVDTLGEVVMGLESKFDTWKNELELRENMEFDELNRSSGVQKILSLGKQLTSPRPIFPPTPPPTQNAINSFGIFQSTSNVQNSNNTAGDPANGSMTNQSRLISINESGEEDDVDGNLNALTDMNTSSTQPGVFCGELASAFDDWEIKFRDYVDVFGSAWSEADKLNRLKLHLGAQARTIFENLSPNEKNNLANALKNIRSKLDSPHFRELAYKKLAACYQREGESVSEFVKRLVPLVHTTSVHIPSKARRGPLSVSHGESET

SEQ ID NO: 149969 - protein, 770 aa, Heterodera glycines
MGKIWLSDDGQLGLTFGNSSKLMDCGQNITISDQGFGSTIVQAPESHSRIVRSVKKSKTLSDGIVTSSQLASQLTYLDAAITQTMTFAFHHSFQSFCQFIEDNKRWAESAFFSNPTDLARSVFSNPYVVAKRAARTLLKVWPCVPLDENEYEFRPTKLKDECFEYLPIIIKAESRDHLAFVDPTTMIISPYSKKGSCEEFRRIVIQIKNQILEIDQIEGKITSATLSKIKANAPKLSITEFVPQIESHAFHQLVLLNLTDIKSHAFVSNMVRTSQMTYQIREKDTQITATVSQEWEEVENQMIKAVVGDYRKNWMIIISVIVLILAADFTIRFGLSLAEIYAGNGRLGNMLFGPAIQKAGKRVIEMQSIRRLNSERDELYEEPNNAASWPPRIRRTGNLLSQSLKRLNKHNPSRRATAKPENIFECSAIMGQIGALMQRPTTVTTQVALNGIRMKCLTDTGSSTSVAPKALAEWLGTKTYKAEARLMSASGHAVHVKEATRVNLRIGNESVNIVIHLFENDLSWTMKDYDFILGCDALALLPPITIDIKNASMYINDVCMPIGKSANNTLYGLKVCASQTVELSPNEQRVLKAEVRAPRTLRHDIIFENLDQRLGDQGIGLIPSISKLNSGQIQTVLTNPTATVKRIFKGTCLGRANEILATEHDSIYKEANHDETYQKLNSLGKSEVEIDPKFKINFEKSSVKGANLDTLKALCEEFGDIFSKSQYDLGNCVADPRFWSLFCGPGALQFFPIPVPKSFVINPPVMAFFL

SEQ ID NO: 149970 - protein, 392 aa, Heterodera glycines
MCNAIQSKETRALLMTTKATIFNPSRPSLSMMGTIFIDPGSHRSFISSSAAEQLDLNVLSTEECYLSSFGEREPKRYISDRVAIGILCPDQDRFIFNLNALKFLLNDLPVLQLNALDNDELQQKKLSLPNESRQPDILLGMDVWHQLNVQPIEQLPSGFTICQSKIGNIISGTGRIELKQPSNISFVLMVNNDESPQSSKAAQRQKNIQQKEKDELRRHQRNKLLSSIATLRSRRKRESAPISSKSIVIDLSSDSDASGIEIIQNPVRDRQAKSPNEHSTAPIPMAVQRLTPTRKSSSVAKRPAFSSSKQPKGKAANPAQTSQTNKLNRKMKALSPTASGSGANHHCVATLARSSDSTTVIDKGSQQNCPNMSSATISKTPCQQHSSEKTLN

SEQ ID NO: 149971 - protein, 198 aa, Heterodera glycines
MTSNKQRQLVHKDVKLRHQFKQKHSSMQLTARFRKQIHMSSTIEEVQQRMNHNRPQPRRSQQRGLRPTQAPKICQSGMAQYKQGRGIRLHTASSAMALTGPRRRLSEQPLQQEQGHESSTSPGRERRPRKSQLHAPDRVSTIWKLKSTENSPFCRPPPSLTAQWLNLAIELFAKNHQARADHLCMALLCKTHHEALLH

SEQ ID NO: 149972 - protein, 318 aa, Heterodera glycines
MAIHQECPFAKSEMTNHEAQLWSTNDELEVNFPGPITGLFKGEQISTATNCFAQPATLFNCQYATEFCQLPDNSTLIWKSTCNGNECQTCDYEKAEAINGKFTAAYGESMATWISEDHKKALTFAKNAPELIACDGTRIVMSEQNFGIARSNTTTLSAPRQDGNRHPTRTARITALGIPSGNKRCVESALHAGVSAKHESSQPNSPSQTLTTTAKRPGALDRRNDNGSVSMRQRFAPGHLLPTNERLPCLHPSDSAFPRPSDSSISGSRIAHHFFDGAIGKLQQSPFPSSSTAKQSEHLATDRLTNRDCASNAKGLHA

SEQ ID NO: 149973 - protein, 320 aa, Heterodera glycines
FILQFFKIYFRFSFSTRDLVTLSELLANYFTVGIPLPMALFHAIEANVFDAVGVLPSRLSFDRRAVIDACIKQVYMKSNGVWIYTKFLFVGEFLSVLNQKIKLNSKHSQKNILLFSVQLKIPVSFIDLRLPVGFSLNAPATRRNALRVARALASTKPVMLEGSPGAGKSSLIVALAAATGHKLVRLNLSEQTDLHDLFGGDMPVTGPDGSASFTWRDGPVLKAIKEGCGILLDEMNLASQSVLEGLNSCFDVRKQIYIAELDRTFTLDCSRCKFFACQNPHQQGGDRRALPKSFLNRFISVAFLAPYEDFIYILCEFCKA

SEQ ID NO: 149974 - protein, 64 aa, Heterodera glycines
TDPNYGTLKNLDADILTKNAPAKPAAAPKAGPAPHGGGGQALTPTTDPNYGTLQNLDAEIFVKK

SEQ ID NO: 149975 - protein, 74 aa, Heterodera glycines
MSCLNVYVNIQSPYAEIDQDKAEVSPEEGTSAPPTNCPPAAAPPNYQLANPPLQHQAGTSQRKETPKKDSDGKN

SEQ ID NO: 149976 - protein, 48 aa, Heterodera glycines
VVVSIIVLLNDPNPDNSPLNAEAANLYRTDRAEFNRRAREMTLAYARR

SEQ ID NO: 149977 - protein, 147 aa, Heterodera glycines
QQIIAQLISIVIPPWCPFPHFRDWLSQLKIHAYTETPDIILCGNKSDLENRRQVSTARAKQLADQLGLPYFETSALPYFETSACTSSNVEKSVDCLLDLVMQRIQMSVDGDNLIQMSVDGDNLPTEYMGGITLDEEVTSASYYCANC

SEQ ID NO: 149978 - protein, 21 aa, Heterodera glycines
MATSCTGAKVTFRQTYSFNDE

SEQ ID NO: 149979 - protein, 94 aa, Heterodera glycines
MYGLLASVCSAFLYALSASPLVIILFMVLDSVTVHAIAPLFNILFSEFIEDDKQRYARKCVIIRARTGPGPRRDFTGTPGPGFFGQTTGTGSPV

SEQ ID NO: 149980 - protein, 88 aa, Heterodera glycines
MDTTTINRILAGNTKTREHYLGCFPCDKLPSKINQFPSALVANNDPSNKEGSHWIAIFITDNSTAYYFDSFGRTPNRCISHFLRNYEK

SEQ ID NO: 149981 - protein, 243 aa, Heterodera glycines
MFIVDDRTVYYFDSFGRKPNRCISQFLRNYEKVISNKPAIQSVFSENCGYYCIYFVHCMCSLGGRNYESNFEKMTKKLIGEDNPDLFVVNFVKKLIKNTIIASLLNCPARNLCDRLNHPDEIQKVEKYLKGKTLQTTYKNQLDEYKDFEYGGITRESARKQMAYNGFKNVTVDQHFYVRHRICLRYSSNPCVIEKHKNGNERFYPLELVKVKDNDIIYLGQNFPKPLIRDDNMFIDDQQYLNW

SEQ ID NO: 149982 - protein, 175 aa, Heterodera glycines
MQNPTSDILCLRQLLNCRLTFSSPSTKYNPRKIHAVIMKVYNPNATALIFSTGKFVCTGAANEKECRQAAEQVTERIRQCGYYEARIHEFAVKNLIATADAGFHIQLGPLSDFLGAKYCSFTPELFPGLVYRNKSPKVSIIVFSSGKLNITGSKSKTEIDSVFNKFYSLLCNFKH

SEQ ID NO: 149983 - protein, 26 aa, Heterodera glycines
CKSTPLYPMVYSLYTFSHSQLGMFPC

SEQ ID NO: 149984 - protein, 438 aa, Heterodera glycines
LNHHEFAVFEHCVFYFLANRAQQQAGSQGLIHPIASMPPTYNDVKKLRLSVSKITIQHFHLNEFMRNEFMRDLNIAGYLELRWHDERLTWDSQQFKVQQIKIASANHLWVPFLTGQGYETALRNDYENMEVRRVDVRNSGNVTAILGFKFTTFCDDTDFKHFPDDIYRCCFYLCCFYLEPMNQRSIVRLISDGQPVFTDSIVRLISDGQPVFTDPKYFRDYGWSLSGTVPLVYMDPSNVTQLNFCLNLQRSSSSLKLNFCLNLQRSSSSLKTELRIPAWSCGILFLFVPIFTNIAWSCGILFLFVPIFTNIRIQLITKLFLLLLQFFTLLLFTNRVSPQMGKNEIFTKPLQILELGVVLNVISIMCTFCVLALTKLRNNQPPWDFLIKFLRFNHFILVEIFHGVFINLIYISIKKLKFSFRSDVGCFLAFHAVAIFAL

SEQ ID NO: 149985 - protein, 50 aa, Heterodera glycines
MWAALRRLDELRLRNGSPESRLVVGHVKTCNIFEEFFALNGIDSAVQPKK

SEQ ID NO: 149986 - protein, 77 aa, Heterodera glycines
MASFSPVFIAILIIIYTSAVGAQFGQFGSLLNGFGGANGGANLMNGMAANSRNFANMGSSFGGMINQFKGMGRNFKR

SEQ ID NO: 149987 - protein, 111 aa, Heterodera glycines
RAVPAAQSVSKCTANKIGSSFSLFSFASFVFMALVTLAEHPEFLRRRRIPLRAYLQIVGIFFVVSLLNNRVLGFGLPFPLIIVFRSSTLLANVLLSWLLQNRTFSPARLFS

SEQ ID NO: 149988 - protein, 88 aa, Heterodera glycines
MSVQKLVVALLSIPCAAFARGTFAAEQRKKRNANANQQNGEKSGGGKAINCRPPDTHLFAVHFDTDCAAGTARQRPKDGRHWNWALMR

SEQ ID NO: 149989 - protein, 105 aa, Heterodera glycines
MKLILLIIVLIECFSSAHFLICRAGAFGTVDQPFVRKKPTNFSGICDPPFKFCGKEVCFRDGKAEDYLTNYTCAIETAFAALCPFWQCSSAKQKATETKKTVKRR

SEQ ID NO: 149990 - protein, 371 aa, Heterodera glycines
MIAAEKAEVPNFSTALPMPIVPINQPPKQTLLFPHFFEDITAQEKNVSIETPVDYDDSDEGEENNLKRSDETATPKQMPTMEMTTMAQRQMMEVPTMEMPIIAVPKMEVPTTEMPKIMVSTLEMRTMAQRQMIEVPTTGMPTIVVPNKAQIPTVAVPTTALIQTVHTLHFATDEQTQIDQRREEEQREEEEEEQQNIDEELQKEEKRTETTKTAHLIVPKTEEEQNVEEKGQQKQQIEEPNAEEVAEQSDGQQGQQTVPATQPSVEEETSQPKVREEQQQQQHEQKAQTETIALVKALQTPPKRVAQETATTELENAPQHAQAVRPPSEEATKAPINGQKSMHQSSAEKEVPSPSGGQAAHPPSATPPFRA

SEQ ID NO: 149991 - protein, 146 aa, Heterodera glycines
MSTSMELLQKQQGEEKEEEEKGTTAKMRKVSRQTADTTTAKAKVPTTATAQTEEREPPGISPQPPGFSPIATSSSSTTTTPTAKMERTSKGLAGEEEEREGEEEEENGEEKSEREEEKREREGKKSGRKKGDEEEKRDGGKETKYW

SEQ ID NO: 149992 - protein, 252 aa, Heterodera glycines
MSDNCKEVEEKMAKAIFISADCWLCVFDLLTPSQLGLGISMISHRFDFYVDEHFKSRKWSLDSMAIWRTIGENGTNEMEIFNSDGKPLPIPQVQMPRKVIGFERIDICFINRNAIAFLHRFRQLFAACQINLTIHPTSDRISEFILRNIWPIFGENICGIFLLSDVFRRLRKLVPSFLYDFPSLRVVNLCDADLFIEFPADDNAMASDGQAVAKWLFTPRPDNVPKVFTCLFHEDYGNWSSKIEAFKAVLTN

SEQ ID NO: 149993 - protein, 30 aa, Heterodera glycines
LDFLIFLFLAASIFYNNLSVWSDVRQTEKI

SEQ ID NO: 149994 - protein, 242 aa, Heterodera glycines
MKLQCPLLPLFFIQIFFQFLADKSIGIPSYQWDSADSVQNVHKFVQFINDIYTDYDHTGQDYSVEQKRIIFNLTFVKYAAEIATFRVLDNIIGEGEAMPNLNVIRADDAVNEFLGLLHYDQKLGHHIAKAYNETVFCADKDQISKKVVNQILQLTFSLAIRIVLSVIIFPFQIIRIDSEEKKHFWSEIDSEEKKHFLSEIDSEEKKHFLSEIDSEEKKHFLSEIDSDSAREPQFIGGIKNGI

SEQ ID NO: 149995 - protein, 68 aa, Heterodera glycines
MAIKLFSNGPYLDLYLEFYLLFHFKFRQQIKFATKDCSQLLRKCVVLFFRRLFILSTNKHYSIFLFVL

SEQ ID NO: 149996 - protein, 298 aa, Heterodera glycines
MTVLLFLICLLIAMFAMQSMAKSVPKARDSEIIDYEEWNCGATDFEKPLSHQLAKEDCPKRMFEADLCCRVHDMCYMEEQKSREQCDEAFCYCLQRTVAQNANQTTNGCAGVSTSFCEIVKIFGGIAYLSSQELRTKQQKAMAKFEEKEKQRKTMEMSSSTTPKPTTESTKPSSTDRASSITQTEQTISSSTIQTAQATSSSTASKPTNDTTPMPNAVLLHPSIAPLRLRAAQPTEVGLIRRRLRGRFFAQRSIGRVFLPILRLLVGGECPRSVGKRAAAAAGRRAVRAKLGTNLLTI

SEQ ID NO: 149997 - protein, 101 aa, Heterodera glycines
MLSTKLFVASCLLTVFLFNCLLVGQTQAYWWPYYGSSYGSMGGYGGMGGYGGMGGYGGMGYGGMGYGSGLGYGGMGYGGMGVGKREAAFVASPPAPPPKGQ

SEQ ID NO: 149998 - protein, 74 aa, Heterodera glycines
MASFCHTFGVGFAAAFAAVAAVSRASVEVTVVVIVGRTVVSVVVTVTVIGGGVVSLILLLIVEEIVENLVNSSN

SEQ ID NO: 149999 - protein, 701 aa, Heterodera glycines
MESTGFQQRYNFRVRRPINYMEQEESSHSRHSRRNGTEQNNGLNLAPQNILDNVQNPNPFPRNFENSIPQQVGVQQNVEEQMQLAVFRPPNQNVAQSFGNPRAHSTPQNGSPHISYNGGQQNFEQNQNRNPDANRFGNEIHGQNMQFHRRQNPRIFVNSQMTNNHQFSALNFEQNRELRAQPVRHAHNFGYEEMLGEQNQNFPNPNYGREIGVNHPIQNTRDFGNGPNFQNFHPVRNINQPNYQQRPNPNFENLAPQPNHFPNVQNFEFVPQQNFQQNQIPDIVMELHKVTLSNQYANTLREIPNLYGTEGRDKIKDFFLNVQMCAGEWRPEKQKELLQTKLKGKALKAYHIALNKFGNEATFGILKTEIMSILRETDYKEANAFSELTQNGKRKPNEDIIKFGERIQRLVNCSYIGLDENQLDEVSKKHFISNINDVNLARFLECQTKANQTFDELLMMANRLSLIEDGKNRERNESVGIPVQFQQTGPQQNRTVPFQNPNYGQRFERNFPNFGMGAQNNFRPNRQSGFKNQTFQQENRNYCPNKNFDHFQNQNLVPYQTYGPKNQWVSDPQNGFQNDIFYESNPNSRPSQRFVHFQNQNSDHQQDVNDHKIEAISANRTQFDSNQQSNPMATQNMELNMIKVKGKGTEKCEKKSVKISHIEHSEPPAYEKFFNSLIAHSLNFPLTNRHKYQIQNVFVLE

SEQ ID NO: 150000 - protein, 27 aa, Heterodera glycines
MEVICSIGLTKAMPLDGWTKTMAIFDK

SEQ ID NO: 150001 - protein, 133 aa, Heterodera glycines
MIRRKFWKKSVKWRSSENTADQFSKIQNDQKKIGEKISALEQEPKQRKASSNFRQNYWDANVCHENLKIIGNKSLNVHYKRMSFGFAVKQQNKLDGTIRNEKGTYAFDSDGKIWINGKEKEQIVNIPTVKVIL

SEQ ID NO: 150002 - protein, 17 aa, Heterodera glycines
MNCRITTNRLLYCSQVM

SEQ ID NO: 150003 - protein, 214 aa, Heterodera glycines
MSGSLNAISPCPYISGSLNAISPCPYMSGSLNVIFPCPYMSGSLNAISPCPYMSGSLNVISPCPYMSGSLNVISPCPYMSGSLNVISPCPYMSGSLNAISPCPYISGSLNAISPCPYMSGSLNVISPCPYMSGSLNAISPCPYMSGSLNVISPCPYMSGSLNVISPCPYMSGSLNMISPCPYMSGSLNVISPCPYMSGSLNVISPCPYMSGSLN

SEQ ID NO: 150004 - protein, 598 aa, Heterodera glycines
MGKKRVNTPKIRPNKKPNTRRGQIAAEITTITTTTAIPPIISPSTTVIPPTARTITTAIPPTTRTITTAMPPITRPSTTVIPPTTRTITTAMPPITRPSTTVIPPTTRTITTAMPPITRPSTTVIPPTTRTITTAIPPITRPSTTVIPPTTRTITTAIPPITRPSTTVIPPTTRTITTAIPPITRPSTTVIPPTTRTSTTAIPPITRPSTTVIPPTTRTTTTAIPPIISPSTTTIPPVTRPSTTVIPPITRVKTEEIPNITIETIEKLIKRLEKMTGIRENRVKPTPFLMPEDVEEESPTTVVSKRDAPEEDSEKWWQQRNLDHENSRLNYLGWRSHLTNLQNSRDKWFSDCNERKNALAVAKALARQMPEDAARSLYRRDDITAFWAKSTALNPMWTITLCKQIKAENILWDQKVGNKCYRELPIIASKEVLFVKVGTRDLKKEGKEIQCNNDGSNPWASNFNVTTEGLQPSMEHRFAPEQFTNRQNPFLFFTKGSIFESEQLRLEQSLKDMSNRMTRPELDFTDVGLMNINITEEHGDSVAGIFSIGEILVENAQVEGEKLRKKAEETIERGKAWIEDPIGIIKYIKWTGITIVTI

SEQ ID NO: 150005 - protein, 46 aa, Heterodera glycines
MNRQHGELDYVGQHLANFQNKISLTMSNVPMHEAVLAARVLSSVQT

SEQ ID NO: 150006 - protein, 42 aa, Heterodera glycines; identical to SEQ ID NO: 130888

SEQ ID NO: 150007 - protein, 134 aa, Heterodera glycines
LEKNEAVLKAKKVIDLHKDNFNELYAFLGTHKFARQTHPKLQKIWWDVHFFEVEKTQGNLSALEKYKVREKYPLPPTIWDGQRKNGFFSENTMTLLMTLLNEQFAESQYLPPPDIWALAEATGLSETQVGNRDV

SEQ ID NO: 150008 - protein, 22 aa, Heterodera glycines
GRLFFNILRKGDIIGDRAFNGD

SEQ ID NO: 150009 - protein, 53 aa, Heterodera glycines
MAVLRGTAISGRSATPEWAQVPPIAGMTWPSTSLFVIVPSISEMTNLSYHLSK

SEQ ID NO: 150010 - protein, 171 aa, Heterodera glycines
MSVANGNTNALMRILLNISLCAPHNEWPTERSHAQFLSTFWQWTEKAVELGEEKVEIKGHTAIWGMQFDQIDQKGDALIANGLGGGKVEKAEAMGKAKGQNGVGREGTKLAEKGATKCGFEKGLKTYSKTELIRVRSVEQRRTRGASAEQRRDSSTTRQMQWSVKKANQRN

SEQ ID NO: 150011 - protein, 25 aa, Heterodera glycines
MLKCLCILSELLGIRRGTIERVKML

SEQ ID NO: 150012 - protein, 225 aa, Heterodera glycines
MAGCQKKSSPVVAIVGPAKSSTTIAVQNLLQVFRIPQIGYSATTTDLSDKEQFGYYLRVVPSDAWQAMAINQLLMHFNWTYIAVVYSAGNYGEKGFEAMERLTRNGGSEVCIAHAQKVKSLGEPTEYRNALLALNRLTPRPQVIVCFCEGMALKRMFLAQKALRQEAATEAAEGTENGNNTTKSRVKGRRKLRQQQQQQQYHHQNVNAFQWIGSDGWADRLDVVR

SEQ ID NO: 150013 - protein, 585 aa, Heterodera glycines
MTAQIPEIWKKSIICPVPKIQNPVNPVDFRPISLLCSVSKILEENIAGKIKNFVEKNNLLPNCQHGFRKAHSVTTQLLEVVDDFSFALENKKSIDVIYFDLAKAFDTVPHNRLISKLKSIGINNSLLKWIQNYLENRKFFVKIGSDFSDEYPCLSGVPQGSILGPLLFLIYIYDLPKFCETENVKIKLFADDLKAYHVLSNISFSPLQNFINKFNRYCKLNGLKIASNKCLTLHLGHKNQKINYFIDDFQIPKNPGNEPVRDLGIYFTNDLKWAQHIDIISKKALRSAFAILKSIKTRDTKILVNLFNIYCRPILEFGSPIFNPYLKKDIEKLENVQKTFLRVIFRRNNYTVDLPNYAELLNIYDQKSLESPKNGLDAQKKRKFKEYEQFWCRRKTKTEGMAPGSGSQCPRQTTKAPSTTGEGTSTETMPSTSNAEPRQRPSPRPLSTTPIRRHVRTRPTTTDQTTGTDFRATVQSTQTVLETADGATQTETEQGPIQRLCTELNKAKRRIGTLERQLQKKTEEVNLLKKRPAVENKGKLKRVSSLDDLSRRSRTKRAKEIARNLSHLFRPGRLLPNSYFYNMFD

SEQ ID NO: 150014 - protein, 286 aa, Heterodera glycines
TISEVNHSLLVRGLSPLTERVEIGGQPGGPFKLDAILGKSELPIEKIENHAWNPEDRSLNLYDVLTMHRHPVAQSTDGMREKVGYTRGFHVWQLNWPVNQRGTHAVVGVATKDAPLHAPGYVSLIGADAEGFGWNIGGNKCYHDAQNTKPWSFNKCYHDAQNTKPWSFPYEQPFVAPEKLFCVLDMDEGQLAFATDSKYLGVAFRGLKGKKLYPAVSAVWGHCEITLRYLGGLDPEPRQLMDICREPRQLMDICRRSIRLSVGKARIERISELNLPPSLRHYLLYK

SEQ ID NO: 150015 - protein, 200 aa, Heterodera glycines
MGNGSNLNELTSVVSVENETITNLEEEADLIIKAFGADFEEKNARQCPGCGVKKTNRTREYHFCKIPSHCRKSTRRKLAVTMYAVPICNATRGSVGVAARTTSAGCIFWVNGVTHRFGNNSDCPILVKRCKPGYEDILKALYPLKFFISMLFEFAEYITSFFGYGDWFGSYKRAEEGRRAERARNRLHRLEQRKRRIKTP

SEQ ID NO: 150016 - protein, 204 aa, Heterodera glycines
YKLIYNLHLINENPLRGETLKGNGMGFLMEPCVNTELVINSNKFHGIQNVALLVRNARWPHLSALPARVQIAKNDIKMNTAQFIVSIGLNEDAPEQSLVFNQQNEVRGNTVLNPFPFLKPRSTPYAALVVSSSNVLIRHNCFRNQNADFEIGTELMEHAKRIDARENNWGDPQAHNFMHRIFDQFNRYSLATIEATNFQLKLNK

SEQ ID NO: 150017 - protein, 287 aa, Heterodera glycines
RKNIIFIKINPYAAVCNQRAPALTFLQQFFRQFRHQNSPFLVGGTVFENNDLPAGKYIVQDDLHITPGAKLTLAPGTTLEFMSGIGMLVQGELLRNDGELLRNDISSAGPFLPIVFTGKALGRNLPKLEHVRLVDEFGDENVLAGRLEVRPDGQWGTVCNRSWTAHHAQLVCNQLGLTMDPQHFENWRIFPSHGQFPIVMDNIRCEEREWDITKCRHDGALHNVRSSCRPTEVVGLRCAPPYWAGVRYSLLANPPTMTGQPTMSNWVLEKAGLFDFRTSTFSPALQV

SEQ ID NO: 150018 - protein, 360 aa, Heterodera glycines
MKIKIFLFILFLKNLNKIYAGGIKEEKSFDEIFGQRWEENEEENLENETDQNGRIEQMDGQNEAKNDQIFDEHFEVKEKDSEEMSTNGEELEQMSRNIEEICDQNRIFNEKQKREIVEKFHKIKEKIMQMEKKYSRKEWKKIERKIAKKLGENRKKIYKWKREFGMMKNKNYSVEEKRIMLKQFDQIYGKLKTKLNGKLEGKRTKCQKIIAKHLGTNIKTIFYWKKQLKDGKLIKNQNKDEQKREIVEKYFKIKIKFMQNGKHSRKEWEEFRAEIKQNFRVAYTAIEKWAEKLKINQNISKKRNMLSIAEKMEKIKKYYQIKKQNPNLSDIKIADILNIPTSSLRKYKAEFGIKPKNKLL

SEQ ID NO: 150019 - protein, 147 aa, Heterodera glycines
MSKYGKKKNLKIKIIFLILIFINAIGNIYARKINDEKNFDEIFGQKWDEKLEENGENETDQNVIIGQTDGQNEANYGENISRFNQIFDGNLEMKEEIATIYDSLEQMHFSNAIDKTKREIIEKFNKIKEKIMQMEKKYSRKEWTKIE

SEQ ID NO: 150020 - protein, 107 aa, Heterodera glycines
MKYLAWDEKSEENGGNETDQNGTIGQKDGQNVTKNDQIFDENLEMKEEKRKMLSIDEKMEVIKQYYQIKEQNPKFKEYEIAAKLGIPMSSLDKYKTKYGNESKNKLL

SEQ ID NO: 150021 - protein, 75 aa, Heterodera glycines
MVKKLRGTMMPTMNKHKAVVVDVEKKTVVSSRYYCCVKNDPFLPLFGKKLEKIHKKNLTLCTLFYHLWSKEFSGK

SEQ ID NO: 150022 - protein, 153 aa, Heterodera glycines
QLVYDSKLPELRLIDGPTVRQGRLQIRFRDRWRSVCTQMTNWTSIDTGTACRTMGYDDGAFWRFFRRNNDTYPFEMPAPKCTQRQNSLWNCPGSLWNCPGFEDKEQIPLSENLCQGEDDIGIYCWGRPTFTGWARHWKGCSWLASSFHAVSSP

SEQ ID NO: 150023 - protein, 40 aa, Heterodera glycines
MEICLQTALPDPWDRQLAVILAICYRTPAALGAIWSIYCC

SEQ ID NO: 150024 - protein, 39 aa, Heterodera glycines
MELTPESDKNSEKEKLKKSKLAELQFEEFGFTCNGLTKM

SEQ ID NO: 150025 - protein, 182 aa, Heterodera glycines
MDEFYVVLRSNSPGPGNSTSKFTVRLPHTLELDANWMVALSSIIYPYSFPSVGIDDDDFISIKLVNPNFTFADDKRFVDIELKIPSMQFSSVGHLRQTLNDIIKDAYKQRFGLSPQKAAGTTVKAKRQIDVTDLFFHDHPGDYWEKIEELEKKLAELKEEIATKEREHGAKGTEQKRKRNLK

SEQ ID NO: 150026 - protein, 38 aa, Heterodera glycines
MVKHNGKNSGFCSVFGKMSIPNGSFFYYEVTILHKHYE

SEQ ID NO: 150027 - protein, 78 aa, Heterodera glycines
MLYELFGIVHSFRSHLNKLFLECVLVGEVPKNWSDNSLFALFGAALNGQIETLKILSESNDVNLRMGQLKTAGGTIGD

SEQ ID NO: 150028 - protein, 159 aa, Heterodera glycines
LNAALEEGYRVTELLRVLEYSKSDNELFRPYMSEFVVQKLHASGFDQNIRGNLEAEEQFIAECCEQFGMKIYRNKMMPNKGKRALAKLAVNNLSRLHLLKAMQKVVRTPGCVLLYTDTDSLIYAHPTGKNPLSTGPHLGQFTDEFPEHDILEFVSGGSK

SEQ ID NO: 150029 - protein, 175 aa, Heterodera glycines
MLLTEKIAQILNCRVSELRDRLNHPSDFEHVVKALKGCHVQTTYKDRNGFTKSFAFGGITPQGASTTMAYGRLGRPFNVNVTAHFYVRHRIKLRHPFLHCVIERFPEGQEDRFYPLELCKINAGQIEPGWLGRIFTETGSDNNNNINTDENASTETSLISSGRQECSQSDGYSLW

SEQ ID NO: 150030 - protein, 120 aa, Heterodera glycines
MPTPPHDNKIYKKSEYLKVDDADEVDTDPSPEEVEKWTPEQVIEWDQRSYGKMPAEEEIWQEFLDKGEANVLREFFGGEGALKVEKSLREYAKKKEQRDEILMRKRKEYEEKMENNKGEN

SEQ ID NO: 150031 - protein, 31 aa, Heterodera glycines
MAGLISELQGNDGRNGQKGKCEKISSLRRVA

SEQ ID NO: 150032 - protein, 213 aa, Heterodera glycines
MSANLSNDSEFCTGTHALPRNSFQIRQNRAPIRHRSQIWIGMKWTLPLWQRAASTRPAQFGTLRWQISTGSNYANAFPPKTNQPIGQAPSIKGLQKTQLIAHEKPVHDIAFTRLDNGRDQFATAGADGSIRLFGLVVISATLTLVFEDLRALQHSTILYEDAERRMLNHLSWNKRDPTKLATVAQESKEVVILDVRVPCRPMAKFGNHRAAIN

SEQ ID NO: 150033 - protein, 121 aa, Heterodera glycines
MMREAYDRAAWILLEPIMKVSCTVPKMFHEKVAGTLTKRNGIMTGTTQSEEFVTFECEAPLNDMFGYSTELRTETQGKGEFTMEYSRYAPVPEATQERIVYEWKMENGLIEPEKEKKERKR

SEQ ID NO: 150034 - protein, 123 aa, Heterodera glycines
MRQKTYVLAKAILERKDILFGSIENVVKPQAMKEKEDAWETVRTEMIEQGFVNFERKSWRDVRNHDWQYLRRSAVAKYEHNQKAGVEMIQYNEACAKFRGHSQRLVGAEQKGGYNNHLKVSLF

SEQ ID NO: 150035 - protein, 123 aa, Heterodera glycines
MRKLDDLSGLSGEHQSDNACRSAKDGGQHGLTERDHFGIVQRSDDALKHAEHGAKAEHQQHHEEQNGPEGRERKLEDRFCEHHEGQARPFSRLQRKSIELRENEKQSEEYRQTWAMIWPSSHF

SEQ ID NO: 150036 - protein, 355 aa, Heterodera glycines
SNHTKSTNAPHSFVPNSSFSDNTNCLNSKFPDIIHHPSYQKCELGQIIAQAAEGTGLAFVAAEGTGLAFVVFTEAILQFPFPPLWAVLFFMMLLMLGLGSMFGMLEGVITSLNDAKMIPLSKPLAAILCTSACIVGLVFTTQAGQYWVSLYWVSLFDQFAGSYALMCVAFFEIIAVIYVYGCDRFVRDIQYMTDESVGPYWTITWRFISPVIMAVIFVASVFKSFSDVPKYSAYDSTTVCPRPPPFPLLHNVPYPTWALFIAFGLVVTSMASVPFPLLHNVPYPTWALFIAFGLVVTSMASVPFIWFVRKFKIWCAVICPSIELSSLVALNCKISAEMASATAQCLEARDRRRCR

SEQ ID NO: 150037 - protein, 86 aa, Heterodera glycines
MYVTATFPYVVMTLFLFRSIMLDGATAGLRYMITPNLSRLSEPEVWLDAATQIFYSMGLGFGGLIAFASYNPLKGNVKKECDQECR

SEQ ID NO: 150038 - protein, 76 aa, Heterodera glycines
MFSKFYLSPMGASYGFNKIWITILINFIYKYDEILCQHSYFFVKLICPHNTRITSIQFHRLISKNSSDLSNDTKIC

SEQ ID NO: 150039 - protein, 71 aa, Heterodera glycines
MERKRKRKRKRKRKTEEEKGRGKVNGRGKGRGTAGEAKFSPKGCDQRKSQLRAAAACQCEMHCKMNHMRSG

SEQ ID NO: 150040 - protein, 51 aa, Heterodera glycines; identical to SEQ ID NO: 124998

SEQ ID NO: 150041 - protein, 317 aa, Heterodera glycines
MEQQNITYYPTEIVHGQTNGDSQEQFHREHVFHSDANVNFHATNDTNFGGGGRRAAFQRQQHIVVQQGPTSIPQRVSTTNIPASTAGQQTVHVQLVPHNQQGNSPIPGQQQQQRQQIVVQHAPTSMPQRISTTSIPTSTASGQQTVHLQLVPQQGNSPIPGQQQQQQQQQHIIISAQPVQTTNTTTESADGNPIAAFMEYFVEQQQQPTCSTNTLPNVQTIQQYGSPVLDSKWALFASLIYKGVSGHGPYDGRLIKGGGGCLGIKFRYGGLISVDLFNILCLRFTLKNKLLSGMDKSSEKAEREAVKRARQAEAARQ

SEQ ID NO: 150042 - protein, 182 aa, Heterodera glycines
MASIFGKRKYGRRRMKRGEEEVEEIGRRMGEGEGGEEEKEGENGREEEGRQMGEIAQREHPKRRGGNSKIPKCPHGFRPMNYPGTQWTFLECVMDEELKLMKRRKKTKRRKQKDKRRRSKRKKRRGNKEWEDEVEEEEAEEQQKGSDGIIISKVKGTRRTSGRQKGRKRQSSTKEKSAVCQC

SEQ ID NO: 150043 - protein, 228 aa, Heterodera glycines
MKRPNFNNALPMSEKKPKLRRRLPAELNCELISFVPLVCLFANVKRAPIGPVCYQFECFRSRRQKNFEYLKGVIALFDVMFEEKRTPKKKKVGRLHLQEELPHDLSRNELLHYLCYGRLGTNLFETYFVMSQATNSIAIGNLFGLLLDFAMSSPTPWLMKRPICCGIFYRQHLPWILQQPMNVMLSHGFFPEVRSDGFEFFWLFNPHLKKYAGNDDTMTDGIFWAKLS

SEQ ID NO: 150044 - protein, 124 aa, Heterodera glycines
PKMLTIDSPSLVHPNLFFADDTVVIDIGTGKVTDYVKFDAGNICMITGGHNIGRVGIVGHRERHPGSFDIVHIKDSAGHVFLSRMTNVFIIGKGATPLISLPASKGIRLSIAEERDRRLAQKQK

SEQ ID NO: 150045 - protein, 126 aa, Heterodera glycines
VWNYFTDLFDYFPLTALVDGQIFCLHGGLSPSIDSLDHIRSLERLQEVPHEGPMCDLLWSDPDDRGGWGISPRGAGYTFGQDISETFNHANGISLISRAHQLVMEFDPAPRRGEPHVTRRTPDYFL

SEQ ID NO: 150046 - protein, 218 aa, Heterodera glycines
MDLYLDDVHDDNGIVQPMWNDFAREIWPIFAPNIRHLTVPVGHHLDDLRRLISPTILTDCIQLDSIDSDYLLLDAIADDGPNAYSAGQILSKWLHIPTKNGQPKQFRDDYTSETNEWVNNFKKAFLRATTSVSYIIQFKTHTSITQFELVNERTKEKLTLKVKAEDDDEYTYINCVLERCQIGETIQWEDKKTDNLNKIAFELYGNCIGVATFSDEKS

SEQ ID NO: 150047 - protein, 135 aa, Heterodera glycines
MAPVKKKKKLSSANHRPISATETNHQKKPLGSFVTFGIRRSVRVAMKTNRILKKIWVCNDILMDILPLFRRRQLGQKMALISPRFNALVDKHFDGKSETIWRQIRIAKNGTKLLSVVTKSNSLPIKIRFNNLRIE

SEQ ID NO: 150048 - protein, 29 aa, Heterodera glycines
MKEGQKPRQSRHKGRLSKKTRIVRELVRE

SEQ ID NO: 150049 - protein, 225 aa, Heterodera glycines
LSFWPMSYNYLFKIVVVGDHNCGKSCILLRFSENSFRSDHVSTLGVDFKLKTIKIGRDKIRLELWWSLGMERYRTIYNSYYHSAHGVMCVYDLTNEKSFQNLENYWLRTNEKSFQNLENYWLRQVKEHAPQNAVLLMVGNKADLDSERKVDFDRAENLAKKIGVSIYEVSAKTGINCDDAFVELATVMRDRLLNSALNSDSDKSDHLNSDSDKSDHLSSAFHIDG

SEQ ID NO: 150050 - protein, 248 aa, Heterodera glycines
MRGSPDFLTVSCKLLICRTPRRRLNCTRNCLFCYGNVVFHKLITSGNHKLQSLFDCLLTIVVNGNSNLVYTIIRKRQVFYQLANLSSDSVSIAQNLKKGKKGATLKANEDSEQQQAVEEQTKKEEETEGQTERAKQQQIELKSSSLAQTPAIGAMTTMEESLESKRTSEQNQTQQEVEQLKQLENREEGAKNGQQTNETVAIEEEWTPTSEWVESWKKKLPLQTIMRVLQILVPQVEKICIDKSEMGF

SEQ ID NO: 150051 - protein, 191 aa, Heterodera glycines
MGVSGRAHPSLAKMRENLINGTIDFQEVPIIDMNPEDIRAELKRVYTQLRMYKLKNAYQDNPHISKRKGGGAVKKSAAGDATVSGRLSSGAGLSGAGLPKGVRGTEGYCAVKRNSIPREATPNAVTSPKQLHGADRPPPLVFMDEDKSGGDLTVESAPHNVHLLTSRLARGPPTIATPPVTSMGTDCSIRV

SEQ ID NO: 150052 - protein, 40 aa, Heterodera glycines
FNNFYPLTKTKNGNNKTAKDASSVAHFKFESLASSQRLRG

SEQ ID NO: 150053 - protein, 118 aa, Heterodera glycines
RYGFYILQAYVPTYLTIIVSWVGFCMEYLTIIVSWVGFCMEPKALPARTTVGVSSLLALTLQVGVSSLLALTLQFGFGNIHKNLPRVSYVKAMDVWMLGCISFVFGTMIELAVVCYIS

SEQ ID NO: 150054 - protein, 266 aa, Heterodera glycines
NYGAKTLRDGLCPILIFPSIPPPPLFGLVMFQSIGERLNTFCSILLKRLKLLLRRPPLVSPMDLIVVCSLLSTACIATGAWVFSHYENWSYFDSVYYSYFDSVYYCFITLVTIGFGDFVALQKDGALEKRPEYVIFSLIFIVFGLTVISAAMNLLVLRFLTLNTEDERRDTVISAAMNLLVLRFLTLNTEDERRDKREARLAAKGLVNDGDKADQTRRCPPNDTVSIISCSCYQLAKRALCRSRRWHRLGRSKQPKLSNSSCKMLP

SEQ ID NO: 150055 - protein, 50 aa, Heterodera glycines
MAIKIIKKILMHDSVCSFAPKEMGLCAVHLRGTPKECGYDDDNDDDIAAK

SEQ ID NO: 150056 - protein, 265 aa, Heterodera glycines
VTVRLSKDGTELTALGPTLTTAKQKAATLALAHLRPELEQLKRLLKEAEGTAEEEQIVPKLVTKNDGTEQRSNKGNICWIVMPYQNAIVHFHHHRLIKWINSNTNAAAGQSSIMTTTNSTENNYNTNADFALPSTPENMQMPIIDMFVVPPEEPDIVEADNNDNASQWNNNNSNNPIINQCQTIFMEKQWHQQDDEEEEEQNGSIVAGRGGEWHHKATEQLAQMPQKQRQAVPKALGRSPTWSSSAFRQQQLMNNINSLCSNNNN

SEQ ID NO: 150057 - protein, 161 aa, Heterodera glycines
MPAQLQPVSVQQAMPAQLQPVSVQQTMPTQLQPVSVQQEQPTQQQATQQQQIQLQPPVQPAAQQQTLPMNVQMPTAQFESFLVQMPQAPPPVLQTQQGQPAQQTDDMFRLIGENEEAAPGILSTSGRSGGGGGGGWVVRAVNGLDPSMVQGTSQQIVQNRF

SEQ ID NO: 150058 - protein, 137 aa, Heterodera glycines
NGLSKNRNYAQKASQTILALPIPSTIAFIHPIMNAKIIRVPKIACDLSLEKNGLSKNRNYAQKASQTILALPIPSTIAFIHPIMSAKIIRVPKIACDLSLAKNGVSKNRNYAQKSFSNNFSASNSFYNRLYTSHYER

SEQ ID NO: 150059 - protein, 703 aa, Heterodera glycines
MQHTKRYLLVPEEIYQSLASPPPYDGTPIGLVRNRIKQIKNDDGINEAERAIKYEQELKRLNKLTRDEDERPVGVKLENLSDVVDAMPKPVNVKRPIVVATRRHLKVGRARKANVEQLEDVDDDDDDDDETPKPSSSNKRQPTQREILKLIYKNAQSLGVSEEGQVLRAGGRPFITSSVYDIVSHLMNKDKRGQNKEPTAFKEFVERARQIPLLTTQRTYTLHRQAKRRYRRLPTLAPGLHTEWQADLAIFDRLAKQNRGYKYLLVCIDTLSRQVFVEPVKTKTSANMIIAFGRIFKRSKYIPWKVLTDQGKEFTARAVQQFFRTKDVEHFCMLTSPQFHAGMAERANRSIKERLYRYFTERNTYKSIDVVQDIVYAINHSPNSSIRMCPADVNFKNAEALRQKLHGAAAENFVRHQPKYRVGDRVRIEKYKHVFQKGYLPRFTNELFTVAEVHSERSPVVYRLRDDNNEIISGNRTNSFRVRLPRKLQFNSEWEVGLAVIVYPHSWPSIGTVEQQFVQIEWQTGNMVRIEVPPSNVTNPHELSKNLYRLLGEGSDPLAKKVRSTQNSFMLTINKARRWAREEYIKRKTKEKRGVRDEELLLQAMLADTGTLVDLNSVAQGFLTREKSAATSNVPLRMPADDTSSYQEKLDEYFSKLSDKNLNILDELGMTKLNAEIKNLTEEERVILEATKEMGTEAWIQAY

SEQ ID NO: 150060 - protein, 61 aa, Heterodera glycines
MTLTPQLCEPRVKNFNGFNSCHRLDKQRLSRNGFTGHQQREQRANEKPIGGGGRSQLDQPD

SEQ ID NO: 150061 - protein, 306 aa, Heterodera glycines
MEFNPGLRLIAKTLANSLWGKLAQRVGQTEIRYTRTPAEFHALLDDPTLDKLDFVHVSEHMDRCVVRKRPEFARAPPTNCLPVAAFVTSYGRLHLYDYMEQVSAIVGAELLYCDTDSIYYVSKMGGPCVAEGEALGQMKREHTDRRIVEFVAGGPKNYGIRHTARDGTDERANLKIRSFRLSYTAQQLLTFEAMKNLTLATYNIDGPIDDALDNDDLYVYGGGEHRAIRVNFPQIDRNVYADLYTQEAHKDYRPFYAKGRVRPGMQTRPFGYVEDDGQPNKGQRTHRRKRNLVEQDPTQPGHSGWF

SEQ ID NO: 150062 - protein, 243 aa, Heterodera glycines
KTFLLNASSINSEIPQSKLAGSDFSKKSFLSIVSENWNEMAKSAILAPKNVDVSKMNNSFRNLPGEEVVYTSIDLAQDENRQRADDYLDEYLNALNPSGFPRHKLRLKKNAIVLLMRNLNIEMGLCNGARMNVEQMQPNLIVCKILTGDKAGQTVYIPRITLCCSEDYPFDLHRHQFPLVLAFAMTINKAQGQTLEQVGIDLRKDVFSHGQLYVALSRARAWNKLRIRFLERKVKNVVYRELL

SEQ ID NO: 150063 - protein, 123 aa, Heterodera glycines
MGSVQLFEAKSFTYTYLLGCTKTRQALVIDPVIETVERDASLVHELGLDLKYVVNTHIHADHVTGSGELKRNKYFPKAISILSGKAGGRADLLVKHSDLIRWGDGLELEVRETPGHTNGNKDF

SEQ ID NO: 150064 - protein, 65 aa, Heterodera glycines
MPISNSLREEFEQQNDWLAYDFLNSIQTPNKNCQKEAKSVSLRRLYEMFPKLSKKVIGRVAKEME

SEQ ID NO: 150065 - protein, 90 aa, Heterodera glycines
MRGKRTSKMYDYFLSLPYVFFGNISGHYRIHAFDFYYLWAYSFPLIISIWLYSIVYRAYKFVQQNEEHKNGGQYGQNVKQYQQNANAKVI

SEQ ID NO: 150066 - protein, 107 aa, Heterodera glycines
MAKTLDQYQNLERVPISSLVFTVNFFGCQGQDKIMALLLVKQSAALDCQCARLPRAGRANVQESENQHAGGRPAYGRAIQRGASDRGGPGIGTHIWRMGEAEPGEHL

SEQ ID NO: 150067 - protein, 64 aa, Heterodera glycines
MSRFLELFYADPWSEGIPSYEELRQTYYDIQAGVANATHLGLQIELLKRFVAPKSENEREFVRI

SEQ ID NO: 150068 - protein, 79 aa, Heterodera glycines
VFESIRSHLENFSTLEAVNSRQKSKMLSTRHWHGIIEMPCSPPMHHFSPECLRSTGRHRTVRGTVTSVGTPLVGPSHCV

SEQ ID NO: 150069 - protein, 233 aa, Heterodera glycines
MAGEEEEETVVEHPLPKGWEKRMSRSSGKPKWRIKKQKLKNGLSYCDIVFLTGREYYFNVFSQKSQWERPTRDAEDTAKKPETVHCYHILVKHERSRNPKSWRSDKVTRSKEDATKTLECPFKLWAPQAENYHLYWKIKGASILKMHKNANSNLRPPLFQIKHELFIFGVKLIMPNWLHWTDCSSAKRSGDLGPFGRNKMQKPFEEASFALNVGQMSDIVDTDSGLHLIYRFA

SEQ ID NO: 150070 - protein, 49 aa, Heterodera glycines
KVGTGTKFFDRDRDSEKTRDRDFCFSKNRDRDRDLKNPGFPAPVPVPLN

SEQ ID NO: 150071 - protein, 87 aa, Heterodera glycines
MSSLSEEVKKVKQAAVLEIDTEKVQGIVRDFLRGSSVKIEIKPCQTDKHELDLNDVFSSISRRPDEQSDRSLRTFLEMLTSQPFLNA

SEQ ID NO: 150072 - protein, 63 aa, Heterodera glycines
MPMSSPASTRSGWASEAAIGVRTVTAVGAGHAWTINWAINKLAIFTALSFSLIDQKLIVTGKS

SEQ ID NO: 150073 - protein, 64 aa, Heterodera glycines
MRSPPAKISNCYEFLEREWLIFLQNANGAKLGEDGLPNLLTVSSPEFAHHLALLLEVPNLEMEI

SEQ ID NO: 150074 - protein, 191 aa, Heterodera glycines
MEKRTSHNHTTAEALARAVQMEMDFIQRILLGPQRGNLTAIEYLKAQNLGKSLSSTKPNDGTEWKNGEKVPKFNIEKHAKGNDGAEKAKSTEDKSETNGKHKIGMGRMKREVGECKVCARPSLYCYYGVKCCENGIRCRGCRLDKCLLAGMDPTMIKANAKDGEALAQYLARLELRKRNALARNNCAERNN

SEQ ID NO: 150075 - protein, 352 aa, Heterodera glycines
MPAPHDKTTLRSFLGALNYYGRFVKPMREIRAPLDQLLRKDESWSWGDDQQSAFEQAKAIMVSELLLTHYDLTVPIVVAADASKDGIGATISHIFPDKKEKVIEHASTVLTNAQQNYSQIEKEALALVFEVQKFHRMLFGRKFTLLTDHKPLLAIFGSKKGIPIYAASRLQRWALIMANYDFETEDILIANICTETECYISTILQTKTEQLPVTADEIAEATPKDEILAKILAFTQSNWPKKCSDPDIAPYFPKRDILEIEGCLLYQNRVVVPQSLRNRMLKSLHMAHPGIVRMKALARQHVCWPGMDSEIERIVRQCEECQKAQKAPIKAHGVNSRSRFMVTKTVNFTNFR

SEQ ID NO: 150076 - protein, 254 aa, Heterodera glycines
MNFARRSKARLPGTPSKYCSNKCIGVMLRLTMGGETLDQLIQLSVTQVEGMKDETAHCLDPGKLVARLVNIISTIPHLKARPCYELKSDGPFLREKTQRKRTNQKMKEEAQVVKGKTLSQMSEATSATASEDGTGAGSSTAVNKELDNVRRHLKRVYKQNGTDSVDYYRFVLHPDSFGETVENMFFVSFLIRDGQVRLRVDPNSGLASIVKLSREEREERCSARERPKTQTVPRLDYTTWHRMVQELNITVYSN

SEQ ID NO: 150077 - protein, 262 aa, Heterodera glycines
LIACSFCLFCQPHPIYQLISLLCFCAWVSLLSPLPFTVWYYVLGDGLYYVLGDGLRQMNQSVAMCHLYRTSMEVIPHTVIPHTMDTLVTLFSVLLKILRFLTQYHRSTLKLRTIERFSRAILFIIIISVLLGILRFFLRTIERFSRAILFIIIISVLLGILRFFEHDAALYSFCMDTEPGPFWAQRCMLTDGPLISLLPLISLLGRPFWKVFLPLADLFAQFLLPGSCLILLHIGFNREPVIEIGNENSHNRFGRSLRDQTK

SEQ ID NO: 150078 - protein, 74 aa, Heterodera glycines
MSKIKCYKRMASEKNENYQNAIYSETKEYRNLSRKSQEKCGQTAAFSSSVRLRRCAAVGPRKRRWATGAAAAGR

SEQ ID NO: 150079 - protein, 137 aa, Heterodera glycines
VGGTSNLIHFAFCHEMERINNGEDVSFHDILSMLSYRSVYIRKSLQLEELVQREELEYLIEEEVAKHTIRSWLESCLRRITIRSWLESCLRRIKQQQNTAHDNEMPHIADLKLIYINIKRSINEQNTQKAKFYNGNY

SEQ ID NO: 150080 - protein, 183 aa, Heterodera glycines
MDSFRPLKSPEKLSSFVNRQFFWWFNSVCALGSRKPLELSDLYALNPNDTCNELVPQWERLWKRAITDYNSKNSLQSPDELCQPPKESVINVTDGDVNVQHQQEPESDLAPLIRHGDDLTTHDQVMANYGSTQSDHSSSSSKRKTSPPSLIWRLVLLFRWNIITAMIMKCFSDLLTFANPVLL

SEQ ID NO: 150081 - protein, 37 aa, Heterodera glycines
GAPTKCPSHEMSKRVKTHEMSKIFKIYKNKMSLIWGF

SEQ ID NO: 150082 - protein, 83 aa, Heterodera glycines
MAPLFRLLFVRFSARLLLFLLLFLLFPFFLFIVKLRPIRAERLGLNQAEKAHRRHSAIISTLSFAKLANMRVQHTTYRTTTSA

SEQ ID NO: 150083 - protein, 253 aa, Heterodera glycines
MSLVVVKINDQPCRAVIATNFTHSFCGSGIVNSLKLNQILLPFLYNSIKPQVIDLNDAPTVTTSEGTPIEFLGQALVQLEFGPWHSDGFTPLLIAYDCPADMLIGQDLINEISATLPIKFEYHKNSVNVGGTRVSMLDPMAAEEKFFSVRVEIGLETWKKGARESIEMGGMVKRRVEVTREPNAEKEEGEEEKEKGGIEEEQKEEEEKKGMQEEQKEEEEREEKEKGYYEQKEGEDERKEEEDERKEDDERKG

SEQ ID NO: 150084 - protein, 185 aa, Heterodera glycines
MGLDESGYLGKTGSGYFRVQQSRVRVQVFKPGTGGTESGRGTESGKEQKVEEKVEEEQKWKRKRKWKRNRTWKRNRTWKRKCKRNRKCKRNRKWKRKWKRNRKRKRRRGTESGRGTESGRESGRGTESGREEEEQKVEEKQKVEEKQKVEEEQKAEEKVEEEQKVEEKVEEEQNVEEKENVEEKV

SEQ ID NO: 150085 - protein, 252 aa, Heterodera glycines
MDQRPTQTDQLNPGTEASSGYEKPEEQKNVQLIFEEAKASFLTAKSKIKDEIANKESEVSKRIYGLVSEAGAALRDEQFAHESFVQQINLKLQPEKLRLIQLKNNLSTLKHAYTTKGNISAGALDEVADLGQAIQKQIDCLTKVEVSCDKQIKAENARYHQKRTELWMAILPDIEQLEGSKKEFFNSRFCELQNLAQTMNKARKSLQVGTIREKADQCDVHMLEEDKENNDVHLVGTEQKETDDDIIEFDEH

SEQ ID NO: 150086 - protein, 690 aa, Heterodera glycines
MQEACAEMTNLKRLQHYFAMLLAHAHPSNPQALFDEFLDEMNPPVAANHPGAVPKSAEVRAAEVMLNLEYYLNCMGTNTKDVGLQGLPVGYDFQHQAQLLEEDNILDSFYGEDARQRCKPPQQVAIEQIGRLNPDQRAAFDEISTSILGGCNQKLFFLEGAGGCGKTYFYNTLIKWCIAGKPSLDGNANAQWVRNQELKRNSAVAAASTGIAALLLIGGGTAHRHFYVPNDVSQETPPMLNFESAKAEQLRHAQLIIIDEISMLSNTVLDYIDRLLRDVCANVTPFGNKVVVLSGDWRQLTPVVEHGTREDQVGTSIKMGALFRLFKKISLTINMRTAPGEQSLRDWLQEIGNGMHRVGTDSQGFTNQLRIPPELLVDDLDHTIHFCFPEALFDDPLANADAIAHNAILCPTNNDVQHINEVALGRMSGCGREFLSIDEPLEPNEEMNNFRTDFNMEAVHNEMPSGMPPHKLTIKVGTPVMLIRNLDVTQGLCNGTRLQVMRTSENNLFCRILTGPRAGAQNIIAIPQIQFEYGRARHHRGLRFRRLQFPVRLCFAMTINKAQGQTLQRMALVLNGRQCFSHGQVYVAMSRVTQMDGIRVYAPFSQSGYGTHIENVVYHELLDLETQQPRTPNRGLMDVDNDPDAAIPDVGPRVPDVDNDPDVERDNGNAAGANDQEPNDLDSSFDDFFD

SEQ ID NO: 150087 - protein, 495 aa, Heterodera glycines
MPSKEQRRKEADRLRRRAIRNTPDVANVLNHLPQPMSKHKHNHEVLLNLLWVRPQWIWTPVLFRLRPPPDYGLYLLLELAELNVTLLEERMQKVVRDYLSREWPKQPVIAQKRRRSTDARCTRCGSGCNCLSYSQCLKNATAFIAAWVYLKEFTHGVFPAPIFFTATRNIKGVRPTERCHRNTFLKCAARSSGHRIDYYDSGQFGDAFCGHCCARLLRGENEIIKRGRQTPCCANGAVHTGQMVAEFHELQQPPPAYLHGLVDVDDERVRDAFLNNNMAFNNLFAFASTHGEKAPPDQMGGRLDTCKYNGQFSFLFSDLIAPGVRRPSFAQVYTLSPEDALAVREEAFETAVSPHVRRTIMERLEALMRENPFGQTFQTVGTKVQATRAATGEVPHFRIALLTDRDLKGGPLQGRNDITVIERVDAPTAKQVAVIWVQEDGLPPQISAFWVSDKAGKMRELKSGMPQIDPCCFPLLHPLGTLGWRWYMKKRGSEV

SEQ ID NO: 150088 - protein, 849 aa, Heterodera glycines
FEKAYVRVAQPRRSAQQCRNDGTAGADEVYDYDEIAATFKVRYMTAMEAYLRLNSYKIVGTSHQIYTLSVHDELGQTIVVEEGHEEEGRWRVRENTRLTAFFALCARDPHAAQLTYDRVPYRYTWDFKSRAWRKRVRQLEEDPHKAKMFVLSDEVFRRAMQEACAEMTNLKRLQHYFAMLLAHAHPSNPQALFDEFLDEMNPPVAANHPGAVPKPAEVRAAEVMLNLEYYLNCMGTNTKDVGLQGLPVGYDFQHQAQLLEEDNILDSFYGEDARQRCKPPQQVAVEQIGRLNPDQRAAFDAISTSIHGGCDQKLFFLEGAGGCGKTYFYNTLIKWCIAGKPSLDGNANAQWVRNQELQRNSVVAAASTGIAALLLIGGGTAHRHFYVPNDVSQETPPMLNFESAKAEQLRHAQLIIIDEISMLSNTVLDYIDRLLRDVCANATPFGNKVVVLSGDWRQLTPVVEHGTREDQVGTSIKMGALFRLFKKISLTINMRTAPGEQSLRDWLQEIGNGMHRVGTDSQGFTNQLRIPPELLVDDLDHTIHFCFPEALFDDPLANADAIAHNAILCPTNNDVQHINEVALGRMSGCGREFLSIDEPLEPNEEMHNFRTDFNMEAVHNEMPSGMPPHKLTIKVGTPVMLIRNLDVTQGLCNGTRLQVMRTSENNLFCRILTGPRAGAQNIIAIPQIQFEYGRARHHRGLRFRRLQFPVRLCFAMTINKAQGQTLQRMALVLNGRQCFSHGQVYVAMSRVTQMDGIRVYAPFSQSGYGTHIENVVYHELLDLETQQPRTPNRGLMDVDNDPDAAIPDVGPRVPDVDNDPDVERDNGNAAGANDQEPNDFDSSFDDFFD

SEQ ID NO: 150089 - protein, 222 aa, Heterodera glycines
MILDRLPDIRGNEGGDSICNFFKKYSQYTADWSNKKRIESLEAKLSGRAERAYNAALANEPFVYENVKRNILQQLEDNDCREMSAFNDLMNGVTRKHGENLDDLADRISSLVRRAYPGLTRNLADEYSIKHLIRSLNNPDLALNLELHRRNGMSFDEFVALASRAEATQRATKRQSAEHRPNQERKYMHPSDREVETNFKNQLRPNPVVCYNCNEPGHISRN

SEQ ID NO: 150090 - protein, 83 aa, Heterodera glycines
MPSESDKRIAHEMSMPTSDFLPKSNKTLMDDIEQKAHKLSDRVKRELLTLFDEKQNHDKIERCSKRLLRKKEQVILTRNELIA

SEQ ID NO: 150091 - protein, 227 aa, Heterodera glycines
MDDIEQKAHKLSDRVKRELLTLFDEKQNHDKIERIYVFDVLKKQKWAYDANQPTSDFLPKSNKTLMDDIEQKAHKLSDRVKRELLTLFDEKQNHDKIERIYVFDVLKKQKWAYDANQPTSDFLPKSNKTLMDDIEQKAHKLSDRVKRELLTLFDEKQNHDKIERIYVFDVLKKQKWAYDANQPTSDFLPKSNKTLMDDIEQKAHKLSDRVKRELLTLFDEKQNHDKM

SEQ ID NO: 150092 - protein, 164 aa, Heterodera glycines
MDDIEQKAHKLSDRVKRELLTLFDEKQKHDKIERIYVFDVLKKQKWAYDANQPTSDFLPKSNKTLMDDIEQKAHKLSDRVKRELLTLFDEKQNHDKIERIYVFDVLKKQKWAYDANQPTSDFLPKSNKTLMDDIEQKAHKLSDRVKRELLTLFDEKQNHDKIER

SEQ ID NO: 150093 - protein, 110 aa, Heterodera glycines
MEQDKRALVQKPVVLVMPGEEGTRMIRDAEGGRAPTDEDCGDDAEKELSEALSVVNKIRMGDEEEIESENVNTSTAPFTLSIADLPGILDDASRNRWGQNCHKREKRVAN

SEQ ID NO: 150094 - protein, 89 aa, Heterodera glycines
MATARREDLAVGRTGKRAATKKDYSHQLAKEEEKGELENPNLSFFSVHPRNGAGQKGPCSKAGGLGNAGGGGDENDKRCRGRKGKYAKR

SEQ ID NO: 150095 - protein, 62 aa, Heterodera glycines
MINLFIYNFLFMVKIWDCLDNDACEYYKCPFGVLKQLWGAKIQRRIKVQAIGKLFRKDSVSP

SEQ ID NO: 150096 - protein, 70 aa, Heterodera glycines
MTHQFMVAKCAYQFKVPQVASDFYRDNVLIFYEKNPIIPPVTAWIVLPNIFTPLSIIFNLSIILLTITTM

SEQ ID NO: 150097 - protein, 32 aa, Heterodera glycines
MMHQFVMEKCAYQFKVAHVAASDFYLVTITTM

SEQ ID NO: 150098 - protein, 33 aa, Heterodera glycines
LNFLIFLFLSANIFYNNLSVWSDVRQTEKIIKI

SEQ ID NO: 150099 - protein, 22 aa, Heterodera glycines
SFICNHAKTATRKWPRENVQAR

SEQ ID NO: 150100 - protein, 281 aa, Heterodera glycines
MHNAKRIISEFVNYADILDFMAWNGDKLWDFNSINFNSLALALPDPPNDLPKETIGKPKDVPKSKIEKPFNMPKTIIAKPNDVPKQKNAKKKASKNDGGQKKEKLVVSRPSSPNGVPIEFELEINEYTNGQLINKNTISGQWDKRNEKIIDEMSFAVSLYDDDDGKAHKKLRKAAAESLIQFEQDSSRSSEDKNKMKAIIRANLSEGDSMSNYHNSIAEYATYYVLKNRNYAGVAECYALAIHLNDYNNITSDKYKQIWELVDDPIVIWHDGDEHFNSICL

SEQ ID NO: 150101 - protein, 208 aa, Heterodera glycines
TLSGPFGDGTQEWHTRRVVVVVVFVGGGIGITPYASTLMDLVLERASGNHSGIKCRKVYFLWICPTHKNFEWFVDVLKQVERHDQDGILEIHIFVTQFFHKFDLRTTVLVSRLRIYLSHFQQYICEKHFRGDNSGISMFTGLRATNHFGRPNFDSFFKFLQQSRHPEVAEIGVFSCGPAQVNKQIRRACTEANRFRNAPSFVHRFETF

SEQ ID NO: 150102 - protein, 141 aa, Heterodera glycines
MFKDLFPSLGFCPFHALLWVLKGYLIFRSIKFFEIFCLFPLLVATKLTQYAAEDANLLVLDAKSYARQAVNIIGNYRISTGCFMHDMQIAFGSFIGFNLFKLFYVPFGILGIHKRRIDAYNRKKLANERKSGGKGEGIKSE

SEQ ID NO: 150103 - protein, 83 aa, Heterodera glycines
MPSAYNPAFKVANPTNSVELTGNEQQQLSQNQGQMQSADEQQSNRSKQDASQRDEKGTDDARGEAAEKPKQFGVTQQQNLRSE

SEQ ID NO: 150104 - protein, 47 aa, Heterodera glycines
MKERWPHNNSHPSSGGCGLVAKTTDPRKTDCFISVKDLWPKQKIDFI

SEQ ID NO: 150105 - protein, 651 aa, Heterodera glycines
PPTIFSKLLAVPTRSKSELIHDLTVLENFSTSDHKMVGFKIKEKFSNKNPRVYRRDFKNINFAKCRAILENRFDVSINSVYTTFIPNRPLKSIIKPYPQKIRDLTFIPNRPLKSIIKPYPQKIRDLFSEKLRLHKLVKKFPEKSDLILNYKIISREMKKQLKQFRNEKESKIISQGQNSLIDNAGNMFSLIDNAGNMFSSNVQKCKILAEIFQKSFLRKSIVNGPQTQSTQNKTKLFDIESGIIWNILRRLPRRNSTSPDNIPYILLKNCADPITKILADIFRLILDSGQIPEIWRTSLVVSIFKRGEKTDPLNYRPVSLTSTVCRAFERILSSKILEFLNSTRFFDKEQFGFLKNRSTTTQILKTMDDIYNSIQKNQQIDINIYIDFVKAFDSVPIDLLLQKIKKIGIEGKIYNFLTNFLKNRSFKVKIGDQLSESFKIFTGVPQGSVLGPLLFLIFINDLPSFISNKASSVGIKMYADDVKLYYAHENDDHSNQLDKAVEALEKWSKINGLEISTEKCFVLYLGKNNKKKEYFINSKKISESESVRDLGIIIDSKLNFSEHISKIIRNAYLRIFQILRVLKSREIKTLTAAYKTFVRPQLEYATKVWNPNLKKDIDKIERVQKFFTRKALRKCGFVYKKYGERLKITGL

SEQ ID NO: 150106 - protein, 139 aa, Heterodera glycines
KAEVQRIWDVFVDGIWPIFAPNIRHLSLASYEIHYDIYEHKPTPIEPFELVNERTNEKLTLKKEVASFFAISHWVLKRCPILGETAAVQQQQQKKDENLCRLNNVSVFMLCNTNCIGPLSPPAEAAAERTGQSSEKGAV

SEQ ID NO: 150107 - protein, 129 aa, Heterodera glycines
MGKILSKLFGKKEIRILMLGLDAAGKTSILYRLKLGQSIKSIPTVGFNVETVVYRNIKFSVWDVGGQEKIRPLWRHYYVGTQALIFVVDSADRDRIDEARQELHKIINDREMRDALILIFANKQDLPQV

SEQ ID NO: 150108 - protein, 152 aa, Heterodera glycines
MGESASFKGIPGGRSSVKADEAYSDVSTPTSIEKECEDKDVNTKSENNSTLGKKRHGSTCDQWLTKPAASVADKIFDEDDPTFIPMAEFMENLEQKNRRGAKGFYVDPVLELRFLSAGDRNFELIRRYRFPDEGIDFISSLVKDDLQPKRWQ

SEQ ID NO: 150109 - protein, 80 aa, Heterodera glycines
MPNLYGSIVDNLAAGQIANPTAMILCCANMLNHLHLNSYGTALRHAVEKVLKEGKVRTRDLGGFANTSDFASEVIANFQM

SEQ ID NO: 150110 - protein, 185 aa, Heterodera glycines
KENGTNTGESSKNKTKKKKKAKKTKKEKNGEKENGKDMKNTFEDKMSQDKVSTFDDTNENVKGDKMFTKNWEDQLSEEKESTKKFYDTVSFAVSEKMPKNDAKGNCQTDKVSPYEKTDDNDDKALTKNLEGKEKVDKTQNKEKENKINEEEKTKHKDSGTNGEGTVAKKEAAVTNAKTKKAYRIA

SEQ ID NO: 150111 - protein, 327 aa, Heterodera glycines
MDANKMIQKGYVKLWTANKPLPPQNVPDLQKDTRPKVTAATEEMILALKVFQKFRKNKNCWASVEKKLLKSQTFLSLAEPNGKDAMRKAAMSYLRFSADQLDTLPLSALLREFRYLIGLKEHFERRAVVLAERVFGADVITLEDEQNLRQLARNIGQLRASLDTIKRRLGFAVDAGATDSEATNGQMNVYVGEIANGEGVLWSLEIQPEAAKESFAARGREMLANPMHLSSPNHDDARRFEGYSNFVYGSSALVLLLVLCCGCCALFLLLWRFCFDRAEQDAMDRKGFKPLRSFELVEDDDELVSEESDIEGDEEKGAAKAQAKGTD

SEQ ID NO: 150112 - protein, 55 aa, Heterodera glycines
QWALMSPGLRTVHSPDQQKYFRVRFTRSSVKSNIFFGIHHAHQPKVKSLLKLHIN

SEQ ID NO: 150113 - protein, 325 aa, Heterodera glycines
MPFKIDILFACALFIAASASPILPTSADAKDAIKPSDDHGDEISTPIRHKLVKDTDGEETANKRAFLFDGQTPFTPGVMPFVPGGMPPNVPGTSPMIPGMMPSVPGMMPSMPGMTPNVPGTSPMIPGMMPNVPGMAPSVPGMPPNVPGTSPMVPGMPPNMPVMPPNMPGMMPNMPVMPPNMPGMMPNMPGMQPNMPGMQPNMPGMMPNMPGMMPNMPGMMPGMMPNMPGMMPNMPGMMPNMPGMMPGMMPNMPGMMPNMPGMMPNMPGMMPNMPGMMPNMPGMMPNMPGMMPGFTPQFPGINFNNNLINPSLNPGGFNQMPNQIG

SEQ ID NO: 150114 - protein, 47 aa, Heterodera glycines
RQAFESTKKGFGQTVVLGVIDQELKIPPDMLLMGRTIKGAIYGGVIN

SEQ ID NO: 150115 - protein, 86 aa, Heterodera glycines
MKGLMDAGKKAFGCTRKCMNTKAGNCEKTLKCGLDFPPDNVAVQEVKKCALNSGLNTANAQALCKCASAAGVKNLTPAICAKVKVT

SEQ ID NO: 150116 - protein, 65 aa, Heterodera glycines
MYKKAKEWIKLEKGREKGKSAASFYDPFWSLWHFTLMTCPNLFKVKNHNLPIFCFSFSDMLTTLF

SEQ ID NO: 150117 - protein, 68 aa, Heterodera glycines
MRFGLPAVKPMFQTVGKIRPIILNLRALTNEFDRLSESYFGIGNDESSPNNLHLTNEHELNYIITGNE

SEQ ID NO: 150118 - protein, 283 aa, Heterodera glycines
MDGVFMLRMLTIHAGILVCTEVVDAMWEDFIANRLQLRTAATESPPAVSTPPKPPPAVICFSAPKASYAATGGGVECVTAATTASDPTIYRRKTSVLVPLLSAVQEQCHKTEFAQDLPRHSATYTAASGATLAVASRQILVPPRRDQFLLKTPNPSEYHSEQRQALRHLTVSSDNKPSNVAAPLVPKYHQFSMMSKCRQRHLAPASYGKIGCRSRRRTSSSNGQGGIVPSWSAMFGSALAPFQNRSFSLNSAVAQQLPSEIPEVSSCGEEASLVEVPAQFGNI

SEQ ID NO: 150119 - protein, 146 aa, Heterodera glycines
MHEYINQALAMQKLEIGIKERNIFKCQDAEIISDTNFSEIKSYQKKIGNYKFNIKMLYNEIRVTAEFRHQWKERRLLWEREEAEKKDPKTWKKRTDEMKKICEERLEQSKGAGGSNKRQEPDTYTRNWDELLRQEREYLDGGLWGK

SEQ ID NO: 150120 - protein, 69 aa, Heterodera glycines
MTYCSYSNFIVQRFDIKFIIPYLFLITFYLRKIEIFQFLVILFFIKLIFGLLSTSGIIVTSSVMTSFKG

SEQ ID NO: 150121 - protein, 150 aa, Heterodera glycines
MNSEKSEKANTILVEAAKKETERAWRDVAALAEVGDFAKSSRETLNRAIKSREKAPYANGVRELYLKMSDSIWEIFKIMDQINLESIKAESAWREFERCKTFDQATKFEEQSQNSLIEARRLHFESRRVQSQMLNYENRLQTIVWEHMGI

SEQ ID NO: 150122 - protein, 364 aa, Heterodera glycines
MLFNIISLLLFFSYFAEVILTSDDEKNSFAFDLKKRLEQFKRSNKNEKANEMEEIENKVESQIEEAIGLIKNLTNNEIQRLQNFNEFGSSYSFDSDNLPTKDHRASSNTFHIPNCGIRIGTSAEHKAKSRTSNRNNKMFNELEQQAAGIKQTLSAQKTATNEQPQNTLSNTRKKLLELRARMDKVGIKPMHKANSGEERKQSLTISPTKSPKGIVVDKRKIQRDKILNKWRWLMGSVVLSMQELYFNAEKSQKYKPIERQLLSETLTNLKLAKHEASKDSAQILGLLSNAKKFFDQYQTHRKKLQQAQKIGHEHLSEDDDLYQSDLGSENEQENSGKNQGLPVVFIFRKEKWMLGAIKDFKKAP

SEQ ID NO: 150123 - protein, 292 aa, Heterodera glycines
MSMITDLERLLDNHRPTIVQTLYLIRHGHRLDIIEGIDGGWKKQLESKKDLVLSNISDQDLPLSEMSDQDVPLTKHGFEQAKELGEWFKSIPIDQIYSSPFQRTVATANGILEGRNGGIYLNIEPGLTEFYKPCQQKIEYLHQNDSYQLFKFSNSKYSSVYNKRLLELGIMGRPLLKQPKELENEKAIKLEKEKAKELENECNSVVEQTLRHILRTNKNAKHVVLVSHLGVIALIHELLSGEWVSVGQTTVSKFVQYAEKDSQNVDDELKRFRLEYSSGMSHLSETHYLRPH

SEQ ID NO: 150124 - protein, 75 aa, Heterodera glycines
MKRERNVRRLPQDEKTVRDHKARNLQRDDVHPVAEKSEWNNFRTFEFNRPDEKTIGTLISLQCFVSFAKIIDNVS

SEQ ID NO: 150125 - protein, 213 aa, Heterodera glycines
MTSLYACGGLHSTRRIYAAEDFTLRLRRTSLYACGGLHSTRRIYAAEDFTLRLRRTSLYACGGLHSTRRSTSLYAAEDFILRDGGLHSTRRRTSLYAAEDFILRDGGLHSTRRRTSLYAAEDFTLRGGGFHSTLAEDFTLRLRRTSLYAAEDFVFTLRQRRYFSLFLDAAEDFSLYACGGVSACPGIELPLTKSLSNTLHGPLTNCNVNNIST

SEQ ID NO: 150126 - protein, 167 aa, Heterodera glycines
MSKFPSHKFKFNIKIEHTEFGNGTKYFFHLYCAKREYNNFYAETNLGKKEGQIEFWDGICENNMYRLGVIVAQSTANQLTFLIEEDFYVNIQCQRLMLNANQRDINYDLDINKNGASGAEIKCYQTKERTESERRRIGDDVAGPSEQKELPDKNRVPKITQDLLANF

SEQ ID NO: 150127 - protein, 118 aa, Heterodera glycines
MNSSAMEVQIIKESELYLHFKDERPCWPFIGLSLTFGMLATVDFYFALIQIVNHNLVWLGYLGHSTGDRSHYRETFAVELKKFSSLIGLGNLSLGNNTISASGQLFQTPAIQLISSAN

SEQ ID NO: 150128 - protein, 552 aa, Heterodera glycines
NFITLKRLHEQNLSIYEAIEMIKLFQDKAGEDPKGVFNTSKIITDSAHNIRQEFPSGNTTTSEKGRKIAFWQFFQHITPNLMRMLDNNAALYMSIDENKLLKNVIKNVKNEIDKNFVEILKEKIQNVEFHHSAIEGEIAKYIKEEVDAKKNCDEQLKAHYWSMLDAKELDADSYLKDIENDFIQIANDKESEKKKIEGYFEGLRRKWDDVISKEAKIELMKNIRYDLAINFEFNPSKDIHDRVKSMDFDEKLNDVRQISSFVSNEHYLPIIVNLSKIEIVNYKYDTKTALEKLRELVDGTIKEQENELEKANKEKKGIEWKKWETDREKQKTSKEFEENTKASEENDKKKQTLETNKKEMENEKSKMVATNKEFIAVIEKIKNKETITAEDKKALQNLCAFTKWYINHNGTINGIATKLEQTISEQKKKQPNLEKKLHLKTKEEKQLEQVKNIQQKLKGIVDKIGGIEKSSGTNLWEFCAEEESGKEKKVDEQNKEIIETNASSSSSSSLSEPKQKKSKTKKEGTADGGKKRTHLLDKFGGILHHEETAEEK

SEQ ID NO: 150129 - protein, 134 aa, Heterodera glycines
MSFRSHPWILNQEFERKATNNESEALDATRRCASHLGPHLNNKSIKKEVGNTGTTLKNPKNGTYNGPANGLHGLLRRVRIGRVGGAPVLLHAAVPVRHCALHVALQIAHTQRHVLLAQRGQQLPSVENALIFEA

SEQ ID NO: 150130 - protein, 44 aa, Heterodera glycines
MVKISDFSPAAPIGTVMPRELLFIQRKMAQNRKICAFGITKSDF

SEQ ID NO: 150131 - protein, 97 aa, Heterodera glycines
MANHFNRQPLLLCVLSLFVLLQLLAVLRPPAIDATGLPSGGGCCCCQQQAAPPPPPPQQSCCCCGGGGGGRRKRQLFSGLAELEKFREESNFGEEAH

SEQ ID NO: 150132 - protein, 26 aa, Heterodera glycines
MKVKTRIVYLKFKANRKNQDFLNNLN

SEQ ID NO: 150133 - protein, 312 aa, Heterodera glycines
MMNRQIDTKKQKPKITYEGQLYTFDKSSADGTRKFWRCEYKNSCKGRIWTDLDDQFIRLATPHTCPVNAANVEAQKVKTAIKRRALTTLEPPAVIRSEALQNVPSPAGLLVTQDASKLRYCTDTVLAENLRMLTSVAFLPLSDIRTAVIALDTEFGNVAALRPLIDWLLNNYIGQPRPNGTWSQPLFPPEQWNVYTRTLNGEARTNNYAEAEHHRLQGAFNCRHPSIWHFIDVLRREQKGTNGKYASFIAGLEPPKKAKKYQAADERIFNLVQNYNPVNPNYDNDHNYHINHNHHIILEFLRGISRNYHMNP

SEQ ID NO: 150134 - protein, 146 aa, Heterodera glycines
MPTKNGAGQANSGERSKLDKSTARGVGNGSPKEAAVPATTPQPAAGEASGEREWGDENGKFIISFVRSANAAAKAEVSQRKKEKPDIFITKKLPENKKREFVSGKNPDYETLKQLDMQIFLKKKLSGTQARPHDFQSQVSSQQSAM

SEQ ID NO: 150135 - protein, 217 aa, Heterodera glycines
KLIGICSLLVNYVRPVIVLGALKDRINDELVSRHPDRFSSCVPHTSRPPREGEVHGRNYYFVTKRNYYFVTKAEMERDVKSNLFIEAGQFQNNLYGTSVAAVMEVAESGRHCILDVSGNAIRRLQNTAHIYPVSVFVKPLNYQQLLSAFIVISFREWDSLLSEEDALKQFERCQRQEQNFGDLFTGKCRPLVGWDLFLFKITKYLNKHNPVPKLVLP

SEQ ID NO: 150136 - protein, 176 aa, Heterodera glycines
MQLQIALALSKEECEKERELRRGDDIRLQIAIEESKRELARSSSLSSPSGGIDPVEKQGTSKSHGALDDLLSLGLDDVFRSNIPNATAPGSSAQTQQQPPQLGVFNDPWSPRPSTTIPMVETAPPVSAHQTTTNPFLVGSSTTAMTNNKNNPFSTNERPSPSLNEMMQAKNGGGAY

SEQ ID NO: 150137 - protein, 287 aa, Heterodera glycines
VYFLQMFHIFFVNRGYMLVLEPPALGSVYDLQKCIADSINIDINEQYLFLSGGASINRNAMLSAISDVGTDTNPIFLVRRITNTQSEPTKTNSDGINEIYQDWEISMDRMLGIVPTNSPSAISECVDLGKKCAQLAENIVRFCNNVLIEHQFLYQGWMSVISNLDENILRIQRRLDKSIGQAEKLETFRQNGRSLLNGFDKILETLKKIVLPPSLLSLGHSSTNLSDSDGSAEEITLFDWISSKDPAYSLSSFSQHVLDHLGKTTDEELREAQHLLAMVQDVSQKPQ

SEQ ID NO: 150138 - protein, 245 aa, Heterodera glycines
MENKFILVPSDLYKNLLKPDAGEINVDNAKNKLSSLLKQRKLDATSKNLLYNQELRRFLKLRKEIEDKPVKVELSDGSLMVFKPKQRERDSKIPTQIVNDEGLDETGSIPTLEDPYTTAEESDAESTTSTPKTRPLIKPMRVGTSKFRQKQKSFVVKKKGKIMSIINNDPEKFGVGYRGHILRADGTAYLKSNVNQALERILRRSPENAPSPIGTKALEQRLRNDPRTSGILKQKFNEQSGSGVK

SEQ ID NO: 150139 - protein, 284 aa, Heterodera glycines
MSSTSSKKTLQSVVEQVIQQDAEIKSSEKPLKQNELEKSERKSTHTVYNLLDHKQSFWKLARPKFAVINFLCPGCRRINYKHKDQFKLMGEDEFHFTQVMCPGCVKERDELISPHPKSVLYCYGQFNDSIPVLQKMGVHVHKGPPRDELLSSLKKPLLLILDDLLTIIDEKTLSELFIKKAHHLNMGVIFITQNLFERKVKVARINSQYIVLMSAPNAALQIRNLGVQLFPKNLAFFLSAYKDATLSPYGYLFLDLHPASTPLLRIRTRIFKEDEEKALYIQND

SEQ ID NO: 150140 - protein, 45 aa, Heterodera glycines
FVPNLVVHPEDNDPLPTGKGHLGELTDEKPDNILEFISAGCKNYG

SEQ ID NO: 150141 - protein, 65 aa, Heterodera glycines
MNSSSTFISDGWPGVLERINQGRTQFTHCPYVPTSAVVFAASADELQNVVRLFVSQLTEMSLSCR

SEQ ID NO: 150142 - protein, 736 aa, Heterodera glycines
MDPFPLFRMLIGGPWILVAIGAGAVGLLALYLYIKFNPAFRIYRSLITVIILLGLVGSGETVQRRISLPSTFTPHSLSYCHSLCEPSMTDDFANGGFGDCNDDFGGGGGGEVSPRAQAGRDAQRRRSLSNHSELGAHGRPMARCKSLGRPKPLPPKSERRCVADDVNLFAGENWGDDPWQRVEVERFFREQEARGKRMIHERTGEQVPFPSTLGLLPANRQEIAPGWTVADYFAETRCRSLKWPQWPCIYSPGGVIGSSKRSRTLQQKGHVPWRLGQTHCDWHPLEELWWTTQSELDSECDGAPMTRERARADSTERVAQPAGRWGISPPNWPTKGALHRIDAINNGRPPRPCHSIWGRSPSPRPVSPPKHLPPTEDTIHSHHFHCHQTLSHQGTFPSDRSELAFSKTPSLLRSYSSSSSFCSFSTFSSKMYRSRDTERSSGRTARRLRLLELTAAELARGEFDHNRMVQQHGGNADRVLAAADHLTELRGKFSRNWSKCHDIPGKDRLRHRFDVDRWLVVAPSNAGENGGQNDGQSRGKMRSVVVVVPPTSPPVGGSTPGTVAKKHPPTSPKRGLSPSALPGPSNRGLPPLSPTVAIAKPVEEITQVAELLGKVGDEMNRRMAEDEERSATGGELLSLPSEDEVVPETPTPSSPRAGSVAKKISDENGRGKKGVSALHRGPGITGQGCLVFNANDGTPRELSSDDEDRFGGGARDHFDPIGMCWTLLPILFFSHF

SEQ ID NO: 150143 - protein, 401 aa, Heterodera glycines
MDPTDNEQEHGNDGNERTGGSPTTQVGAVPPSAKKGKGKPKVVETSAIQSNSGVQPGGTRNLRSNGITIRAIRDQLERASGPLADRIAEARELLEPDLNAGDKPQSAVCLSAMERGLRELVDIFKGHFDRGLAAIGDEAPELHDYLYDAFTVPLPAATRCLGLRSHPPPAELLQIAMEHLADLRTVRRTLEDVEKLSQLSSETRSGTGDSLPAGDDPASRRTPPPQQIHDPTDHQSDEWLFGRFPRRFEQLNIQEGRRAVTPVMRSVAQVAQYPVVNAGGAGANIREWVNQASDRRERTHSPRIQQAGNRPRPPGPNRSVTGDPNPCSRFRIPEQIRGRDPSVLRAARRNEATTAFETVRLQPPTFSGKPEDWTTFWSYFKRAVDDKPIPGFEKQPYGFAA

SEQ ID NO: 150144 - protein, 80 aa, Heterodera glycines
MIYLLQLLAIAFGLFSNSLLESNVVIVSKNDKRIGKVIPPGRYKIAVWDKMKKKKPDYCDDVFIKMKNQSFLTEEALHDE

SEQ ID NO: 150145 - protein, 196 aa, Heterodera glycines
MIAKNICGMFLFENVFSPLHKFVPSFLNECPSLRIVSFIFDDIFAEFPFDDSAITSDGQAVVKWLFTPLQNAVPKVLICTLDMDDENLASKIEAFKAAFASASSPVNFIVVMCFIPSSFADPVVPFVLTNELTREQLAFKETDKSDDCFVLVRCPIVRDASKWAKWEEEAIGWECFDQWNQILFNVDEIGDGSVNA

SEQ ID NO: 150146 - protein, 193 aa, Heterodera glycines
MRTKGENINANTVNPIVITDIQIEESSLNTAGNGVQIVQISENPLENNGSQKLNYIMVNNSKGTMGQINLSANLETINWTEIHRLFPPPKIALKAPQPEEMTLSQQPSTSNGVAEESLPSCSTIGICKNGKAFRIWDNRGRPVGIVSPSFTDSHRRPTPYFRPRQLQPVPQQPQQQQHNQQQKNIFYKINLFL

SEQ ID NO: 150147 - protein, 83 aa, Heterodera glycines
MVHWTTKVSNGAKDGSGGAAKNIGDVAWDTNQYFSQPQSADVEMSAYLCLAHIHAAGQQRACAAHCPLADRAAQFPGRLFIHA

SEQ ID NO: 150148 - protein, 18 aa, Heterodera glycines
IRCLHLCRQRPTTGTKMI

SEQ ID NO: 150149 - protein, 155 aa, Heterodera glycines
MTQQLPTGFGQMPPLGQVAHLVQPMLINAAEQQIPHPFNADGTHNQHFLNGCVAEVGQLLPPLCLIVVSVEHRAAQQTTAGPLPVTNCVLRTGDGHRVEASGWQAYAHVLASLSVGSAYWFINCVARARFQRLGCWFRVGVGGPNALVVPHVAPQ

SEQ ID NO: 150150 - protein, 273 aa, Heterodera glycines
ITDCKQKLMSLCHAEQETYKPHSPWVDQSSKYRNEYTVGEPPVAPAAYTAFYTVGEPPVAPAAYTAFFDDMVATGPFASSLYSTSRLLEDMVATGPFASSLYSTSRLLERSRSRTRERRQAERRQALRSQSQARNYFRASQYPAPLRTRDYSTPPSSYITRTPTAASSFVSFIDNYGAKQYDLARSQSLHRSSVYNSNLALSRSRGGIDYYLGSGRMSRVDSYADALHSRYEWNVPSSHELYYASSPGPVGYPPLAHYHARILISRNLIIFEK

SEQ ID NO: 150151 - protein, 85 aa, Heterodera glycines
MASCGGGGGDRCAKGCDDNDPNYGDNIGMVRIMEAHSFFLLCRRPSFLYDVLCRNRFTDYCSLPFHFPFAFPFPLLKFLSSVHNA

SEQ ID NO: 150152 - protein, 29 aa, Heterodera glycines
MGAGGGHNSINVGKILNKSKIVRNFMKTL

SEQ ID NO: 150153 - protein, 195 aa, Heterodera glycines
MSGPIQKGIINALKALDNAKSATSLLLHPDPDLSNWENAVNLEAQFDRVVKEIRTMEMQMDSLRDSSNAWIELLARLTGDDKDNGEKEYIKFDKNEKIAERYDAATTKLRDLRDLEATLSATAKLHRGRADREAKADQLANPQQQPPMPPAMAAPMTVPTFTAPLYQFQPIQLDKFFGQKRKWPEFYESLQSAIG

SEQ ID NO: 150154 - protein, 866 aa, Heterodera glycines
MQMDSLRDSSNAWIELLGRLIGDDKDNGEKEYVKFDKNEKIADRYDAATTKLRDLRDLEATLSAAAKLHRGRADREAKADQLANPQQQAPMLPAMAAPMTVPTFTAPLYQFQPIQLDKFFGQKRKWPEFYESFKSAIGSQSISKAQKLNLLRNLLGGEARELIAGFRLEDANYETVLQLLKDTYGAPEEHIRSLHFELANLKPCRSLRETKDFLLQLERLTRELNNAGEDIEGPQVFLMLEKKLTPPFLRSILTKKGEDPANWTTTKFRDVLTEAVRKEVQIQEVMGEYGHHYVQPKAEVVSAAPVQAPRTPNQRSRRPNQPMALRDMTFIASSLDEGHRHQGYVSQQHTQQAKKHCQQMRNQVQSVKKGPPYPCIFCNSNHWHDECQNVDTLNQRISIVREKKLCFKCMKPNHRASNCARPSKCYHCKCRHPTALCRDQYKAENGINTPSTSCSEEKPNANDGKRSTVIEQQQMCNAIQSKETRALLMTTKATIFNPSRPSLSMMGTIFIDPGSHRSFISSSAAEQLDLNILSTEECYLSSFGEREPKRYISDRVAIGILCPDQDRFIFNLNALKFLLNDLPVLQLNALDNDELQQKKLSLPNESRQPDILLGMDVWHQLNVQPIEQLPSGFTICQSKIGNIISGTGRIELKQPSNISFVLMVNNDESPQSSKAAQRQKNIQQKEKAELRRHQRNKLLSSIATLRSRRKRESAPISSKSIVIDLSSDSDASGIEIIQNPVRDRQAKSPNEHSTAPIPMAVQRLTPTRKSSSVAKRPAFSSSKQPKGKAANPTQTSQTNELNRKMKALSPTASGSGANHHCVATLARSSDSTTVIDKGSQQNCLNMSSATISKTPCQQHSSEKTLN

SEQ ID NO: 150155 - protein, 162 aa, Heterodera glycines
MTSNKQRQLVHKDVKLRHQFKQKHSSMQLTARFRKQIHMSSTIEENCQYATEFCQLPDNSTLIWKSTCNGNECQTCDYEKAEVINGKFTAAYGESMATWISEDHQKTLTFAKNAPELIACDGTRIVMSEQNFGIAKEQYDDIVTTTTRWKRGIRPEQLASGK

SEQ ID NO: 150156 - protein, 165 aa, Heterodera glycines
MFLRLNCLAAILFALCCTSSTFWLGSATTDEQNKAPHVDHHKLTETQQYESGKETDPKHDHEQFLGKDEARQYEELTPEKSKERLARLVPKMDLNSDGQVDELELREHINFMQKRYVNNDVERTWKNYKEEQLKDGLLDWQRLQEFDLRKTTGGPGDFTGIRQND

SEQ ID NO: 150157 - protein, 260 aa, Heterodera glycines
DLEQNQRISFFKQNKKQFPMFPYQEENKKQFPMFPYQEEKSRWDDYGEIIRPEEYIIVDSAAWDDYGEIIRPEEYIIVDSAAATQQLATVTKEKDTAGDEEEGEEQRRVAVEEWPTKCISYIAKIEILCKVEFIDFEGRSDGILCKVEFIDFEGRSDGESIKKLLSQIKPKQLVIVVIVHGTAAATRHLAQYCQGQQIGKTFTPSLGEVIDATIESHIFQVTLSDQLMSSLLFQTVKEAELSVKEAELSWLDARIANRRL

SEQ ID NO: 150158 - protein, 196 aa, Heterodera glycines
MLCPFQIISKINAKVLSLMFRRILVNRKTVLATDPTARVLALAPPNVAVVKLVLEMQDALAAGNHVEPMLALFSGTGKLRYAKEVERISPHLLATAVEAQDFQELLQKDQDRVKVERYLDACERNPRLAQEMAVAKIVQEHKNRRLCFATLSFCEQLPALFGETTHLIIDEAGQAPYVQILNLVKPLPCLTKVLIT

SEQ ID NO: 150159 - protein, 87 aa, Heterodera glycines
MLLKLADYFQVASLKSRCETHLINCVEIPLIDRFLLIERFGLDNLKNYFLHLNVDNFRAFFKANNEQFFPVISKEFLLALSVRLLDE

SEQ ID NO: 150160 - protein, 51 aa, Heterodera glycines
MLLKLADYFQNYFLHLDIDNFRAFFKANNEQFFPVISKEFLLALSVRLLDE

SEQ ID NO: 150161 - protein, 51 aa, Heterodera glycines
MTQKWLTLCCNNHKMKTPGDNHGLIGPCPDIITSEKLYYVQTLRSNTFHVP

SEQ ID NO: 150162 - protein, 223 aa, Heterodera glycines
MVVKPDHVHVLPNSVEKTDQMLMLRNSMVEKPDHVHVLPNSVEKTDQMLMLPNSMVEKPDHVHVLPNSVEKTDQMLMLRNSMVEKPDHVHVLPNSVEKTDQMLMLPNSMVEKPDHVHVLPNSVEKTDQMLMLRNSMVEKPDQVHVLPHMMVAKPDKMLMLPNSMVEKPDQVPFFPNSMVAKPGQVVTVAKKERIVLLPHSLVYIFILSKMFMHCEIPGQIKTQ

SEQ ID NO: 150163 - protein, 298 aa, Heterodera glycines
MDNKIGQREEEQKRQEEKKRDEECRRETEEEEEEEREEEREGEGSEGDGTNAEEMTERDAEQTQNATKDSPAEKMPSANGGKNSAINANDRKGTTAPSNGTSALTVEKYLMHLRQKEEREENRTLRSTLLDKSRVYQAQVDELTNELVRNAEMVARLQSEDLPQPKKPRKVPSSSVHTHSTRHQQQQQLLSTHQLQLNGGHSTRPQAKVPTNASLQQHAASKCGGIAHQLQQASTSATDADEICVALQHFVERNRTNQPQQQQQNGAGVVEAIMGVLKGGQGEGGTSTAQPTQPSKSM

SEQ ID NO: 150164 - protein, 231 aa, Heterodera glycines
QHHPLDPSVPSPAAASMAENGEVNGLDPTGARIDENIVKLGPRPLNTAELAAQCTRLMRGYSIGQRLFARTVMVQVSQSQGSSQGSLSELLSKPRPWHKLTDKGREAFRRIFGWISDDAAIDLLCQLSPRKVALTERLEHPNPQSLIGAGDPTQQMEHPQSRQSLAPTVAFEPSPKFASKENGSGTAPATLSATPGGGRWRHDDIPKEKIIDIYEAEAKRMEQECHLERAI

SEQ ID NO: 150165 - protein, 34 aa, Heterodera glycines
MYKKWSKYVHKYVFLHILPFLVKYFPIEYPFGKN

SEQ ID NO: 150166 - protein, 262 aa, Heterodera glycines
MTEIAKDGHFVSLIDHGVIKENEKYVTISELGEGNLKEKFKDLKTLISEIKAAFAHLSELVIILKEVMNALVKFHEVGIHLHFNPNNLFVFKRRNYGLGKMLIKLFVSDGFVLFDNQKKEKNQKNFMVKVKEEDIEYSTDFAAPELLQQLSNGTDEKGEVEVTPKMDIWSAGITIFEIAFSEMVGFYSTCHRTVVGELFRSTKLNLDVERPAANHLLKLKLPEESAHAGSEKWWKRYWVVIDDILIVWHKLPEIAFLAVRGL

SEQ ID NO: 150167 - protein, 95 aa, Heterodera glycines
MGTPSDTPPAAADIKDDNNNNNKKKEVGGILNIGNTCYMGAALQSLANVTALSNFLMENENRLPNKLVDGICANDQKHFGVATTGGAIRTEALEK

SEQ ID NO: 150168 - protein, 248 aa, Heterodera glycines
MAIAGCTFTALLKFPASFPFYPPTMTFLTDILHPNIDTSGKVCISILHPPGIDPLGYEQASERWNCDRTVESILVSIQLLLAEPNFNSPANVDAAVLFRSDPARYREEVRRRVEIVMAAPTQPEGQGTTQPSEGQRTQAADEQGTQPPEEQRAQPPEQQGTTQPPEQQVTTQPPEEQRAQPPEQQVTTQAAEEQGTQQPEEQGTQQPEEQGTQQPEEQGTQQPEEQGTQQPATPPPEGPQQQTDEWYM

SEQ ID NO: 150169 - protein, 112 aa, Heterodera glycines
MHRGGGKHGRFVRPAAKPTLFLSKWPQQKEEDKRNKRRSGDSGRSSTALLLCDEKFNQRNSSGIGGGRKGRGGRRGGGNGEGGGGKAEEERKKREEKEEEMERRKSGRGGKR

SEQ ID NO: 150170 - protein, 84 aa, Heterodera glycines
MFLVPMLLEAQQKMASGWPIYLYQIEHINSGYPSDIPVKGSSHGVELDPLFGIPIPYETENATEADKHFQRALIETITSFTKAG

SEQ ID NO: 150171 - protein, 239 aa, Heterodera glycines
MPAKPNLLSQELAELERRKMELEQMIASAKKEVPERKSRRPKKCQSSDEPAPQDEPEEKGPKAAALSDAPTTQPSHPPLGIVPPPPPSPVGSDMADLLHGHVNKWAMEREEAVHFLQKKKRDVAVPVHDALKKFNGGIKRLRTALDDVQESVGSIAAGVNELASSTSDGLVITVTLLQVEVDRQAVELRSLRRSLHPPPDVETVETLSVISSEEGAAVAEPSSAASVAKATEKGEKKKK

SEQ ID NO: 150172 - protein, 72 aa, Heterodera glycines
MGENDDGDGTAGGAVGGMTSAAASADSALSVHDEFAGLQKELAKELKVKDGLERFLSMASVLNPKAYTPELL

SEQ ID NO: 150173 - protein, 301 aa, Heterodera glycines
MQQDEKNRILICTPSNTAADLVARRILETNILSPIQMRRYYSLGKSVDERDRGLDTIIKMENCSIYGLYDERFKIDNYAMLTKQNVRLVFATLACSAYLEEEIRVSDFFSHIFIDEAGQSIEPETLIPITRFATRNTRVVLCGDHQQLGPVVKAHFLKAYKSCHLSLMERLMTTMRAEENSFRINGQKSVYTDGRTFCQLTDSYRCHPKIIHFSSVNFYDGTLRAVNEENRKSFCDWKHLPSKNFPLLFHALTKGAEVKQLEGRSYHNEEEVEVVEKYIQLVRETDIEDTEIGAISPFKQQ

SEQ ID NO: 150174 - protein, 283 aa, Heterodera glycines
RLNTSLTRAKELVIVVASLDFVRNLNSNPSPINIGSDSDSDSSTSESCDEDEGTVSDLSPLSSSDEEGKQFWAKQIPWRKRPSERNTLRGPKIEEMANAMSKLKTNEYTEDIQYEDLTTDPLENWPEDGGQDDGYANWNCPSKATTLLSDESKQNDSGNGYGSELEARVDKLLNANAGIGGPITDFAFNMAKEEGYSVQFVKYVLDSVDIHYRDEKLLRHMGKDVLRRKLRGAAREENWHESGPRPFDHQRALFIFLFFCRQFDEALHDSPSASSAGFHFDSV

SEQ ID NO: 150175 - protein, 108 aa, Heterodera glycines
MPSSSADCSADRSLPSSSSVIFQQFTIDQRHFVDEDYFSLESIFATNTNICCTFESKTPPVCRAHRLQFRQSRRNPRGCPIGQLGTVATPLLHIGHVHLQAIPLNNIH

SEQ ID NO: 150176 - protein, 33 aa, Heterodera glycines
ISSFSQREVSKCRRNVSFWRPFGAVLRPPFGAH

SEQ ID NO: 150177 - protein, 178 aa, Heterodera glycines
SSVAQSANSGDGQQPMATIRPKIAQMSAEVVDSNPYSRLMALKRMGIVQNYEQIREKTVVVYSRLMALKRMGIVQNYEQIREKTVVVVGVGGVGSVVAEMLTRCGIGKLILFDYDKVELANMNRLFYQPHQSGQSKVAPPPSLLFPPPFFLPNQLINSPSSSMDSAEFFGTLRNPAPK

SEQ ID NO: 150178 - protein, 124 aa, Heterodera glycines
MRNDQSPNEKRSDDGEGPSAHILSLTLITHSCTHSSVVVLSPDHSNGGRLTDQSQKGPMDDIQMGKRIEQSLFGDVVEHNDDEAIRSAGEKTQIADEVESDVEGELNERIEKEGEGLEEDDKLC

SEQ ID NO: 150179 - protein, 48 aa, Heterodera glycines
MKKSKGNDWKKLTAKSDQMMAILIGESHGVLLVDGHKFDLIGHVMPGH

SEQ ID NO: 150180 - protein, 412 aa, Heterodera glycines
MIDLAKLAYALILLRVQPFKKGDIIWVVYRKSINWPAKVTAYYPKDKKVSYVFFPLKQKNAVFKTDPAKVQLFTLDDQMPENAPLDLEYSFEQARRILQGVPEEEIIAENVQKEEEALSQMKPKKKPLTTADALKKATTGTPKGTPRSQQKQPKIVATETKFKQGDPVIVDTPMGMWPGMFISYVKGNPSLVNYSLFPREEHSHEVVQTSGEAIMAFPPEQIEQAIEDGRSSNSEVLLAALQDVQKYMKEMGHAASPHEAVGTTSSMQSPTMDTPPPLSAEDAQPMDTSEELGKEKPKKRLKVELTPPRETKPHPRMSLNSRLSNHTGDEVVDNESHSPAVATPPVPKSKKRTAASLKQNDSGNNKSLSTLIEAAKMMEGGSSSEEHHQDGVSMPNSPAGSSGAAPLVNSSR

SEQ ID NO: 150181 - protein, 88 aa, Heterodera glycines
IIPSLPPIFDVMRVSQNNKNLFFVHSFISSHILFVIFGIRFYCIQVNNCVTKMCPFWIVPLTFSSFLSFCVQSAFVRCFSESHKSEAI

SEQ ID NO: 150182 - protein, 36 aa, Heterodera glycines
MTENVDSEGDGDKMEVALNSIFTKKDNLISERNTRL

SEQ ID NO: 150183 - protein, 98 aa, Heterodera glycines
LLSKHKLELERAKRKFGDNQRSLVDAKHSLDVIRQKHQATVDELGKIDLRLGKLHDELAEKHKNDQKKCFAELANEMLTKNKEDLKQLEAKKKAEAED

SEQ ID NO: 150184 - protein, 245 aa, Heterodera glycines
MENEMYQNLDKIRDDPQWSLLISCFKKFASKGHGQPYDREDTFKEAFEEYRVQKMAEKSIDCNSYDELVARRVAQEQKIHKLEAAIAEAQCVSEQLEKEAADCENDIASMDRYIEEIQMVASAKERTLVREELVLLHENLNKTEARIYERQPIIFKQSAKIRSDYNAFMSRLRVICEPLFSEDELQQHLAELEQCSVEQAIVEFQRCRDDNKLTRLLNQLKAMMECQIRAVQQAEESMRVTNSKL

SEQ ID NO: 150185 - protein, 422 aa, Heterodera glycines
VADALSRVAIKWEQIEGKSREDIPFLLTVDEEIGLHRKTIEKETFEDSILSRVLSQIKASWVEPIDDDELMPYFRERDKLYLDGKIIRMGRQIIIPQKMRKRVLKMIHRAHFGIVRCKARARDLVWWPNWSEEVENYVKECHICQRNASNEPRVDPEYKWPEAKYPFERVHADLAGPIWGTNFLIIVDAYSKYPFVCQMNSTHSSAIVNYLREVFAFFGSPQCLVTDNGPQFVSSETEQFLENEGVRHLKTPIYHPSSNGQAERFVRTFKEIMGKLLEEGMSLKVAQFVFLQEYRVTRSATEGESPALRFLGRGIRTALDKIKMPPNLPEANGNGPSGEVTELEGPSRAQIKDKNLDPGDNVWVKEPSGKWAPGVLLQPKGERMWEVMLEGNTVTRTAHLDQLKSRRIGQSRHISTRASKRS

SEQ ID NO: 150186 - protein, 190 aa, Heterodera glycines
MAALVQSVDEFMAGIPVEEKEEKEQHLKSPTPEPKSPPPEQNPSENGESEETLRSEESANQPGPCHGAPPMRGRGQGGPGRRGPTMGPGQKQKRVNYLVRQLGKEFHNGPRSCQCWSCRRGKNWDGRGGRGGGGGSGRGYAGGRGGYGCAGGHEAHGHERGAHGHGRGAHGHWRGARGTYHHGGQGHHGT

SEQ ID NO: 150187 - protein, 669 aa, Heterodera glycines
GKAIHQCPFRAATSALCSAGVEPAKLVPKPADFSRAAEKRPRLSNACRCPQQQISGLVLRTSQECRGKCRIRFSVCSATPTAGVEPAKLVPKPADFSRAAEKRPRLSNACRCPQQQISGLVLRTSQECRGKCRIRFSVCSATPTVLDNRHFSFFSAITAHLLRRIPTKVRLRNTMFCNGAQEFPRTGNSRRKSTRPVRPAPTPPQTVLPFIFCLSNVIHLHFQLVTSFGNADHWNPPSICGELESHWDDPLPFRKPSERSLFNRRNKDQFGTRPTSTSDAKEKGDFPLPFTFFAMAFTSQVQFLANLSIPVINVVDPLMPKGSKPFACNSNETGDSFSNIGEFHAEDYNCLLDQQKKSKSFTDSTEKKKNTQRMRGVKSMVGSSSRSVDTEHGNNTERNGAKTKRRTTTKQPQSPPSAQPELNLQSLSQSQQNSREQQKSDRDSMRGSNSRSCGTEHENNSQRNGAKAKRRTTTKQPQSPPSAHNQPELNLSREQRKGDRDSMRGSNSRSGGTEHGNNSQRNGAKAKRRTTTKQPQPPPSVQPELNLQSLSQSQQTSREQQKSDRDFPTLAGLVLRTSQECRGKCRIRFSVCSATPTEPQPPPSVQPELNLQSLSQSQQTSREQQKSDRDFPTLAGAPSNKFQDLSSEHPKNAEESAEFVFPFAPQPQP

SEQ ID NO: 150188 - protein, 117 aa, Heterodera glycines
MVETGPYLFDQSFEIQGRPSMPSVKAFEKSHFSADQDLTLTDELLERICNHEIGHILSNAQNENGFFFKNIVIKSDGFTSHTSHSLPATYNDEQFLAYIDLKLGNFLRNQRENIKFL

SEQ ID NO: 150189 - protein, 30 aa, Heterodera glycines
MEAAANPHNVLEESVAADNQHNVKIFITMF

SEQ ID NO: 150190 - protein, 85 aa, Heterodera glycines
MQVPFELLNEWTKEKLTLTKANELDNRWIMKRCKIIGEKEEKQQNTVFIWLVAGTNCIGPLSPPPEKVEEQTGQSITKGTSSADQ

SEQ ID NO: 150191 - protein, 150 aa, Heterodera glycines
WICNDVWMDIFPSFDHAQLGLKLALLSPRFNALVDKHFNGKSESFSADKMSDGQNNKNSDQPQKKLGCLKRTTPNSYCSNSYCSNSYCSNSYCSNSYCSNSYCSNSYCSNSYCSNSYCSNSYCSTRTAPTRTAPTHTAPTRTAPTRTAPT

SEQ ID NO: 150192 - protein, 232 aa, Heterodera glycines
MASSASSSTKLRQPSGNHFETQNHHVNNTMEVVELSNVDNGFGEGLAIVGDQTVSLPQQHLNKSGDRKDNENGDDVMVVGQNEDAKKNGTDKANVDCILLDEEEENGTNNNDDDEIRLIEEPVPKKARPTDHPGPQPPVNRTSSAHLVLLRHRCWAQQTLATDRAKPRDQLVLRSVGPIGAVLDALLSAINTQVQKAPYAVRKLILDKQLVLPNTISMPPSHVVELLIEHDP

SEQ ID NO: 150193 - protein, 142 aa, Heterodera glycines
MGESIRVIALIDMGPLPSTIQPEPSESNGEWTATRDASGEIFKVLVDFSDQIVVEKASVDEAFLDLTAHCEMELNSQPMEELVQKLNDEIAQLFPSTFLVNESDKQQTVIAEERLNSLKEWLSNDCRVSRQQGQAPIDETNF

SEQ ID NO: 150194 - protein, 338 aa, Heterodera glycines
MASHSDEYEIDEFWLDNIAYDDGEPRPKSKKCEIIAGIDLQSPRQRREWAESRIFRQYYDIILDGNGNLTNYVICKSCVPPAKPVTFNYAGFHNLRRHLENWHGIKFGTNDKHDKMELALVEFCVADGRPFSIIKGEGFKHFMDAYAELIIERHLQKRSVLSADLLPNERTIGRKVIETLQTKESELDKKLIDVRQSACTLSLDFSQKLGVDYAVVVIHFICKNWLRNLNHFVLHCVPWPGDIQKNRENISGFIDDVLELYAIKNCRIYYVTDEGSNLSHLGDRESHHFCLAHIISTICRRITEPYVNANLTNEKKQIVNTMNEFIKELHVFIGELRS

SEQ ID NO: 150195 - protein, 27 aa, Heterodera glycines
IFLKIHQKHALKTIKKTLLEGAVFFNT

SEQ ID NO: 150196 - protein, 182 aa, Heterodera glycines
MRGQRLCQNSQLYLWPTICAVGRNAWPITSSLAKSGYSSAVWLKPRVGKVAKPTWRFCRKFLARPGYNRLILPLLKKGAKKMADLPEWAESNSEPSEAEDNDTARAEEAGTSAAEHGETSSRVWSWTTRMPKAGENEDKGKSQNTENRAKSEKPRKKEKQKNKDIFDQLLQDETDDEEDKWA

SEQ ID NO: 150197 - protein, 34 aa, Heterodera glycines
KKNLGTSVLYKCFSTQLKVNCRNFIHFFRLLFYN

SEQ ID NO: 150198 - protein, 55 aa, Heterodera glycines
YKKIGIVEFNSGTIHTLIKQPFLIHLQILAIKNQIYNKLVQGYIEQISIFLILFC

SEQ ID NO: 150199 - protein, 130 aa, Heterodera glycines
PFLQRLLLVHGTWNFERSVKVTWNFERSVKVILYSFYKNICLYIIALWFAFFSAFSGVTIFERWIIAMFNVFFTAWPPIILGLFDRPLSQRMILRHPQLYQSFQQRAFSNGRFFFWVGVSLWHSLLLFFL

SEQ ID NO: 150200 - protein, 119 aa, Heterodera glycines
MIHLVPPFADRMLAFFQIPTPQLNKQINVQTDLKPYENDPKKVGQSTIWDEYGEDCQVIKKLLHKIEQLINCKNETNCIIKLRAAPCDTVPNSNRMLCYRDLYCDKEMLKEDYDRARTL

SEQ ID NO: 150201 - protein, 157 aa, Heterodera glycines
MSGGPPITTLAEARADFGRAKGQFKRAVMTLPNHSLDGTFSSVSAHFGLDSSVGVQIVHDLGLTDPAAIFEKRVDHLCEMVSEHWDVQMFGQATRYLRLHSLHYNDLAGCFRRPSTSSAQVGGAKEGGKTKDSGGQKVVAPKKKKNGGAKKSRITKK

SEQ ID NO: 150202 - protein, 67 aa, Heterodera glycines
MALPNHSLDGTFSSLSAYFGLDSSVGVQIVHDLGLTDPAAIFEKRVDHLCEMVSEHWDVRMLGQSDS

SEQ ID NO: 150203 - protein, 49 aa, Heterodera glycines
MCSVKFGILFLLLLTIMPFIFGNDKTNLPVEKLTARQIRSEKPINGNKA

SEQ ID NO: 150204 - protein, 137 aa, Heterodera glycines
MHFNLFPLICIVIILQFKLVCLAPDSNGGQFELRIENFSKFANGPIRTIKLGQPKYIRGLHWRLNAFVNEQNGKKSLNCLIAIINSDTNWHCAVHATAEIIVGEKKIKTENFQGFVNRDEIIREWNFTEEIDVSGEF

SEQ ID NO: 150205 - protein, 207 aa, Heterodera glycines
MGPKLLGTFTGGRLEEYIPKEIDNFRKLDMNGCVVTFCHNDLLAGNILLPEAHSGNIRSCSASTASNQKDIVFIEFEYASYNYRGFDFANHFIERAINYGKKTTPFYEILPKNFPTEGQMLEFMYNYEKEGCPNASEEHLQESARTMVEETAPFVPVSHLLWGIWGLFKGASPSIEEFDYTSFAKYRLVEYYKTKDALKKIEGTDDN

SEQ ID NO: 150206 - protein, 54 aa, Heterodera glycines
MAEKRRKERNNAKLILYGRPRKTKQCSSVFSKEDFAQIGKKDGSSANERIKRIR

SEQ ID NO: 150207 - protein, 81 aa, Heterodera glycines
ADSSKVPGGGKVVPRSAAGGGLRQRRAGGAANTGRTRTAGGGGGGGMNSGGLWRFYTEDSTGLKMFVQMILLIGPNVKSKF

SEQ ID NO: 150208 - protein, 34 aa, Heterodera glycines
MYRWVGVQQGGELLTVYERDGEEGVLRFAQTRID

SEQ ID NO: 150209 - protein, 186 aa, Heterodera glycines
MNPFRIGLPTIEMDDNFDVNNFGQVESGIDRTFADQELSPSSNESIEKYDIWAQPKSPCGISIPSTISGDPDSDFLSKIEAELTCFKAGQRMEVNGDLFSWWNENTGRLPELSKLARMVHSIPATSVSSERLFCKAGLIFANSLRNRLSGNTVRQILIVKANLDALLLAPTNEFESDEESKEKDDF

SEQ ID NO: 150210 - protein, 155 aa, Heterodera glycines
MADEIQQKIVQGIGPDFFSVTSDGWSQITKSPALLSVTVHHINQQFVRADFVLDVIPMTNHTGADIAEEIGNALRTNGLNPEKIICLACPTRWNSTFEMMMTFREQKNVLLTIEGERRGFGVGSSKKSRLDIVPENLPNLEITDFDFCANCALYW

SEQ ID NO: 150211 - protein, 193 aa, Heterodera glycines
WICNDVWMDIFPSFDRPQLGLKMALLSPRFNALVDKHFNGKSELTIWRSIEIRRKDKGPEPKLSVRIDDKFVPFPMPDDRPLPSKIRFKHLRMWYIDHSVIAFLRSNHQIFDKRGTYLHLRIQSSHTTEEQPIWDIFVREIWPIFSVNIRHLDFVNAADLDHLRLRTSTTILTDLNQLVSIDSCDLLPDSIGA

SEQ ID NO: 150212 - protein, 77 aa, Heterodera glycines
MGFESDNQVHMYTFYEDSPSMGLIASTEIQPNNAKSQELADWVKGQIEGKFAAKIVHELELEVRSWPILWTGFTTKR

SEQ ID NO: 150213 - protein, 231 aa, Heterodera glycines
MKRTNASNITPPRAKRSMTPALDLDPNTVALAEQERQRTLVFIGLPESNAIRPSERVQEDREAATKILDHLEVEAQPTAVFRLGRYDPQRTTPRPLKVVMPTTTHQHMALGGWKRERARLRSLQNLNRLFVRPALTKEQLKEEYEARFRKRQQNPAPVAPAMQPRQTNVPTPVKENGPNQKEASDDISKPPEIFDQTILVCYEALKSLPPNDKIVHQIQSLEKQYPRLFNK

SEQ ID NO: 150214 - protein, 47 aa, Heterodera glycines
MWRINQSLIIYITGGFYFHWTTKLKSKKKIKSALKCTKIYLHVDKAL

SEQ ID NO: 150215 - protein, 201 aa, Heterodera glycines
MHLPMYIQVHYNPEHRYPLEHLVDLLAETVLGRYNFELRKNLTIDLFDSAANAAIRDGAGFIVSDRHRFQQISVGAKQARAVLAPTNEVLISLVSDDHSELLKYDASLSNHQRADFLNFLIKDKENEKESEGKAEQKGEKEEAVNTVAGYLIGIFINFMPYLKLFYRLLPLSAFCAFMRKTVKLPILCWLLTLTGAIRRER

SEQ ID NO: 150216 - protein, 69 aa, Heterodera glycines
MRSFFFASLALVLICASTTVSKPHATVLCLPICQDQWVQLINPENPGIPGNFDTESASGPSQLKKLQIT

SEQ ID NO: 150217 - protein, 22 aa, Heterodera glycines
MTTIPSEISMLKIEKVENLNAQ

SEQ ID NO: 150218 - protein, 68 aa, Heterodera glycines
MAKVIMGIDDQKKMAKVIIGIDDQKKMAEVIMGIDDQKKMAKVIIEIYDHKKMAKVIIVIDDQKKMAK

SEQ ID NO: 150219 - protein, 261 aa, Heterodera glycines
MQNRQAGTRSVCSPAHRWRQCYHVRVPYPLYSTSRCVSLKLLSSFRFFPTTVARLLLFLTSFKEFRLKLSERHQLKTLVNLLEPTLDPQLLCLLLQSVALVALDSSTHRNLIEMQVDDPLIQMLLPADDWYYTNHSTKFGHYVKHHAARILIYIGLGDRMHFTSKRSHRLLRPSVTYRPFATTDGDKQQQQQQQQQLNQRRRVHLRDTEDSDSGAGVQPNGDVGGGSAAENIAGTAPGAQWRGGDGKRHAGCDQRGEVIRA

SEQ ID NO: 150220 - protein, 78 aa, Heterodera glycines
LMCLVTGAVVGGAVPAGTLDGIIAGGGDVAGEGIGGAIDTGGGGGGGSSTPPKNGIAALADTTSLNNEQQQQQLLQQH

SEQ ID NO: 150221 - protein, 44 aa, Heterodera glycines
FAFRIFWRFAFRFLARKATFTPLRIGLNSQKIFKNFTYKLANFQ

SEQ ID NO: 150222 - protein, 209 aa, Heterodera glycines
PVKKKKIKREIKILENLRGGTNVIGLLDVVKDPVSRTPALVFEYVNNTDFKQLYQTLSDYEIRYYLYELLKALEYCHSMGIMHRDVKPHNVMIDHEKRQLRLIDWGLAEFYHPRQEYNVRVASRYFKGPELLVDYQLVRIAKVLGTDELFEYLDKYQIELDPRFNDILGRSSKHNRKRWERFVHSENQHLVTPEAISFLDRLLRYDHQE

SEQ ID NO: 150223 - protein, 133 aa, Heterodera glycines
MQRLGPLELFLGTMTYLVIIGITILGNTLVILAVFSYRPLKKVQNYFIVSLAASDMMVAMLVMPLHVVKFLANGQWLLGVTVCQLFTTADILLCTSSILNLCAIAIDRYWAIHNPIAYAQKRSLKLVGGMIIM

SEQ ID NO: 150224 - protein, 129 aa, Heterodera glycines
LENTHFISYTSVILISGKYAFHFIYKCNIYGKTFFISYAYFQFVFYKCILISGVWVASAVISVPPLIGWNDWTSQQLVDHCELTSDKAFVVFSACGSFFLPLLVMVIVYMKIFLSARKRIRKNRGKRFA

SEQ ID NO: 150225 - protein, 266 aa, Heterodera glycines
MSCELADMQPKHKRSHRLPVAATSVIALASATGAQILRKRTLTKAPFPDKRGVVSVPDVVGVPIPHTVGGVNAKMPQGGGGICRLTACSASMHSSVLSSCCSVQQPQLYVPKLALYIDGIQAEEELDGDSGHGGSNKDSPENTVTVPASTVLTTAPAAISHSPAAKSHSLVPTVAAAPSMVALTSSASMMAMASGGERTPAESGTEVAAHKKATSDTEREKISVAKEKRAAKTIAVIIFVFTFCWLPFFCAYVIMPFCTSCYLHPK

SEQ ID NO: 150226 - protein, 78 aa, Heterodera glycines
MPWLHIAHISRDISDAMAFMHGKGFFHRDLTSMSDLFSFGIILCQMIAATDADPDKGVFRTKSFGIVSSTLMHDLLTI

SEQ ID NO: 150227 - protein, 29 aa, Heterodera glycines
VGSFCGSISTGLTNFFNLICVSQRAKKNC

SEQ ID NO: 150228 - protein, 23 aa, Heterodera glycines
MPSAITDVMTCVANNLINEAKLL

SEQ ID NO: 150229 - protein, 38 aa, Heterodera glycines; identical to SEQ ID NO: 130624

SEQ ID NO: 150230 - protein, 74 aa, Heterodera glycines
MSFKNLPVGNLKETIGYWERKNCENGKFRRLFAFDPCGHLCACEQCAELIEKSADKKCPICRAQIVKKLRIYRP

SEQ ID NO: 150231 - protein, 228 aa, Heterodera glycines
MPVDSLCEFSGDHCLIRYFESTDQWKNSATSALNHWLYDKFSWTLADKEHFFLTANFDYLIEVATKNRQNDTKISLKDANLIDLFWHNLAQSANEGQLWKRLRLVDQQQIVPIINELCKIKWHKLMKYESIEESTKHFLMIDPFCTLWPNVQQKAEHFADNARVIEAFRRWVFLPRAQLGTESAQIVHASVELFAARTGANLMDTWWKWRTNEMNIFSCIGRTVMLLL

SEQ ID NO: 150232 - protein, 70 aa, Heterodera glycines
RWFKEGHLASGTELGARKKFEGLRNEPMLSEPILMFPDMENYDEDGYPVTEEIDAHFKDPERNVVSQIFI

SEQ ID NO: 150233 - protein, 194 aa, Heterodera glycines
MPSPTPEVTFKDRSVHEIHLENGYTYVIEQNLKHFASVITVLAKFSEQILLQPTEDGLMLSASSSARSAYAKVKLCRQFFDRLRARENLGPDGEVFCRLATKSLMHIFKSAAQSSVGPVPSCSLELDPQSDFAYVHLQCLSGIRRCFVLSLREYAMVCDNVFNERQRLKNRVTAHAKMLATLLSPLDCSDVSGG

SEQ ID NO: 150234 - protein, 161 aa, Heterodera glycines
MIAKLLDLVDKEKDESDDLVHLVTLFKSLIVKFIAAENEFMKRDLKIFQLKSLYFFMKQIIGEMFAFAIEIGTKMATESNTNQWFFDAIETMRRRWQKIMDKKQNSEFESIGDGTICNLYKFGKSFVQLLEKSTENEAKFEKKVQKYLEKKRITQFFASVN

SEQ ID NO: 150235 - protein, 256 aa, Heterodera glycines
MLSHDIKLVANEKSYYQQCRNPNPGFSPRIPSRHFFFEKEKFWTFGQEFECQKTCKSGPGDVHLCDIPVWFRYIYAYNMFNYKINVVNNVVQINMPNWNLPYFVFLDDPNELIDQKSNELLVYEHHSKQKCFVTQDYKFDKALPKCDPITLYELIKMTKIIVEMQNDQIWISPKDPEILKIIVKFLNYFDIEKTITERMAFSAEGNYCILAQFVMDLLETANGANYLPDIDIIEIFVVQTKEWCTDQRWELKKNFN

SEQ ID NO: 150236 - protein, 79 aa, Heterodera glycines
LRISNFIFENFAVDNCCYNHDVCYINKYQKRYDCDIKFCNCLNEYPNCFLTKVCSPTHILNILFFRIYYAGQFIFFENF

SEQ ID NO: 150237 - protein, 237 aa, Heterodera glycines
KTLGLFHPPQLRLLRMPSENDSNELDERVYSLAFPLKRNELDERVYSLAFPLKRTDKMDADSCGEPSIIDTFAEDDAEGGESLAEKMRQAEVQKTLFAKCKFFLNREVPKEALAFVIRSGGGFVCWDGCAPNSVDEHSEQITHQIVDRKVEKTNINRVYVQPQWVFDCFNARRILPPAKYAPMATLPPHLSPFVDARAGAYIPLERIEHAKQQNGTGQSLTTKIPKNWHKNFLKNSE

SEQ ID NO: 150238 - protein, 71 aa, Heterodera glycines
MIRRGIKVIMRGTTVIRRGTTAIRRGTTAIRRVIRRGSTVIRSGTTVIRRGTTAIRRGTTTVEKEFFNKSK

SEQ ID NO: 150239 - protein, 460 aa, Heterodera glycines
VTGGKRIEQELAEFDLPFYIVALAFFLKAFFRLYDLLVFIPFKLFADPELKKERSRERKAMPIDGKAMPIDGKPTSSWRHVDTSTALYTELFEGCPTLGKIWDKAAQLHRGHNCMLHRGHNCMGTRDILNVVEEQQPDGKAFQKLALGKYNWMNYEHVDEVIVEVASGLSNLGIVQGQKVVIFSETRKEWMISAIACFKLGLPIVTVYPTLGDEAIAFALAECDAVIVTVYPTLGDEAIAFALAECDAVLAFTSRPLLSKVFASVKDCPQLKRVVYFSELHALAEVAEKAPDAIKEAFKSIGRELYSFNALKALGHSQPDDLAMIMYTSGTTGKPKGVLLSHRNIIATASGQSAVISVSTSDTIIGYLPLAHITSDTIIGYLPLAHILEVCAEIICLSKGCRVGYSSPSTLHDRAVKIKRGTTGDCVELKPTLIACIKVGHDAIFKKVMARRNSKTQFEL

SEQ ID NO: 150240 - protein, 41 aa, Heterodera glycines
ELLMLFDSSMCLLLICKISKILVKYQKSNGQKELKNPVIRT

SEQ ID NO: 150241 - protein, 193 aa, Heterodera glycines
MENDQKNILEKVSELEKQTQKKGFFKFQQNCWDANFCHDNLEIIGDKSLIVHHKGNGNGIFKIYIKIQFPLKSRGIITFGFAVKQQTKLDESIRWEKGTYAFDNYGNIRINGKGNESNAQYSYGVGDTVGIGVHLATRQIIFTKNGLRLDTSDFLVAPSFADGSLYPFVSLFGSGDQIEANFGPNFKFDLATL

SEQ ID NO: 150242 - protein, 105 aa, Heterodera glycines
LRISNFIFENFAVDNCCYNHDVCYINKYQKRYDCDIKFCNCLNEYPNCFLTKVCSPTHILNILFFRIYYAGQFIFLENVLKKDKNNYFILPSIDMHMYFKFFIVM

SEQ ID NO: 150243 - protein, 138 aa, Heterodera glycines
MSSLNTFSSADEFSPLQPIFPNLSTSEEMSVLIARIAELNRAQTMEPSVASSEVFGQDGYGMNDDQFSLEEEEGKEQQEDRKTPTKDVSEDHLKAILERIGEMEKQQQQQTKGEGNLTKMKFSGFSFVTAQLNIFRIL

SEQ ID NO: 150244 - protein, 35 aa, Heterodera glycines
AAEERFLQSQNDQKKILERIFSEMEKEQKQLQTKG

SEQ ID NO: 150245 - protein, 344 aa, Heterodera glycines
MNVGDCFCGEALYPLPGEPIDLTRQVVQLPCECAPFHIGCIAASLIRSIQLQPNGQRRGTCPFCRRPSLTEESLLQINGNKLVKYQMQIMLCSINLTLASKVGPLPPPQPLQPPLPPPPPPLPPPPLPPPPQEPPVHIDPPVPLEEMQPQQRRRQIAAIICSRRSNEGNGRELRIHWHSAPYRNDTWEPEQHIRDQAPLIYALWHERHDNGETPSHDYVFPLRPAPWMTTIRAGRDLPEVEFAHSTARRRLFQEANGMMIVQCNMEDHIWNINPVVNGEQHAQPAQAAQEDVAADIEILVVQQQQQAAEAEQPAYEHVRQRHKRGKNFCGAERRRRRFNQRAQN

SEQ ID NO: 150246 - protein, 123 aa, Heterodera glycines
MNNHNNIDPLILDGISSAINSFDTEARNQIMQEQLRIFFNSQPLPTIGSRLNAVYSQIVDIRAQANITIAPGYLQHSIQQIENHLADSLLFLLEWLHDEQMLAEEIVNSDEILSDENLPEFDE

SEQ ID NO: 150247 - protein, 90 aa, Heterodera glycines
MRIEQQISCTIGIARDRIYEWKRELGMNLIQKYTKEEREKFVQMFLMIKKKAIEKYPHLKVTKIEEKIAEKIGVNVETLRGMKRRQGFYG

SEQ ID NO: 150248 - protein, 165 aa, Heterodera glycines
MFFLFFLIFSANATGPTNYYNKTSDYTDYIGNNIYQAFHLEQELDKSDQNSQNDQNGDKMFSNLTESDQVQTDENSTEFEPMEEENSPNFLRHNDADYGIRLNVEDNYDLCRQFVLQFDAMKAAFLKTHKNPERKKLMRIEQQISCTIGIARDRIYEWKRELGMN

SEQ ID NO: 150249 - protein, 232 aa, Heterodera glycines
MLMKLFISLFSSVFLFMPSFSTKLWTNTETDSLIDSSNRSVDDANLGNVLPSENDDAFVSILIKTDQKQIDQFLEEIYDECGEKKEKNLEIINKILKIRRKNDKKSLKTEEDEQKIKIVHQFIEMQNEFDENGKRKYENVNEIAKIIGVTHSRIYHWIDKYGLSHLKKDIQNDRRIAIVHQFFAMQKELDENGQPKYQNVNEISKKLGVYSSTIIYRWMHKFGLSRKNLFLI

SEQ ID NO: 150250 - protein, 135 aa, Heterodera glycines
MPPSDLNASIAKVQNDFALKLLREFAAFYGSASACISPPAVAVTLALTLSGAKDKTSDQLSQVSNSWQCNSDEASMYLALPKERFGLANFLANLTVDSLFEMAQKCRKVKLNVAVPKIKLEQTVELNEPLKKLGL

SEQ ID NO: 150251 - protein, 40 aa, Heterodera glycines
MFDGYFPLLTVFNLASNWHFFRHVSMCWWTKFQTFRILKW

SEQ ID NO: 150252 - protein, 118 aa, Heterodera glycines
MLHNTVIEVIDRVCKEMAIRQHKDLLFGGKTVIFSGDFKQSLPVVPHEGLTAQVTACFQTSPLFGQFTTMKLTINQRLGQGQQVYLQMCRQIGLGETGEHFWIPPQFLVKSKEELIDY

SEQ ID NO: 150253 - protein, 28 aa, Heterodera glycines
MSSLGHHRSRDRERNVEARSESAAFAVK

SEQ ID NO: 150254 - protein, 92 aa, Heterodera glycines
PKNYNITGLVDRSLQIPISKLRSVFLAYAQARLFDLEDFANCCLSYIDKNADTVFKSDEFFAEIDEKNCLKIANQWRNFNLGSINFSVMLPP

SEQ ID NO: 150255 - protein, 259 aa, Heterodera glycines
MSDIQKESEEKMAKAIFISGDGWLAVFDLLPPSQLGLGIAMVSHRFDFYVDEHFKTRKWALKFLRIRRKIGENGTKEMEIANYDGKPMPIPNIQLPRKVIGFKCIKITFIDSNAIAFLHRFRPLFASSRIYLSIYFKSDRILELLHNILPIIGKNIYGMELITEPFQRLRQIVPSLFFTECPSLRFVFPTFDDLFAEFPCDDSAMASRGQALAKWLFTPHPDDVPKVFKCAVQEFVAGRNVPLNVEGRNLPLKIEAFKT

SEQ ID NO: 150256 - protein, 37 aa, Heterodera glycines
KGGGPFVLQNFFNIKNHANLLSGVLKVANHESEMYFD

SEQ ID NO: 150257 - protein, 384 aa, Heterodera glycines
MSSKMILYVLRIPVMPEGTECGRNLYGVPMLVGCCAILWMFWDRFKKPKKKIFISADAWLSVFELLKRSQLGLGIALVSHQFDAMVDENFKTRRWALKSFEIWCDDGEDGTTEMAILNSTKKLVGSYRIQVVHLFEGKSLPIPQVQLPRKLHRPQCHRFSQPFSSAFRRLPNLAIQTNNDRILELIVHNILPILEKHLRGLELSFDVFHRLRQFVPSILNDFPFLRIVSVYASDLFTEFPANDNAMASDGQAMAKWLFTAHPNNMPNVLRCSLNKEDGNWASRIEAFKAAFASASSSVNFIVVLWFPQSFADSVVLFDLTNELTHEQLALKRTVFNTRFLLIRSPIVRDESKWTKWEEEAIGWEFFDQWNRIDIEINDEEHIGD

SEQ ID NO: 150258 - protein, 394 aa, Heterodera glycines
MQKPTPSNRPNSSVSKTLACGLEKIVNLSGNEPLSVPVLADRSDPLGLKSVQPDALPMESAEGTKEVEIMEVDEMSGEKGKRDEMGKEKVKSGGMEEEEESEGSESELLGEGGFDNLQLNPSLRAGNKAVEKEDKGKPYLVAQVRSDASSTTPEPIEIGDLFRLRKCEWTKSETGWEERGDWLYEVTGRLNYQATATDVSQLRQRILTEAVGILVDVQRARDRHVKVAMVSAPELSCVMRTYRRHFPADFTDTTSATAPLSVFNFGRSTVRHGCCIHSSLRMFCRLILVKKEAMNCSFITQTAELSWAKVQLGEKVMAAAVAAQSFDVKADLRKHTLFVEPVVINEISTRSVIIQFVMPVPSIEELTELCKIWEVDLAVGCKVNPATKAKPCAH

SEQ ID NO: 150259 - protein, 56 aa, Heterodera glycines
DQQSPSNQQTFFVSSAAQSLNAGKQPDKMPSKHKFYEYYTLGCISMRTEVAKEAIN

SEQ ID NO: 150260 - protein, 124 aa, Heterodera glycines
VYLFNNVRNTHNNDIGSQQEQQGHQQQQHQHGEQRRRPPNGGGGGMAEESDDEMMMVVVSNNNNNGNDHDQQQRRMTTMMMVNGSGGRNDDEDDDGGGGDEDEDEDDGFYAIDLGQPIDQQQQQ

SEQ ID NO: 150261 - protein, 195 aa, Heterodera glycines
LKFLKIYLIILFKIGKNMAGVALRRLLTEYRQLCHNPPEGIVAGPADEENFFEWHCLISGPEGTCFEYGIFPAKLTFSEDYPLSPPKMQFLDYPLSPPKMQFLCDIFHPNIYADGKVCISILHTPGDDPTGYETSAERWSPVQSVEKILISVVSMLAENDESAANVNAAKMWRDNRAQFERIAHKLVRTTLVKQG

SEQ ID NO: 150262 - protein, 89 aa, Heterodera glycines
MARYRQRGHHRPSEKQQQNHGHILDKDDANTSHFRHSIQQQFQEDENGVEFFATTALFVFNGLVLLRLALLLNGGNLKEAIVTVYMHCW

SEQ ID NO: 150263 - protein, 49 aa, Heterodera glycines
AIANGAIIVRPKSSSKTMATFWTKMTPTLPISVTQFNSNSKKMKMVWNF

SEQ ID NO: 150264 - protein, 301 aa, Heterodera glycines
QYTDNLNIAAPGVVTQHVCKASNLNQFQLSQINSLHPDTGVVGVYLSTEGTKVLPFVKAAAQGLREMASKPISDELLQAASPTLRQSPYLAGEVHQAGPTDLAHVALVGHGAKLTDEKAVAIQAVLCAAIGQTRQYTDNLNMAAPGVVSQHVFNTLNHQSVRLFSTTHTVDLMDFPVLEERVERVRNELKVEAAEKVAEIVKVNAGVVKEAATFANSTQRSVYTGVTAVVGISLTLFGVLLSLLWGLFGRVGSVEANLSALKVDVDARFEKLTDSVDRRFDRMERGINRLLTKNGSGGIDD

SEQ ID NO: 150265 - protein, 230 aa, Heterodera glycines
KWKTIARFLIWYELNLVLSACVRYDTVAILAVSMNIKDRVHAVVWHFDGLPMTVARCMPIRVPIGGVCLFGANEIVYLNQSVPPRGVSLNSCANEFSRFPLNDQQQLRLCLGFFCSVDSPPNDLVVVLRNGDLYILTLETDQTSMVQGIRLTKAFETSIPCCLTVCSHNFLFVGSRLGDSKLLRFSAVEKRRNSMSSDIGTKQLTNDVLVLFDEDDIHLYGKEFCNSFHI

SEQ ID NO: 150266 - protein, 49 aa, Heterodera glycines
MSYYWSLVYFAKETKRQPKCQYYKRNIRGLEDLDNGQSASAKPVDGTEI

SEQ ID NO: 150267 - protein, 83 aa, Heterodera glycines
VAVPCCNGFTSLVLALRSANIGPGADVLMPSITFVAVSNAVLNVGANPVFVDSADEWDYNPSWSLLLRAATQKTRHEKILETF

SEQ ID NO: 150268 - protein, 113 aa, Heterodera glycines
MSHENVGNKILVFISGGSKQYSIKFQNESDGQVWYKTKIRGITFNNKNKFKHEDFKEMVLNYVDEKRKYFNYDKFGPSRDSKILSQKMTKEYKPVQKKGIIDENFDIIPYGFW

SEQ ID NO: 150269 - protein, 93 aa, Heterodera glycines
MEDYYPDSMKKDEFEKFQKRYKENNDTPFLLEDQLKIYCGQDTEILLKALLAMRKIFIEITMDELSPNGFDVFKECDVKRMINPRDKENIMLK

SEQ ID NO: 150270 - protein, 121 aa, Heterodera glycines
MLNFDSLLLILFIFYFQIPFSLSVDNECRGVPTDQMAPLKYASDQWGKPMEIRFADDSKPRFNIRFGFTTEMNENLPKNKCVLIKCFDEFTEKNYFNVLKIAEKLNENNSTNEHIINLIDL

SEQ ID NO: 150271 - protein, 91 aa, Heterodera glycines
MDIWSAGITIFEITLTKMLGHFEAWHKVSLVGELFRNAKLNPSDAIFISAGSNVWWQRYWQVICAILSVWDEMPTIAFLLGKYVSIEPQKR

SEQ ID NO: 150272 - protein, 265 aa, Heterodera glycines
MIPLQNMHRRPKTGRTPKTTERQRRQLVRLVKSNPKLTAADVRRHSADALGVQISHSTAQCILRKQNLNARRPARKPLLKECHRMARLNFARAHSHWTVADWRRVIWSNESKFNLFNPDGAIHVRRPPGNRFDPKYTRGTMKFGGGGGVMVWARWSGHPHGATADGSHSTSPWRSASAFAGLISLEWSSPASSPPLSTDLSPIENLWHFVKRKIAGRHFQSKPQLWQAVLEAWNSIPFDTIDNLISSMPRRIESVIKSRGAPTKY

SEQ ID NO: 150273 - protein, 37 aa, Heterodera glycines
IVVMIFGHAIVMMTVVMPVVMTLVLFAMIFVANLATN

SEQ ID NO: 150274 - protein, 123 aa, Heterodera glycines
MNTKNEKASSIFLEASKKETERSWREVVVLAEEIEEYVKSGRGALNRTIKTREKAPYASGVRDLFLKLSDSIWEIYTILDKVNSESDKAESARREFERLKSFDQASKLEERAMSSLIESTRLH

SEQ ID NO: 150275 - protein, 66 aa, Heterodera glycines
MTVYLYCCALSDPVIIPGRPLGQVTADVVFIEFMRRQQSYQDVNLLEERISVEMTTVFRATAKMNI

SEQ ID NO: 150276 - protein, 333 aa, Heterodera glycines
EQNDEEVFDGVSDKGPINPRDAYAGGRTMPFCLYAKATDEVEIAMFDIISLYPFVNYGPIIMNNLTANCSKVIRIFLKITVEASGWPSDVKNEDEKRAFIEIYKAKYDISLDYDQIAFNSGLGMIAKLGLNSLWGKFSMRNTLSSTKIVNSMEECAEMVKDDTIEFRHRLCWMKGLEHKVSNIVLSLWTTSAARIKLYEYIEQVYKEKMCKPLYCDTAFAHPKGKCPLKEGKFLGEMTREYSDSDILEYVSAGPKQYALKLRRKKDGVIWYKTKIRGFTLNKDNRVDYEEFKSMVLGYKEGVKKVFRYPEKIGPTRDSRMLDQYLNVLLFGYY

SEQ ID NO: 150277 - protein, 27 aa, Heterodera glycines
MTIISSFLLMGVNFDKLIFMSFLVYLN

SEQ ID NO: 150278 - protein, 920 aa, Heterodera glycines
MIETPGLAKKARHFKIQDPSTRIALIDQILKQISDFEFDGVLLDFTGINLSMDQIGKHLVDFLGDFLLRNAQEYINRSKMNKDAKKLIITVRIDHDEIDHIQTEAFSRLNLMELISFTGVRTESDQAELVEKLEDKLSVDRKVITDKICEVQSPSRRFKRGAGNKRSPPPSPKAKAGAHGSPKSPKQAKHGSPKSSLSKAKLGTSKSSPSMTKHGSPKSTPSNAKIGSPKSSLSNAKHGSPKSSPSKAKPGSPKSPSKAKPGSPKSPSKAKPGSPKSPSKAKPGSPKSPSKAKPGSPKSSPSKKGHVSPNVSPSKGKSPQKLLSPKAMLQTHKSAPQSVIIKFEHQQRHDPTTKLSPMNANFRAKHSPIMAQTHFDLNHTRNRPLHKHWSTNMPGSAYADGQMSPLRASSSIVNIVELHRLPTPPPRHGLNEQQQSRIVPMKPCFSRSKSELPAKVLSSPASAINAKNWQNLAHSSVSSDGSDDFNFRMKHHQYQHSPAVPINSLAKSQSYVTLPTSPPPRFNASPSADQQKKHFVAMPSSPSYPLPVPSPNTGKMPQFLPMADKSYFAYPKSSRTANRSSGSPLLGPKPKTLIIVRDSFPLTSPSKSKSASAVDYQHRFEQFLSPIKSKNAAAVYHPQPLPLPPNMPSTSSTPIKIGQQHSSVIPTRIGHHYPSSPNRIGHHNLPQSISKTQPALAHILAHHSPHLPVGSELSPAKSLDSHHQRQMPLFAGKKYGQNHQSPHMSPTKLSNGNVSPPQSPSHRLQQIIKRHSQTKDLSREKVQRQQQSPLLQHPSIRALIGLPNSPADDQNPPPPFTPEQHALLMDTVLRPPSGLPFESPRSAPSPLELSEEQRDKLIDAIQGRPQPGLPFEDEAEHEGLHPAHRVNSAHLEHVLDAIFRKPPGLPFEDDEEEEHSSTNM

SEQ ID NO: 150279 - protein, 58 aa, Heterodera glycines
MGNNGSFERIVEEQQPPTTPVPHSRKLLRALWKERIFIVLVLIFATLVVQYLYWMKTL

SEQ ID NO: 150280 - protein, 72 aa, Heterodera glycines
NFHIKNFQIFFFKIFFLNFCGDILRRTPIHEQGVRQSDPHTSDVWRRGGGGGCARTNFSYVGPQYSPATTFF

SEQ ID NO: 150281 - protein, 72 aa, Heterodera glycines; identical to SEQ ID NO: 143389

SEQ ID NO: 150282 - protein, 50 aa, Heterodera glycines
MGRPQITHKTPSKAQQRLRFAGQCLVSSVRSVDGTLIGLWTLDLMGRKLD

SEQ ID NO: 150283 - protein, 161 aa, Heterodera glycines
AYVCSNSAYVGCPGRVSTQFAGPFVCWEARREAIDGLQVTHDSNEFMACKEELMAIKEGCRQFDSKYKPKFVMIIGTKRHFKKFFIEEEPKEGGRPFSKNLYPGDWQTGGICHVGERNRCQNGRTAGTDNGTFVFPSDCQHGGLNARARVPSGRIGQAREK

SEQ ID NO: 150284 - protein, 90 aa, Heterodera glycines
MGRDKGIRMAEPEIVSFDSPENSDQEWMAMFERCTVNRIQFILLVDERRKDTHGLLKLSEAIHKVTTQHITLEKALVSVNTQFLLFICKS

SEQ ID NO: 150285 - protein, 389 aa, Heterodera glycines
MVRQAHKISRDKGQPSFLSSTVVLNTELAKLALSCLYLTFSYGSFTKFCVEISAAFFKNKRETLKCNFTFLFFCLSQIPPFLICLFFFVKITYQLRILTTALLSIVLLRRVFSRTQWGALCISLFGVCLVQFASSTTSGKGNAGGALSAGQKVHDEQLLGLLTIIIMCWTSAFAGLFHFIIIKIIFYKIYFEGVYLEGVLKQSSCDIWTQNIRLSVITLPFAFMTVVNDSKSIQKNGFFAGWNWLLWIVLFSAAASGILVAVVMKYADNIKKSYCQSVALGGTALLSIVIGDSQFSVLLLVGVSLVIASVFLYTLNPPPRVKPSTPEVPAHHPQDDDIDGLEEQQFSTDDDDDETNNGSNRIVELKLDDIKRIGREAPADNTFLSESGD

SEQ ID NO: 150286 - protein, 486 aa, Heterodera glycines
FRCVTYSFLFLFKTKIRQERIRETKVLIIGAGGLGCPVSMYLVAAGRETKVLIIGAGGLGCPVSMYLVAAGIGRLGIVIGRLGIVDHDVVSIDNLHRQTMHDQKRVGQVVSIDNLHRQTMHDQKRVGQSKADSLKESLSRINNEANVVAYNVLLTSKNVLQLFRDYDIVADCSDNVATRYLINDACVLSGKPLVYGSALGWEGQFTVYNFKNCPCFRCIFPDPPSPEHVMSCSEAGVLGPVVGVIGSLQALEIIKIAVSGKCSFAGNLWMFDGFEGISKSFAGNLWMFDGFEGISKRISLREKMSNCAICSENPRITEREKMSNCAICSENPRITELQDYQKFCRSDPSDKVRSLCLLSAEQRVSPTEYLNLRNKSGSFILLDVRPPTEFEICHLPEAESLLFQMKNKIYLLTINRFSLGGIEKSKNNICPCSVFVVCHHGNDSQSACHLHKQLSEAGIGDRFIVRDIVGGMDGWALEVDADFPRY

SEQ ID NO: 150287 - protein, 214 aa, Heterodera glycines
MASFNPFAWESFFFGKLDRSEAERMLAPCEPGTFLIRESSTAQDCYSICVKGCGVGDHSNHFLIEKLVTNESGGAPLYRVIQKIYESYIIDLKLNSQISTLQFADMHSLLNHFKVFALEPVPIKLIKPLEKPFLEKVMAKYKFESERISDLSFERGEQLEILGKPEQGWWLARSAGREGHIKSESKIIFFARNCLGETGMIPANRVKPVIILFL

SEQ ID NO: 150288 - protein, 107 aa, Heterodera glycines
MSDDYFRTQCDDCDDALSVLNPSSTNSSSNGCGSAGNRSSAHSVGDQQLHGERGQFLYLQEILSNGMCRGTNESGKVGLFPITYVEAANIEPSESPWNISANANPNC

SEQ ID NO: 150289 - protein, 73 aa, Heterodera glycines
MHEPYLGLLYLMRQNFDCAKFEENLESILVIECEKYRNYLDILYEYLFKANRGYIGLSNDTNNVGFGWQRKKL

SEQ ID NO: 150290 - protein, 113 aa, Heterodera glycines
MPMDFEYIVANVAGPGTDSAFLDEDFEGCNCTDGQCCTSAAGGCSCLPGKRDNYNPITGKWIDQGGTDQRQGVPHLECHQNCVCAWEPDKCANRQVQFGVRQPIRVSVDNLQN

SEQ ID NO: 150291 - protein, 27 aa, Heterodera glycines
MHRSHQSHGIIMGIRENDMSGDAKSDR

SEQ ID NO: 150292 - protein, 275 aa, Heterodera glycines
MYKFSSEVKENTAFLKKLVSTRSEQKKNELIENATADQILAIVEICANILSFSFKLTNKQKRRENGKKKDTTGEWYSPGSCLDTCPEFFSPTFIRKNNIMKFAKKMLMIPEAEYLALRIAMNWLYKERRTVKGILENRPQKVVIENHVPGPNAAPYLGLNNQSKPQETDEPRKIIIPRKRLKEQTPDPESDNDTLEELTPEPQTPSTLKTPVPTKTIIHPTLLNGFFRYVKENKDLFKITAAGKVQSNIDTEGSNSKRHWLINQKSCGDVEGKRQ

SEQ ID NO: 150293 - protein, 60 aa, Heterodera glycines
VFLIALSKDMRVQFMRTIRKTVFFCNGNTAAAATATAALQTVADSYQYSNRIRSVFMLLK

SEQ ID NO: 150294 - protein, 81 aa, Heterodera glycines
MSKQFLLFALLLLLLPMDTLQECSWDGNLCTGSCSTGCEQLSQANCACAKRRKSKEKQKQQQKNKSVECDEDEKWIIILIK

SEQ ID NO: 150295 - protein, 28 aa, Heterodera glycines
MNFVERFVNFINDLYDWLYLNNVMASYE

SEQ ID NO: 150296 - protein, 681 aa, Heterodera glycines
MAKKCRDEAKCDEIIQLKNAIRNLVGHSLFLELERQNALALSFGNCNCQQQKLKMTYFAITDIVDDAQLSSEYTKMFLENATDAKTAETALSMRFCFAKIIELFSTIYSHYKLHLPNSEVSNIIRTFFVLSVQKWVLKLPNVLIEIADRSSSTMALLLVHDWLAQLSSECNEMPQMGGKAQKMATTRALLNWAKKDALREIRAQFYEQHTQNMVRLYESGAHNRNAFSHFLEQCQLDGRGDKFRVRQFYANGGGWKSGEKDEEYDRLVSKHPKVKQMLRIELNDEEIMEIQIRNYLKYMDVQTEQQNQMTRLKYLLNILVFYQCFKKNAPLLRPSADGKSEQLDNHLAELELLMNGAREALSVDELLQNETQLILVFAFPLSSSSSSSQSSSAENDGEEGSVCSDEILMRLYKAILVEKVPSESAKWQIGIDSLYFQHKTTVLNSIKEIELLAMSSKVKDHTSVDKLAQLKAEVAGLELFSPLKDDDEKMRKICWMKMFFKLFVGVTTKGGEAAQKRGALTTLSKLDPSANDLVEKDCENLPYLREYFKMFLSDSHNIGVVGTFSVLQLLAQFSELVPFINNNPIPFGSIQSSENPQSNEDKEMRNLYKAYLTEDDLAKIGKYEAIIGVKYLLDVAKKNEEKDRPKLKEWHKIRMAKVRAQTMATLKMLDIYADSAEQLFR

SEQ ID NO: 150297 - protein, 185 aa, Heterodera glycines
MIATNICAIQLSAAIFRYLRTFVPSILDDFPSLRIINAYYDGFFAEFPCDDSAAASDGQALAKWLFTPRPDDVPKVFKCLLRWDDGHFESRIEDFKAAFANASSPVNFIAVIRFPPPFANSVVLFDLTNELTREQLTFKWMDDIGRFLLIRCPIVRDESKWAKWEKEAIGWNFMDQWNRIDIRVS

SEQ ID NO: 150298 - protein, 108 aa, Heterodera glycines
MSDRRKEAEEKMAKAIFISADCWLCVFDLLPPSQLGLGIAMISHRFDFYVDEHFKTRKWSLKSIELLPKYEADGTKEMKIVNYDGKEMSIPQNPLPKKVVGFKAILIR

SEQ ID NO: 150299 - protein, 78 aa, Heterodera glycines
MRNLAGGEKGGTKLPPELPRSVADGCSAAFAFGTGTLMAFHCHCRLIIEKYFKIDFTMNKNTNSYNLNYNELNRPFWN

SEQ ID NO: 150300 - protein, 272 aa, Heterodera glycines
MPPLNVTLRWLISTTNQTTVQTTNEPLMKPILEYTNEVNVLGLIVFCTGFGVILSILGEQARLMTNFFIVLDAALAMYVVTVICGLMIHSLLTLPLLYYAITRQSPFEFMTGMLQAIATAFGTASRDRIRTSVNVLGDGFGCGIVSHMTKERLIESDNVDLIRQLKTDIELLNAPTTSPGSALLTPNASTRTRESAAQGTAKRTQNNAQQQQLQIPNAKNSPSFFVFPSPAAQTKNFQKTQREGRKSSSVSAAENGQVKGEAIWGNKQNTTR

SEQ ID NO: 150301 - protein, 370 aa, Heterodera glycines
SRRDFGGEISAARFRRRDFGGEISAARFRRRDFVPSPNYANSLSPNMNAFQKCGFQVIRRAPVLQNVNVTNSSMHALQLLHPSNNIVLSRLNISDNRGIGVNILATTLQSTGHSSRVPYGPITIPYHVPGMLNICSMSKQVKVSGRVLLYYKYDSYPVDCVKVFSSSWSRLGFRLLQANFYQGPAGVPRPDASSSWSRLGFRLLQANFYQGPAGVPRPDALHIYAGTKFFSSNLLRIFNASSDLSGSVATQNPFLGIHLRATAADGDYGFLAEVAVLPTADQHQAFLAEVAVLPTADQHQAGGEISLRVSRLLNNDRGALRYGNIGEMGPNVIIEQCVMDKNGYHLYGNISTSLQAAELHLHNTIFFILI

SEQ ID NO: 150302 - protein, 85 aa, Heterodera glycines
VVCRELGFGPQNAYSWLTPQWDYNPQLRILKTYMEPRECRGFECRLESCALRLTATLSDWQCINSEQFNYVHCGPEGRLFRKKIF

SEQ ID NO: 150303 - protein, 265 aa, Heterodera glycines
MADFEGRVKAYRFVAYTTVSFSIISLLSHNAKDIWSEVSQLKGMPLLVAGNRTARSAYGSCQECCSGGAQGQPGQPGQPGRPGNPGAPGSPGQPGQTPQTPCEQVHPPPCTPCPGGQPGNNGPPGPPGAPGAPGQPGTGGGQPQPGEPGPPGPNGQPGQPGQPGAPGQPGQPASPPPTEPAPAGPPGEAGAPGQPGQPGAPGQPGAAGQPGPKGPPGGPGQPGNGGAPGQPGQPGQPGNPGERGICPKYCAVDGGVFFEDGTRRR

SEQ ID NO: 150304 - protein, 193 aa, Heterodera glycines
MNSPNLTVFKPNDQLINSLIAFMLQKSHGLIQAENELDIVKRKCVINEDYRRHVAILEVHTREEEIERETAKAVAEIKKKVANLSETRCPTVVTTAISSTSTVSAAINTTPEISTTPKVATAINTTPIVAMAINTTPEISTTQKVTTAISTIPAISTTQKVATAISTTPTVATAINTTPAISTTSKIATTIST

SEQ ID NO: 150305 - protein, 469 aa, Heterodera glycines
MDQHDNNNDLSDQHDEVKQNDDHEDGGDAECDQQMVDNSVALHNAPSSPVKKHGKANGNGAVAVANDEEEEEQKVVVVQQQQQQQIGEDGQQNRHVHGDDDNDGVGDDQSFLTNVLRRSTRKRTKRDNGSSTTTIIHYADQMEEDEEEENNEQDSLADHREEAAFAVPLLPRNGPKKRSSPKKMAKKRGRPTKLEAIIRSMELAMNANGARRKGGKTVAMKKGGRKMKTKAQEEDEEEWPRRKRSYTRRKSKVDRDEEEEKDDEDKKESQSCSNSIVPPAEEVLPVEVKEEEKPNDEAIANDEIEVIMKGMERHFHRKRGRPKKKALLASPTAATVNPQQQQQQKCQPQQQPQQHQQQQHASGGPSSRYTTAHPVTAACSSTFVCFMCTAVEKDFDSFGRHLRSHPEQWKQCTVCPQNSNNKMEEDQQQMEEDQKQQQQQENKPKKRRNFDHPVHFLKHLIEFHMNFQQ

SEQ ID NO: 150306 - protein, 121 aa, Heterodera glycines
MSEFESECSGTAKLNQLGPVEISADTLYTTLVVHAVEHHDGGAQEMPSKNKNNANTDGTTIDGGGQRRQIVDEEEELKEEPMDVRRGQTQTMEADEEGGQCCNEAEKSGGTASSLDKTSDG

SEQ ID NO: 150307 - protein, 184 aa, Heterodera glycines
MQKPIIVNIIALANLGTGIKLNSLTITECEFKYNPRKFNASVIKCISPIKATALLWESGKMICLGTKSLIDCENAIKIFIEIIKGSGCPGASYTGHTIENIVSTFKFGHEIELNEFRKNRRAFYEPEIFCGLNFKRGKSMTALIFWTGSENHIKISGFEKIPQKVWDQKKGINFLESKECASIP

SEQ ID NO: 150308 - protein, 121 aa, Heterodera glycines
MSIYSGGLLTDVIAADDGPNATGGQALAKWLHIRRKDGHPKRLACRCDDVSAAKEWVSNFKQVVASGAFLCATNCARYTITLDTSAPIEPFELVNEQTKEKLTLNQLSSLKKAKAWVPCWT

SEQ ID NO: 150309 - protein, 169 aa, Heterodera glycines
FMGIPDTLVSAERRLQMGDTVVVSKFEWKEGFERLSYDLNPVDSLRSWLVQGRINVQAVAIEVEVIKLVIGSFQPGFVTNLKRYRGGDFRSATVISAQMLRPQTIYARQLTEISPGRIMLNQLLYLNLAKITSPQEWWMGENYILPLVTPFLKGNEIRSHGKTVVIGAK

SEQ ID NO: 150310 - protein, 343 aa, Heterodera glycines
SVRAQENITVKEVLDLDELEDIAEFPICLSLSIDQRLLSNCYLKFGGCTELVSDDATAFTSEFFREFCSLLYINKKYAVPHWSQGNAATERTFRTFNNILSKYVTKEQPDFDEFLDYANFCYNTSVHSTTHETPYFLMFGRDPIFCIDQIIDPRIREPIAFTDETEFKQKLVTSLRRAWKITAELHAEAQEKMKIQYDKTMRTPNLKIGDRVLLRNYDGKRNTSKKFHFPWKGAFRIIEIEGIYATITSCNSPQANPRRVHINQLKKCYENLGPACTSPRLSDALAELEADEIHNLPGHSHPTDIPKHSSSLDRESDDEIPANEPNIDNNEVETSLTPPKYGL

SEQ ID NO: 150311 - protein, 1111 aa, Heterodera glycines
TFVLIQAILILMVKKRSAHRRNENMAASNAAVGGKEVASATPIIESLEVASATEQIELIETETIPQNLESFEVASATQKGLIMETAFAVEKVIETDKTRGISAGLEEEFERGMELGEGQYVERNTENIEMETIQDFTATQFSNVSWSEPCAIASPVPMSPNEEHGTEGGVLKYLVCQTDVKSVVGGKLSGQGPFFMGIPDTLVSAERRLQMGDTVVVSKFEWKEGFERLSYDLNPVDSLRSWLVQGRINVQAVAIEVEVIKLVIGSFQPGFVTNLKRYRGGDFRSATVISAQMLRPQTIYARQLTEISPGRIMLNQLLYLNLAKITSPQEWWMGENYILPLVTPFLKGNEIRSHGKTVVIGAKESLDSFCFPFNQFSVRLMGAAAAVQRSFEMEKLAKQTVNVQLVWQRPEVRPDEAQTNLKKAQRVSFEWLINNKSAVADFLEAWEEDTPVEAKVARDSKAQCCAVGRVIELSVNETAPGNFLMNVKMFLSYRAKKGYDRGWEDWESILDERESNVIPIPNYGGLPFREQAFELSVPSDIAEGQYPVSKILKILMGMGKDGAEQRPTVRLSSNEIAVGKLNEDQRITHGLFLDDESRVIFMQAPAGTGKSVSVAACIASVLKKDRDAAILAVSPLNVAVCELVKDTMESLSEKVAMLALFSGQGKGRYMDRIRPLGDNLLVEAVQRDGNVPSAEGTEPKKWSDNKTFKQYVDDFNTAPRRARERTTTAALLKQTKYRVYFMTLALAEELALDLGNVTKQQLRVHLPSQMTVIRGKFGFESILEVLETAKGIDRTVLSKCYRSHSAIVRCLDAGVYSPAGDRLVPGRPDVEMSSFLNYMGPRIVAENCPIILIHQKSSTQMESISFSSHNPEQRETALGFLGIIQGTFPGLIQVVCFYQAERKHMVSEIERRRWPNVKVSTVDSIQSQEAELVLVITTRSAAGRSSEADTGKEFWADCARTTVALSRPKFGLVIIGDLSLIWHKGTVWRRFIDETLKMTVAVTPEPFAAQANVFPPISSGHAQPPAFSHGMMIIDTSVRPPPINMIAGHTMPMPSNCPGPSTRMAPYPPQYLPSYAEAAQQAPSNSNSNRRIDVKCYRCGKIGHFSKRCRT

SEQ ID NO: 150312 - protein, 59 aa, Heterodera glycines
MGFPEHETQQAVGPSPVSRLSGGGGTPIATGELRQRQIGSAELQQPTTAPAILGLNTNV

SEQ ID NO: 150313 - protein, 253 aa, Heterodera glycines
MLFHPSRQSIAPIFVKVTRSVTSRVAALVQLVDAPEPLSPDDGLVVVDDELLVDVLAEEVVLGVVDVLVDEVVLDVDDVLVDEVVLDVVEVLVDEVVVGVVDVLVEEVVVGVVDVLVDEVVVGVVDVLVEEVVVGVVDVLVEEVVVGVVEVLVEEVVVGVVDVLVEEVVVGVVDVLVDEVVVGVVDVDVLVEEVVVLGVVDVLVEDVVVGVVDVLVELVVLVLVLLVDVVVVSSCPKTATSFDALNSKRRHTV

SEQ ID NO: 150314 - protein, 553 aa, Heterodera glycines
MAYSPVVDTHPFVPSPPQRFLGASLGGGVQPPSKPSIGHQSQVKNSRGKPPPPPTPPTVINQQKEQSPPVPTAASSVASPQQRQSVLTAVSSVASPPPPPPPPPPPPLFQSKPTLPDNSWPSTSTESKASFVDPTNNKRSDLLQQIQQGTKLKKVGPPSTERTPVPTNAPTLRDNMMEQIKQGTTLKHIDQSDVENSRCSAGGSAQEIGVLTGALAKALEEQSRHAMYSIENSALASPTSSTSMSSTTFSTSARSPVKLQFKSLDKALPTNPWESELDAFLELCGQSAVFSWNEFEDSTCSFDKWSKIGEGAFGEVFKGLLENAFIALKVFLFFFFALFQIFSKVIPFAVNEEQCSKLVNGDYLKPAKFIFNELFITNELTKLSEDTGSGFVTPSFTQLRMSKIVRAGDADDIDAILKDFELETNEANKKAAKKRGKGGASGQSTEKHAENEADGAVEKAEEAQDWTAAINALKPIDQQFTDHKYPQGQICEYRSDKDDRTAINRMTSEEKKALDSSYEEIYNDFRRAAESHRQTRKYVKSWIKPGMKLIDIW

SEQ ID NO: 150315 - protein, 114 aa, Heterodera glycines
MALAHFVLIDDCDGGGRTMPDHVDWKSVKPTHSSVSFFYILFKLFNLGSALVQLCLINYFMVPANYTYWGFDVLADLVAGRDWSRSRLFPRVTFCDFKIRQPAQHLPAHRFHPP
